United States Patent Application Publication US 2021/0260178 A1 - sequence listing, part 2

SEQ ID NO: 1635 - RNA, 1473 nt, Artificial Sequence
  derived and/or modified protein sequence (opt5) from LASV(Lassa virus/H.sapiens-wt/NGA/2018/ISTH_1643;Clade II)__AVV65119__GPC
augggccagaucauuaccuucuuucaagaggugccccacgucaucgaagagguuaugaacauugugcugaucgcccucagccugcuugcuauucugaaggggaucuacaauguggccacaugcggacucuucggccuggucuccuuucuucugcucugugggagaucuugcagcacgaccuauaaaggaguguacgaacugcagacacuggagcucgacauggcgucccugaacaugaccaugccucuuucuuguacaaagaauaacagccaucacuauaucaugguuggcaaugaaaccgggcuggagcucacacugaccaacacguccauuaucaaucauaaauucugcaaccuuucugaugcucacaagaaaaaucuguacgaccaugcccucaugagcauuaucuccaccuuucaccugagcauuccgaacuucaaucaguaugaggccaugucuugugauuuuaacggaggcaagaucuccgugcaguacaaucugagccacacauaugcugucgacgccgcuaaccauugcggcaccauugccaauggggugcuccaaacauucaugcggauggcguggggaggcucuuacaucgcccuggauuccgggaagggaagcugggacuguaucaugaccucuuaccaguaucuuauuauccagaacacguccugggaagaucacugccaguuuagccgccccuccccuauuggcuaccuggggcuccugucucaaagaacacgggacaucuauauuagccgcagacuucugggaaccuucacauggacccucuccgauagcgagggcaacgaaacccccggcggguacugucugacacgguggaugcugaucgaggcugagcucaaaugcuuuggaaauacggccguugcuaaguguaacgaaaaacaugacgaggaguucugcgauaugcugcgccuuuuugacuucaauaagcaggccaucagacggcugaaaaccgaagcgcagaugucuauucagcucaucaacaaggccgugaaugcucugauuaacgaucaacuuaucaugaagaaucaucugcgcgacauuaugggcaucccuuauugcaacuacuccaaauauugguaccucaaucacacagucaccgggaagacaagccugcccagauguuggcuggugucuaacggaaccuaccucaaugaaacgcacuucagcgacgauaucgagcagcaggccgacaacaugauuacagagcugcuucaaaaagaauauaucgaucggcagggcaagaccccucuggggcucguggaccuguuugucuucuccaccucuuuuuaccugauuagcaucuuccuucaccucguuaaaauuccgacacaucgccacgugaucggaaagcccugcccuaaaccccauagacugaaucacaugggcauuuguuccugcggccuguauaagcacccuggggugcccgucaaguggaaacgguga

SEQ ID NO: 1636 - RNA, 1473 nt, Artificial Sequence
  derived and/or modified protein sequence (opt5) from LASV(LASV003-NIG-2008;Clade II)__AIT17580__GPC
augggccagaucauuaccuucuuucaagaggugccccacgucaucgaagagguuaugaacauugugcugaucgcccucagccugcuugcuauucugaaggggaucuacaauguggccacaugcggacucuucggccuggucuccuuucuucugcucugugggagaucuugcagcacgaccuauaaaggaguguacgaacugcagacacuggagcucgacauggcgucccugaacaugaccaugccucuuucuuguacaaagaauaacagccaucacuauaucaugguuggcaaugaaaccgggcuggagcucacacugaccaacacguccauuaucaaucauaaauucugcaaccuuucugaugcucacaagaaaaaucuguacgaccaugcccucaugagcauuaucuccaccuuucaccugagcauuccgaacuucaaucaguaugaggccaugucuugugauuuuaacggaggcaagaucuccgugcaguacaaucugagccacacauaugcugucgacgccgcuaaccauugcggcaccauugccaauggggugcuccaaacauucaugcggauggcguggggaggcucuuacaucgcccuggauuccgggaagggaagcugggacuguaucaugaccucuuaccaguaucuuauuauccagaacacgacaugggaagaucacugccaguuuucccgccccagcccuauuggcuaccuggggcuccugucccaaagaacccgggacaucuauauuucucgcagacuucugggaacauucaccuggacccucagcgauuccgagagcaacgaaacacccggcggcuacugucugacgcgguggaugcugaucgaggcugagcucaaaugcuuugggaauaccgccguugcuaaguguaacgaaaaacaugacgaggaguucugcgauaugcugcgccuuuuugacuucaauaagcaggccaucagacggcugaaagcggaagcccagaugucuauucagcucaucaacaaggcugugaaugcccugauuaacgaucaacuuaucaugaagaaucaucugcgcgacauuaugggaaucccuuauugcaacuacuccaaauauugguaccucaaucacacagucaccggcagaacaagccugccccgguguuggcuggugucuaacgggagcuaccucaaugaaacccacuucuccgacgauaucgagcagcaggcugacaacaugauuacggagcugcuucaaaaggaauauauggaucgccagggaaaaacaccucugggccucguggaccuguuugucuucucuaccagcuuuuaccugaucuccauuuuccuucaccucguuaagaucccgacccauagacacgugauugggaaacccugcccuaagccccaucggcugaaucacaugggaaucuguagcugcggccuguauaaacacccuggcgugcccgucaaguggaagcgcuga

SEQ ID NO: 1637 - RNA, 1473 nt, Artificial Sequence
  derived and/or modified protein sequence (opt5) from LASV(LASV006-NIG-2008;Clade II)__AIT17584__GPC
augggccagaucauuaccuucuuucaagaggugccccaggucaucgaagagguuaugaacauugugcugaucgcccucagccugcuugcuauucugaaggggaucuacaauguggccacaugcggacucuucggccuggucuccuuucuucugcucugugggagaucuugcagcacgaccuauaaaggaguguacgaacugcagacacuggagcucgacauggcgucccugaacaugaccaugccucuuucuuguacaaagaauaacagccaccauuauaucaugguuggcaaugaaaccgggcuggagcucacacugaccaaccaguccauuaucaaucacaaauucugcaaccuuucugaugcucauaagaaaaaucuguacgaccacgcccucaugagcauuaucuccacguuucaucugagcauuccgaacuucaaucaauaugaggccaugucuugugauuuuaacggaggcaagaucuccgugcaguacaaucugagccacucuuucgcugucgacgccgcuaaccacugcggcaccauugccaauggggugcuccagacauuuaugcggauggcguggggaggcuccuauaucgcccuggauagcgggaagggaucuugggacuguaucaugaccuccuaccaguaccuuauuauccaaaacacaaccugggaagaucauugccaguucagccgccccuccccuauuggcuaucuggggcuccugucucagagaacgcgggacaucuacauuagccgcagacuucugggaacauuuaccuggacacucuccgauagcgagggcaacgaaacccccggcggguauugucugacccgguggaugcugaucgaggcugagcucaaaugcuucggaaauacagccguugcuaaguguaacgaaaaacacgacgaggaauuuugcgauaugcugcgccuuuucgacuucaauaagcaggccaucagacggcugaaaacggaggcgcaaaugucuauucagcucaucaacaaggccgugaaugcucugauuaacgaucagcuuaucaugaagaaucaucugcgcgacauuaugggcaucccuuacugcaacuauuccaaauacugguaucucaaucacaccaagacagggaaaaccagccugcccagauguuggcuggucucuaacggaagcuaccucaaugaaacacacuuuuccgacgauaucgagcaacaggccgacaacaugauuaccgagcugcuucagaaggaauacauggaucggcagggcaaaacgccucuggggcucguggaccuguucguguuuucuaccagcuucuaucugaucuccauuuuucuucaucucgucaagaucccgacacaccgccauguuauuggaaaacccugcccuaagccccacagacugaaucauaugggcaucuguagcugcggccuguacaagcacccuggggugcccgugaaauggaagcgguga

SEQ ID NO: 1638 - RNA, 1473 nt, Artificial Sequence
  derived and/or modified protein sequence (opt5) from LASV(LASV035-NIG-2009;Clade II)__AIT17588__GPC
augggccagaucauuaccuucuuucaagaggugccccacgucaucgaagagguuaugaacauugugcugaucgcccucagccugcuugcuauucugaaggggaucuacaauguggccacaugcggacucuucggccuggucuccuuucuucugcucugugggagaucuugcagcacgaccuauaaaggaguguacgaacugcagacacuggagcucgacauggcgucccugaacaugaccaugccucuuucuuguacaaagaauaacagccaucacuauaucaugguuggcaaugaaaccgggcuggagcucacacugaccaacacguccauuaucaaucauaaauucugcaaccuuucugaugcucacaagaaaaaucuguacgaccaugcccucaugagcauuaucuccaccuuucaccugagcauuccgaacuucaaucaguaugaggccaugucuugugauuuuaacggaggcaagaucuccgugcaguacaaucugagccacgcuuaugccgucgacgcugccaaccauugcggcacaauugcgaauggggugcuccaaaccuucaugcggauggccuggggaggcucuuacaucgcucuggauuccgggaagggaagcugggacuguaucaugacaucuuaccaguaucuuauuauccagaacaccacgugggaagaucacugccaguuuucccgccccagcccuauuggcuaccuggggcuccugucccaaagaacacgggacaucuauauuucucgcagacuucugggaaccuucacauggacccucagcgauuccgagggcaacgaaacccccggcggguacugucugacacgguggaugcugaucgaggccgagcucaaaugcuuuggaaauacggcuguugccaaguguaacgaaaaacaugacgaggaguucugcgauaugcugcgccuuuuugacuucaauaagcaggcgaucagacggcugaaagccgaagcucagaugagcauucagcucaucaacaaggccgugaaugcucugauuaacgaucaacuuaucaugaagaaucaucugcgcgacauuaugggcaucccuuauugcaacuacucuaaauauugguaccucaaucacaccgucacagggaagaccucccugcccagauguuggcuggugagcaacggaucuuaccucaaugaaacacacuucagcgacgauaucgagcagcaggccgacaacaugauuaccgagcugcuucaaaaagaauauaucgaucggcagggcaagacgccucuggggcucguggaccuguuugucuucuccacaucuuuuuaccugauuagcaucuuccuucaccucguuaaaauuccgacccaucgccacgugaucggaaagcccugcccuaaaccccauagacugaaucacaugggcauuuguuccugcggccuguauaagcacccuggggugcccgucaaguggaaacgguga

SEQ ID NO: 1639 - RNA, 1473 nt, Artificial Sequence
  derived and/or modified protein sequence (opt5) from LASV(LASV042-NIG-2009;Clade II)__AIT17592__GPC
augggccagaucauuaccuucuuucaagaggugccccacgucaucgaagagguuaugaacauugugcugaucgcccucagccugcuugcuauucugaaggggaucuacaauguggccacaugcggacucuucggccuggucuccuuucuucugcucugugggagaucuugcagcacgaccuauaaaggaguguacgaacugcagacacuggagcucgacauggcgucccugaacaugaccaugccucuuucuuguacaaagaauaacagccaucacuauaucaugguuggcaaugaaaccgggcuggagcucacacugaccaacacguccauuaucaaucauaaauucugcaaccuuucugaugcucacaagaaaaaucuguacgaccauacccucaugagcauuaucuccacauuucaccugagcauuccgaacuucaaucaguaugaggccaugucuugugauuuuaacggaggccggaucuccgugcaguacaaucugagccacgccuaugcugucgacgccgcuaaccauugcggcaccauugccaauggggugcuccaaacauucaugcgcauggcguggggaggcucuuacaucgcccuggauuccgggaagggaagcugggacuguaucaugaccucuuaccaguaucuuauuauccagaacacgacaugggaagaucacugccaguuuuccagacccagcccuauuggcuaccuggggcuccugucccaacggacccgcgacaucuauauuucuagacggcuucugggaacauucaccuggacccucagcgauuccgagggcaacgaaacacccggcggguacugucugacgcgcuggaugcugaucgaggcugagcucaagugcuuuggaaauaccgccguugcuaaauguaacgaaaagcaugacgaggaguucugcgauaugcugagacuuuuugacuucaauaaacaggccauccggcgccugaagacagaagcgcagaugagcauucagcucaucaacaaagccgugaaugcucugauuaacgaucaacuuaucaugaagaaucaccugagagacauuaugggcaucccuuauugcaacuacucuaaguauugguaccucaaucacaccaucacagggaaaaccucccugccccgguguuggcuggucagcaacggaucuuaccucaaugaaacgcauuucagcgacgauauugagcagcaggccgacaacaugaucacagagcugcuucaaaaggaauauauugaucgccagggcaaaaccccucuggggcucguggaccuguuuguguucuccaccucuuuuuaccugaucagcauuuuccuucaccucgucaagaucccgacacauagacacguugugggaaaacccugcccuaagccccaucggcugaaucacaugggcauuuguuccugcggccuguauaaacacccuggggugcccgucaaguggaagcgcuga

SEQ ID NO: 1640 - RNA, 1473 nt, Artificial Sequence
  derived and/or modified protein sequence (opt5) from LASV(LASV045-NIG-2009;Clade II)__AIT17596__GPC
augggccagaucauuaccuucuuucaagaggugccccacgucaucgaagagguuaugaacauugugcugaucgcccucagccugcuugcuauucugaaggggaucuacaauguggccacaugcggacucuucggccuggucuccuuucuucugcucugugggagaucuugcagcacgaccuauaaaggaguguacgaacugcagacacuggagcucgacauggcgucccugaacaugaccaugccucuuucuuguacaaagaauaacagccaucacuauaucaugguuggcaaugaaaccgggcuggagcucacacugaccaacacguccauuaucaaucauaaauucugcaaccuuucugaugcucacaagaaaaaucuguacgaccaugcccucaugagcauuaucuccaccuuucaccugagcauuccgaacuucaaucaguaugaggccaugucuugugauuuuaacggaggcaagaucuccgugcaguacaaucugagccacacauaugcugucgacgccgcuaaccauugcggcaccauugccaauggggugcuccaaacauucaugcggauggcguggggaggcucuuacaucgcccuggauuccgggaagggaagcugggacuguaucaugaccucuuaccaguaucuuauuauccagaacacguccugggaagaucacugccaguuuagccgccccuccccuauuggcuaccuggggcuccugucucaaagaacacgggacaucuauauuagccgcagacuucugggaaccuucacauggacccucuccgauagcgagggcaacgaaacccccggcggguacugucugacacgguggaugcugaucgaggcugagcucaaaugcuuuggaaauacggccguugcuaaguguaacgaaaaacaugacgaggaguucugcgauaugcugcgccuuuuugacuucaauaagcaggccaucagacggcugaaaaccgaagcgcagaugucuauucagcucaucaacaaggccgugaaugcucugauuaacgaucaacuuaucaugaagaaucaucugcgcgacauuaugggcaucccuuauugcaacuacuccaaauauugguaccucaaucacacagucaccgggaagacaagccugcccagauguuggcuggugucuaacggaagcuaccucaaugaaacccacuucuccgacgauaucgagcagcaggccgacaacaugauuacggagcugcuucaaaaagaauauaucgaucggcagggcaagacaccucuggggcucguggaccuguuugucuucucuaccagcuuuuaccugauuuccaucuuccuucaccucguuaaaauuccgacccaucgccacgugaucggaaagcccugcccuaaaccccauagacugaaucacaugggcauuuguagcugcggccuguauaagcacccuggggugcccgucaaguggaaacgguga

SEQ ID NO: 1641 - RNA, 1473 nt, Artificial Sequence
  derived and/or modified protein sequence (opt5) from LASV(LASV046-NIG-2009;Clade II)__AIT17600__GPC
augggccagaucauuaccuucuuucaagaggugccccacgucaucgaagagguuaugaacauugugcugaucgcccucagccugcuugcuauucugaaggggaucuacaauguggccacaugcggacucuucggccuggucuccuuucuucugcucugugggagaucuugcagcacgaccuauaaaggaguguacgaacugcagacacuggagcucgacauggcgucccugaacaugaccaugccucuuucuuguacaaagaauaacagccaucacuauaucaugguuggcaaugaaaccgggcuggagcucacacugaccaacacguccauuaucaaucauaaauucugcaaccuuucugaugcucacaagaaaaaucuguacgaccaugcccucaugagcauuaucuccaccuuucaccugagcauuccgaacuucaaucaguaugaggccaugucuugugauuuuaacggaggcaagaucuccgugcaguacaaucugagccacgcuuaugccggcgacgcugccaaccauugcgggacaauugcgaauggaguccuccaaaccuucaugcggauggccuggggcgggucuuacaucgcucuggauuccggaaagggcagcugggacuguaucaugacaucuuaccaguaucuuauuauccagaacaccacgugggaagaucacugccaguuuucccgccccagcccuauuggguaccugggacuccugucccaaagaacacgggacaucuauauuucucgcagacuucugggcaccuucacauggacccucagcgauuccgagggcaacgaaacccccgggggauacugucugacacgguggaugcugaucgaggccgagcucaaaugcuuuggcaauacggcuguggccaaguguaacgaaaaacaugacgaggaguucugcgauaugcugcgccuuuuugacuucaauaagcaggcgaucagacggcugaaaaccgaagcccagaugagcauucagcucaucaacaaggcuguuaaugcccugauuaacgaucaacuuaucaugaagaaucaucugcgcgacauuauggggaucccuuauugcaacuacucuaaauauugguaccucaaucacacagugaccggaaagacaucccugcccagauguuggcuggucagcaacggcucuuaccucaaugaaacccacuucagcgacgauaucgagcagcaggcugacaacaugauuacggagcugcuucaaaaagaauauaucgaucggcaggggaagacaccucugggacucguggaccuguuuguguucuccaccucuuuuuaccugauuagcaucuuccuucaccucgucaaaauuccgacccaucgccacguuaucggcaagcccugcccuaaaccccauagacugaaucacaugggcauuuguuccugcgggcuguauaagcacccuggagugcccgugaaguggaaacgguga

SEQ ID NO: 1642 - RNA, 1473 nt, Artificial Sequence
  derived and/or modified protein sequence (opt5) from LASV(LASV049-NIG-2009;Clade II)__AIT17604__GPC
augggccagaucauuaccuucuuucaagaggugccccacgucaucgaagagguuaugaacauugugcugaucgcccucagccugcuugcuauucugaaggggaucuacaauguggccacaugcggacucuucggccuggucuccuuucuucugcucugugggagaucuugcagcacgaccuauaaaggaguguacgaacugcagacacuggagcucgacaugaccucccugaacaugacaaugccucuuucuuguaccaagaauaacagccaucacuauaucaugguuggcaaugaaacagggcuggagcucacccugacgaacaccuccauuaucaaucauaaauucugcaaccuuucugaugcgcacaagaaagaccuguacgaucaugcucucaugagcauuaucuccacauuucaccugagcauuccgaauuucaaccaguaugaggccaugucuugugacuuuaauggaggcaagaucuccgugcaguacaaccugagccacaccuaugccgucgaugcugccaagcauugcggcacaauugcuaauggggugcuccaaaccuucaugcggauggccuggggaggcucuuacaucgcgcuggacuccgggaaaggaagcugggauuguaucaugacgucuuaccaguaucuuauuauccagaacacaaccugggaagaccacugccaguuuucccgccccagcccuguuggcuaccuggggcuccugucccaaagaacacgggauauuuauaucucucgcagacuucugggaaccuucaccuggacacucagcgacuccgagggcaaugaaacgcccggcggguacugucugacccgguggaugcugauugaggccgagcucaagugcuuuggaaacacagcuguggccaaauguaacgaaaagcaugaugaggaguucugcgacaugcugcgccuuuuugauuucaauaaacaggcuaucagacggcugaagaccgaagcccagaugagcauccagcucauuaacaaggcggucaaugcccugaucaacgaccaacuuauuaugaaaaaucaucugcgcgacaucaugggcauuccuuauugcaacuacucuaaguauugguaccucaaucacacagugaccgggaaaacgucccugcccagauguuggcuggugagcaacggaucuuaccucaaugaaacacacuucagcgaugacaucgagcagcaggcugauaacaugaucaccgagcugcuucaaaaggaauaucuggaccggcagggcaaaaccccucucgggcuggucgaucuguuuguuuucuccacaucuuuuuaccuuauuagcaucuuccuccaccuggugaagauuccgacccaucgccacgugaucggaaaacccugcccuaagccccauagacugaaucacaugggcauuuguuccugcggccucuauaagcacccugggguccccgugaaauggaagcgguga

SEQ ID NO: 1643 - RNA, 1473 nt, Artificial Sequence
  derived and/or modified protein sequence (opt5) from LASV(LASV052-NIG-2008;Clade II)__AIT17608__GPC
augggccagaucauuaccuucuuucaagaggugccccacgucaucgaagagguuaugaacauugugcugaucgcccucagccugcuugcuauucugaaggggaucuacaauguggccacaugcggacucuucggccuggucuccuuucuucugcucugugggagaucuugcagcacgaccuauaaaggaguguacgaacugcagacacuggagcucgacauggcgucccugaacaugaccaugccucuuucuuguacaaagaauaacagccaucacuauaucaugguuggcaaugaaaccgggcuggagcucacacugaccaacacguccauuaucaaucauaaauucugcaaccuuucugaugcucacaagcggaaucuguacaaccaugcccucaugagcauuaucuccaccuuucaccugagcauuccgaauuucaaccaguaugaggccaugucuugugacuuuaauggaggcaaaaucuccgugcaguacaaccugagccacacauaugcugucgaugccgcuaaucauugcggcaccauugccaacggggugcuccaaacauucaugcgcauggcguggggaggcucuuacaucgcccuggacuccgggaagggaagcugggauuguaucaugaccucuuaccaguaucuuauuauccagaacacgacaugggaagaccacugccaguuuuccagacccagcccuauuggcuaccuggggcuccugucccaacggacccgcgauaucuauauuucuagacggcuucugggaacauucaccuggacccucagcgacuccgagggcaaugaaacacccggcggguacugucugacgcgcuggaugcugaucgaggcugagcucaagugcuuuggaaacaccgccguugcuaaauguaaugaaaagcaugaugaggaguucugcgacaugcugagacuuuuugauuucaacaaacaggccauccggcgccugaagacagaagcgcagaugagcauucagcucaucaauaaagccgugaacgcucugauuaaugaccaacuuaucaugaagaaccaccugagagauauuaugggcaucccuuauugcaauuacucuaaguauugguaccucaaccacaccgucacagggaaaaccucccugccccgguguuggcuggugagcaauggaucuuaccucaacgaaacgcauuucagcgacgacaucgagcagcaggccgauaauaugauuacagagcugcuucaaaaggaauauaucgaccgccagggcaaaaccccucuggggcucguggaucuguuugucuucuccaccucuuuuuaccugauuagcaucuuccuucaccucguuaagauuccgacacauagacacaucauuggaaaacccugcccuaagccccaucggcugaaccacaugggcaucuguuccugcggccuguauaaacacccuggggugcccgugaaguggcgcagauga

SEQ ID NO: 1644 - RNA, 1473 nt, Artificial Sequence
  derived and/or modified protein sequence (opt5) from LASV(LASV056-NIG-2008;Clade II)__AIT17612__GPC
augggccagaucauuaccuucuuucaagaggugccccacgucaucgaagagguuaugaacauugugcugaucgcccucagccugcuugcuauucugaaggggaucuacaauguggccacaugcggacucuucggccuggucuccuuucuucugcucugugggagaucuugcagcacgaccuauaaaggaguguacgaacugcagacacuggagcucgacauggcgucccugaacaugaccaugccucuuucuuguacaaagaauaacagccaucacuauauccggguuggcaaugaaaccgggcuggagcucacacugaccaacacguccauuaucaaucauaaauucugcaaccuuucugaugcucacaagaaaaaucuguacgaccauagccucauguccauuaucagcaccuuucaccugucuauuccgaacuucaaucaguaugaggccauguccugugauuuuaacggaggcaagaucagcgugcaguacaaucugucucacacauaugccgucgacgcugccaaccauugcggcaccauugcuaauggggugcuccaaacauucaugcgcauggccuggggaggcuccuacaucgcgcuggauagcgggaagggaaacugggacuguaucaugaccucuuaccaguaucuuauuauccagaacacgacaugggaagaucacugccaguuuuccagacccagcccuauuggcuaccuggggcuccugucccaacggacccgcgacaucuauauuucuagacggcuucugggaacauucaccuggacccucagcgauuccgagggcaaugaaacacccggcggguacugucugacgcgcuggaugcugaucgaggccgagcucaaaugcuuuggaaacaccgcuguugccaaguguaaugaaaaacaugacgaggaguucugcgauaugcugagacuuuuugacuucaacaagcaggcuauccggcgccugaaaacagaagcccagaugagcauucagcucaucaauaaggcggugaacgcccugauuaaugaucaacuuaucaugaagaaccaccugagagacauuaugggcaucccuuauugcaauuacucuaaauauugguaccucaaccacaccgucacagggaagaccucccugccccgguguuggcuggugagcaauggaucuuaccucaacgaaacgcauuucagcgacgauaucgagcagcaggcugacaauaugauuacagagcugcuucaaaaagaauauaucgaucgccagggcaagaccccucuggggcucguggaccuguuugucuucuccaccucuuuuuaccugauuagcaucuuccuucaccucguuaaaauuccgacacauagacacguggugggaaagcccugcccuaaaccccaucggcugaaccacaugggcaucuguuccugcggccuguauaagcacccugggguccccgugaaguggaaacgcuga

SEQ ID NO: 1645 - RNA, 1473 nt, Artificial Sequence
  derived and/or modified protein sequence (opt5) from LASV(LASV058-NIG-2008;Clade II)__AIT17616__GPC
augggccagaucauuaccuucuuucaagaggugccccacgucaucgaagagguuaugaacauugugcugaucgcccucagccugcuugcuauucugaaggggaucuacaauguggccacaugcggacucuucggccuggucuccuuucuucugcucugugggagaucuugcagcacgaccuauaaaggaguguacgaacugcagacacuggagcucgacauggcgucccugaacaugaccaugccucuuucuuguacaaagaauaacagccaucacuauaucaugguuggcaaugaaaccgggcuggagcucacacugaccaacacguccauuaucaaucauaaauucugcaaccuuucugaugcucacaagaaaaaucuguacgaccaugcccucaugagcauuaucuccaccuuucaccugagcauuccgaacuucaaucaguaugaggccaugucuugugauuuuaacggaggcaagaucuccgugcaguacaaucugagccacgcuuaugccgucgacgcugccaaccauugcggcacaauugcgaauggggugcuccaaaccuucaugcggauggccuggggaggcucuuacaucgcucuggauuccgggaagggaagcugggacuguaucaugacaucuuaccaguaucuuauuauccagaacaccacgugggaagaucacugccaguuuucccgccccagcccuauuggcuaccuggggcuccugucccaaagaacacgggacaucuauauuucucgcagacuucugggaaccuucacauggacccucagcgauuccgagggcaacgaaacccccggcggguacugucugacacgguggaugcugaucgaggccgagcucaaaugcuuuggaaauacggcuguugccaaguguaacgaaaaacaugacgaggaguucugcgauaugcugcgccuuuuugacuucaauaagcaggcgaucagacggcugaaaaccgaagcccagaugagcauucagcucaucaacaaggcugugaaugcccugauuaacgaucaacuuaucaugaagaaucaucugcgcgacauuaugggcaucccuuauugcaacuacucuaaauauugguaccucaaucacacagucaccgggaagacaucccugcccagauguuggcuggugagcaacggaucuuaccucaaugaaacccacuucagcgacgauaucgagcagcaggcugacaacaugauuacggagcugcuucaaaaagaauauaucgaucggcagggcaagacaccucuggggcucguggaccuguuugucuucuccaccucuuuuuaccugauuagcaucuuccuucaccucguuaaaauuccgacccaucgccacgugaucggaaagcccugcccuaaaccccauagacugaaucacaugggcauuuguuccugcggccuguauaagcacccuggggugcccgucaaguggaaacgguga

SEQ ID NO: 1646 - RNA, 1473 nt, Artificial Sequence
  derived and/or modified protein sequence (opt5) from LASV(LASV063-NIG-2009;Clade II)__AIT17620__GPC
augggccagaucauuaccuucuuucaagaggugccccacgucaucgaagagguuaugaacauugugcugaucgcccucagccugcuugcuauucugaaggggaucuacaauguggccacaugcggacucuucggccuggucuccuuucuucugcucugugggagaucuugcagcacgaccuauaaaggaguguacgaacugcagacacuggagcucgacauggcgucccugaacaugaccaugccucuuucuuguacaaagaauaacagccaucacuauaucaugguuggcaaugaaaccgggcuggagcucacacugaccaacacguccauuaucucucauaaauucugcaaucuuagcgaugcucacaagaaaaaccuguacgaccaugcccucauguccauuaucagcaccuuucaccugucuauuccgaauuucaaccaguaugaggccauguccugugauuuuaauggaggcaagaucagcgugcaguacaaccugucucacgcuuaugccauugacgcugccaaucauugcggcacagucgcgaacggggugcuccaaaccuucaugcggauggccuggggaggcuccuacaucgcucuggauagcgggaagggaucuugggacuguaucaugacauccuaccaguaucuuauuauccagaauaccacgugggaagaucacugccaguuuagccgccccuccccuauuggcuaccuggggcuccugucucaaagaacacgggacaucuauauuagccgcagacuucugggaaccuucacauggacccucuccgauagcgagggcaacgaaacccccggcggguacugucugacacgguggaugcugaucgaggccgagcucaaaugcuuuggaaacacggcuguugccaaguguaaugaaaaacaugacgaggaguucugcgauaugcugcgccuuuuugacuucaacaagcaggcgaucagacggcugaaagccgaagcucagaugucuauucagcucaucaauaaggccgugaacgcucugauuaaugaucaacuuaucaugaagaaccaucugcgcgacauuaugggcaucccuuauugcaauuacuccaaauauugguaccucaaccacaccgucacagggaagaccagccugcccagauguuggcuggugucuaauggaagcuaccucaacgaaacacacuucuccgacgauaucgagcagcaggccgacaauaugauuaccgagcugcuucaaaaagaauauauggaucggcagggcaagacgccucuggggcucguggaccuguuugucuucucuaccagcuuuuaccugaucuccauuuuccuucaccucguuaaaaucccgacacaucgccacgugauuggaaagcccugcccuaaaccccauagacugaaccacaugggcaucuguagcugcggccuguauaagcacccuggggugcccgucaaguggaaacgguga

SEQ ID NO: 1647 - RNA, 1473 nt, Artificial Sequence
  derived and/or modified protein sequence (opt5) from LASV(LASV1000-NIG-2009;Clade II)__AIT17782__GPC
augggccagaucauuaccuucuuucaagaggugccccacgucaucgaagagguuaugaacauugugcugaucgcccucagccugcuugcuauucugaaggggaucuacaauguggccacaugcggacucuucggccuggucuccuuucuucugcucugugggagaucuugcagcacgaccuauaaaggaguguacgaacugcagacacuggagcucgacauggcgucccugaacaugaccaugccucuuucuuguacaaagaauaacagccaucacuauaucaugguuggcaaugaaaccgggcuggagcucacacugaccaacacguccauuaucaaucauaaauucugcaaccuuucugaugcucacaagaaaaaucuguacgaccaugcccucaugagcauuaucuccaccuuucaccugagcauuccgaacuucaaucaguaugaggccaugucuugugauuuuaacggaggcaagaucuccgugcaguacaaucugagccacacauaugcugucgacgccgcuaaccauugcggcaccauugccaauggggugcuccaaacauucaugcggauggcguggggaggcucuuacaucgcccuggauuccgggaagggaagcugggacuguaucaugaccucuuaccaguaucuuauuauccagaacacgacaugggaagaucacugccaguuuucccgccccagcccuauuggcuaccuggggcuccugucccaaagaacccgggacaucuauauuucucgcagacuucugggaacauucaccuggacccucagcgauuccgagggcaacgaaacacccggcggguacugucugacgcgguggaugcugaucgaggcugagcucaaaugcuuuggaaauaccgccguugcuaaguguaacgaaaaacaugacgaggaguucugcgauaugcugcgccuuuuugacuucaauaagcaggccaucaaaagacugaagacagaagcgcagaugagcauucagcucaucaacaaggccgugaaugcucugauuaacgaucaacuuaucaugaaaaaucaucugcgggacauuaugggcaucccuuauugcaacuacucuaaguauugguaccucaaucacaccgucacagggaaaaccucccugccccgcuguuggcuggugagcaacggaucuuaccucaaugaaacgcacuucagcgacgauaucgagcagcaggccgacaacaugauuacagagcugcuucaaaaggaauauaucgauagacagggcaaaaccccucuggggcucguggaccuguuugucuucuccaccucuuuuuaccugauuagcaucuuccuucaccucguuaagauuccgacacaucggcacguggugggaaaacccugcccuaagccccaucgccugaaucacaugggcaucuguuccugcggccuguauaagcacccugggguccccgugaaauggaagagauga

SEQ ID NO: 1648 - RNA, 1473 nt, Artificial Sequence
  derived and/or modified protein sequence (opt5) from LASV(LASV1008-NIG-2009;Clade II)__AIT17786__GPC
augggccagaucauuaccuucuuucaagaggugccccacgucaucgaagagguuaugaacauugugcugaucgcccucagccugcuugcuauucugaaggggaucuacaauguggccacaugcggacucuucggccuggucuccuuucuucugcucugugggagaucuugcagcacgaccuauaaaggaguguacgaacugcagacacuggagcucgacauggcgucccugaacaugaccaugccucuuucuuguacaaagaauaacagccaucacuauaucaugguuggcaaugaaaccgggcuggagcucacacugaccaacacguccauuaucaaucauaaauucugcaaccuuucugaugcucacaagaaaaaucuguacgaccaugcccucaugagcauuaucuccaccuuucaccugagcauuccgaacuucaaucaguaugaggccaugucuugugauuuuaacggaggcaagaucuccgugcaguacaaucugagccacgcuuaugccauugacgcugccgaucauugcggcacaaucgcgaacgggguccuccaaaccuucaugcggauggccuggggaggcucuuacaucgcucuggacuccgggaagggaagcugggauuguauuaugacaucuuaccaguaucuuaucauucagaauaccacgugggaagaccacugccaguuuucccgccccagcccuaucggcuaccuggggcuccugucccaaagaacacgggauauuuauaucucucgcagacuucugggaaccuucacauggacccucagcgacuccgagggcaacgaaacccccggcggguacugucugacacgguggaugcugaucgaggccgagcucaaaugcuuuggaaacacggcuguggccaaguguaaugaaaaacaugaugaggaguucugcgacaugcugcgccuuuuugauuucaacaagcaggcgauuagacggcugaaaaccgaagcccagaugagcauccagcucauuaauaaggcuguuaacgcccugaucaaugaccaacuuauuaugaagaaccaucugcgcgacaucaugggcaucccuuauugcaauuacucuaaauauugguaccucaaccacacagugaccgggaagacaucccugcccagauguuggcuggucagcaauggaucuuaccucaacgaaacccacuucagcgaugacauugagcagcaggcugauaauaugaucacggagcugcuucaaaaagaauauauggaccggcagggcaagacaccucuggggcucguggaucuguuuguguucuccaccucuuuuuaccugauuagcaucuuccuucaccucgucaaaauuccgacccaucgccacaucacaggaaagcccugcccuaaaccccauagacugaaccacaugggcauuuguuccugcggccuguauaagcacccugggguucccgugaaguggaaacgguga

SEQ ID NO: 1649 - RNA, 1473 nt, Artificial Sequence
  derived and/or modified protein sequence (opt5) from LASV(LASV1011-NIG-2009;Clade II)__AIT17790__GPC
augggccagaucauuaccuucuuucaagaggugccccacgucaucgaagagguuaugaacauugugcugaucgcccucagccugcuugcuauucugaaggggaucuacaauguggccacaugcggacucuucggccuggucuccuuucuucugcucugugggagaucuugcagcacgaccuauaaaggaguguacgaacugcagacacuggagcucgacauggcgucccugaacaugaccaugccucuuucuuguacaaagaauaacagccaucacuauaucaugguuggcaaugaaaccgggcuggagcucacacugaccaacacguccauuaucaaucauaaauucugcaaccuuucugaugcucacaagaaaaaucuguacgaccaugcccucaugagcauuaucuccaccuuucaccugagcauuccgaacuucaaucaguaugaggccaugucuugugauuuuaacggaggcaagaucuccgugcaguacaaucugagccacacauaugcugucgacgccgcuaaccauugcggcaccauugccaauggggugcuccaaacauucaugcggauggcguggggaggcucuuacaucgcccuggauuccgggaagggaagcugggacuguaucaugaccucuuaccaguaucuuauuauccagaacacgacaugggaagaucacugccaguuuucccgccccagcccuauuggcuaccuggggcuccugucccaaagaacccgggacaucuauauuucucgcagacuucugggaacauucaccuggacccucagcgauuccgagggcaacgaaacacccggcggguacugucugacgcgguggaugcugaucgaggcugagcucaaaugcuuuggaaauaccgccguugcuaaguguaacgaaaaacaugacgaggaguucugcgauaugcugcgccuuuuugacuucaauaagcaggccaucagacggcugaaaacagaagcgcagaugagcauucagcucaucaacaaggccgugaaugcucugauuaacgaucaacuuaucaugaagaaucaucugcgcgacauuaugggcaucccuuauugcaacuacucuaaauauugguaccucaaucacaccgucacagggaagaccucccugcccagauguuggcuggugagcaacggaucuuaccucaaugaaacgcacuucagcgacgauaucgagcagcaggccgacaacaugauuacagagcugcuucaaaaagaauauauggaucggcagggcaagaccccucuggggcucguggaccuguuugucuucuccaccucuuuuuaccugaucagcauuuuccuucaccucguuaaaaucccgacacaucgccacauuaccggaaagcccugcccuaaaccccauagacugaaucacaugggcaucuguuccugcggccuguauaagcacccuggggugcccgugaaguggaaacgguga

SEQ ID NO: 1650 - RNA, 1473 nt, Artificial Sequence
  derived and/or modified protein sequence (opt5) from LASV(LASV1016-NIG-2009;Clade II)__AIT17798__GPC
augggccagaucauuaccuucuuucaagaggugccccacgucaucgaagagguuaugaacauugugcugaucgcccucagccugcuugcuauucugaaggggaucuacaauguggccacaugcggacucuucggccuggucuccuuucuucugcucugugggagaucuugcagcacgaccuauaaaggaguguacgaacugcagacacuggagcucgacauggcgucccugaacaugaccaugccucuuucuuguacaaagaauaacagccaucacuauaucaugguuggcaaugaaaccgggcuggagcucacacugaccaacacguccauuaucaaucauaaauucugcaaccuuucugaugcucacaagaaaaaucuguacgaccaugcccucaugagcauuaucuccaccuuucaccugagcauuccgaacuucaaucaguaugaggccaugucuugugauuuuaacggaggcaagaucuccgugcaguacaaucugagccacacauaugcugucgacgccgcuaaccauugcggcaccauugccaauggggugcuccaaacauucaugcggauggcguggggaggcucuuacaucgcccuggauuccgggaagggaagcugggacuguaucaugaccucuuaccaguaucuuauuauccagaacacgacaugggaagaucacugccaguuuucccgccccagcccuauuggcuaccuggggcuccugucccaaagaacccgggacaucuauauuucucgcagacuucugggaacauucaccuggacccucagcgauuccgagggcaacgaaacacccggcggguacugucugacgcgguggaugcugaucgaggcugagcucaaaugcuuuggaaauaccgccguugcuaaguguaacgaaaaacaugacgaggaguucugcgauaugcugcgccuuuuugacuucaauaagcaggccaucaugagacugaaaacagaagcgcagaugagcauucagcucaucaacaaggccgugaaugcucugauuaacgaucaacuuaucaugaagaaucaucugcgggacauuaugggcaucccuuauugcaacuacucuaaauauugguaccucaaucacaccgucacagggaagaccucccugccccgcuguuggcuggugagcaacggaucuuaccucaaugaaacgcacuucagcgacgauaucgagcagcaggccgacaacaugauuacagagaugcugcaaaaagaauaucuugauagacagggcaagaccccucuggggcucguggaccuguuugucuucuccaccucuuuuuaccugaucagcauuuuccuucaccucguuaaaaucccgacacaucggcacauuaucggaaagcccugcccuaaaccccaucgccugaaucacaugggcauuuguuccugcggccuguauaagcacccuggggugcccgugaaguggaaaagauga

SEQ ID NO: 1651 - RNA, 1473 nt, Artificial Sequence; identical to SEQ ID NO: 1563
  derived and/or modified protein sequence (opt5) from LASV(LASV221-NIG-2010;Clade II)__AIT17624__GPC

SEQ ID NO: 1652 - RNA, 1473 nt, Artificial Sequence
  derived and/or modified protein sequence (opt5) from LASV(LASV224-NIG-2010;Clade II)__AIT17626__GPC
augggccagaucauuaccuucuuucaagaggugccccacgucaucgaagagguuaugaacauugugcugaucgcccucagccugcuugcuauucugaaggggguguacaaugucgccacaugcggacucuucggccugguguccuuucuucugcucugugggagaucuugcagcacgaccuauaaaggaguuuacgaacugcagacacuggagcucgacauggcgucccugaacaugaccaugccucuuucuuguacaaagaauaacagccaucacuauaucauggugggcaaugaaaccgggcuggagcucacacugaccaacacguccaucauucagcauaaauucugcaaucuuucugaugcucacaagaaaaaccuguacgaccaugcccucaugagcaucauuuccaccuuucaccugagcaucccgaauuucaaccaguaugaggccaugucuugugauuuuaauggaggcaagauuacaguccaauacaaccugucccacagcuaugcuaucgacgccgcuaaucauugcggcaccauugccaacggggugcuccagacauucaugcggauggcguggggaggcucuuacaucgcccuggauuccgggaagggaagcugggacuguaucaugaccucuuaccaguaucuuauuauccagaauacgacaugggaagaucacugccaauuuucccgccccagcccuauuggcuaccuggggcuccugucccagagaacccgggacaucuauauuucucgcagacuucugggaacauucaccuggacccucagcgauuccgagggcaacgaaacacccggcggguacugucugacgcgguggaugcugaucgaggcugagcucaaaugcuuuggaaacaccgccguugcuaaguguaaugaaaaacaugacgaggaguucugcgauaugcugcgccuuuuugacuucaacaagcaggccaucagacggcugaaaacagaagcgcagaugagcauucaacucaucaauaaggccgugaacgcucugauuaaugaucagcuuaucaugaagaaccaucugcgcgacauuaugggcaucccuuauugcaauuacucuaaauauugguaccucaaccacaccgucacagggagaaccucccugccccgguguuggcuggugagcaauggaucuuaccucaacgaaacgcacuucagcgacgauaucgagcagcaagccgacaauaugauuacagagcugcuucagaaggaauauauggaucgccagggcaaaaccccucuggggcucguggaccuguuugucuucuccaccucuuuuuaccugaucagcauuuuccuucaccucguuaagaucccgacacauagacacauuaucggaaaacccugcccuaagccccaucggcugaaccacaugggcguguguuccugcggccuguauaaacacccuggggugcccgucaaguggaagcgcuga

SEQ ID NO: 1653 - RNA, 1473 nt, Artificial Sequence
  derived and/or modified protein sequence (opt5) from LASV(LASV225-NIG-2010;Clade II)__AIT17630__GPC
augggccagaucauuaccuucuuucaagaggugccccacgucaucgaagagguuaugaacauugugcugaucgcccucagccugcuugcuauucugaaggggaucuacaauguggccacaugcggacucuucggccugcuuuccuuucugcuccugugugggagaucuugcagcacgaccuauaaaggagucuacgaacugcagacacucgagcuggacauggcgucccuuaacaugaccaugccucugucuuguacaaagaauaacagccaucacuauaucauggugggcaaugaaaccgggcucgagcugacacuuaccaacacguccauuaucaaucauaaauucugcaaccugucugaugcucacaagaaaaaucucuacgaccaugcccugaugagcauuaucuccaccuuucaccugagcauuccgaacuucaaucaguaugaggccaugucuugugauuuuaacggaggcaagaucuccguucaguacaaucucagccacgcuuaugccguggacgcugccgaacauugcggcacaauugcgaacgggguccugcaaaccuucaugcggauggccuggggaggcucuuacaucgcucuugauuccgggaagggaagcugggacugugugaugacaucuuaccaguaucugaucauucagaauaccuccugggaggaucacugccaguuuagccgccccuccccuaucggcuaccucgggcugcuuucucaaagaacgcgggacauuuauaucagccgcagacugcucggaacauucaccuggacacuguccgauagcgaaggcaacgagacccccggcggguacugucugacccgguggaugcucauugaggccgaacugaaaugcuuuggaaacacagcuguugccaaguguaaugagaaacaugacgaagaguucugcgauaugcuucgccuguuugacuucaacaagcaggcgaucagacggcucaaaacggaagcccagaugucuauccagcugauuaauaaggcugugaacgcccuuaucaaugaucaacugauuaugaagaaccaccuccgcgacaucaugggcauuccuuauugcaauuacuccaaauauugguaccugaaccacaccgucacagggaagaccagccugcccagauguuggcucgugucuaauggaagcuaccugaacgagacacauuucuccgacgauaucgagcagcaggcugacaauaugaucaccgaacuucugcaaaaagaguauauugaucggcagggcaagacgccucucgggcugguggaccuguuugucuucucuaccagcuuuuaccuuaucuccauuuuccuccaccugguuaaaaucccgacacaucgccacgugauuggaaagcccugcccuaaaccccauagacugaaccacaugggcaucuguagcugcggccucuauaagcacccuggggugcccgucaaguggaaacgguga

SEQ ID NO: 1654 - RNA, 1473 nt, Artificial Sequence
  derived and/or modified protein sequence (opt5) from LASV(LASV229-NIG-2010;Clade II)__AIT17634__GPC
augggccagaucauuaccuucuuucaagaggugccccacgucaucgaagagguuaugaacauugugcugaucgcccucagccugcuugcuauucugaaggggaucuacaauguggccacaugcggacucuucggccuggucuccuuucuucugcucugugggagaucuugcagcacgaucuauaaagacguguacgaacugcagacccuggagcucgauauggcgucccugaacaugacaaugccucuuucuuguaccaagaauaacagccaucacuauauuaugguuggaaaugaaacaggccuggagcucacccugacaaacaccuccaucauuaaucauaaauucugcaaccuuucugacgcucacaagaaaaaucuguacgaucaugcccucaugagcaucauuuccacguuucaccugagcaucccgaacuucaaucaguaugaggccaugucuugugacuuuaacgggggaaagauuuccgugcaguacaaucugagccacaccuaugcuaucgaugccgcuaaccauugcggcacaaucgccaauggcguccuccaaaccuucaugcggauggcguggggaggaucuuacauugcccuggacuccggcaaggggagcugggauuguaucaugacaucuuaccaguaucuuauuauccagaacaccacgugggaagaccacugccaguuuucccgccccagcccuauuggauaccugggccuccugucccaaagaacacgggauaucuauaucucucgcagacuucuggggaccuucacauggacccucagcgacuccgagggaaacgaaacccccggcggcuacugucugacacgguggaugcugauugaggcugagcucaaaugcuuugggaauacggccguggcuaaguguaacgaaaaacaugaugaggaguucugcgacaugcugcgccuuuuugauuucaauaagcaggccaucagacggcugaaaaccgaagcgcagaugagcauucagcucaucaacaaggccguuaaugcucugauuaacgaccaacuuaucaugaagaaucaucugcgcgacaucauggggauuccuuauugcaacuacucuagauauugguaccucaaucacacagugaccggccggacaucccugccccgcuguuggcuggucagcaacgggucuuaccucaaugaaacccacuucagcgaugacaucgagcagcaggccgauaacaugauuacggagcugcuucaaaaagaauauauggacagacagggaaagacaccucugggccucguggaucuguuuguguucuccaccucuuuuuaccugaucagcauuuuccuucaccucgucaaaaucccgacccaucggcacguuauugggaagcccugcccuaaaccccaucgccugaaucacaugggaaucuguuccugcggccuguauaaccacccuggcgugcccgugaaguggaaaagauga

SEQ ID NO: 1655 - RNA, 1473 nt, Artificial Sequence
  derived and/or modified protein sequence (opt5) from LASV(LASV237-NIG-2010;Clade II)__AIT17638__GPC
augggccagaucauuaccuucuuucaagaggugccccacgucaucgaagagguuaugaacauugugcugaucgcccucagccugcuugcuauucugaaggggaucuacaauguggccacaugcggacucuucggccuggucuccuuucuucugcucugugggagaucuugcagcacgaccuauaaaggaguguacgaacugcagacacuggagcucgacauggcgucccugaacaugaccaugccucuuucuuguacaaagaauaacagccaucacuauaucaugguuggcaaugaaaccgggcuggagcucacacugaccaacacguccauuaucaaucauaaauucugcaaccuuucugaugcucacaagaaagaccuguacgaucaugcccucaugagcauuaucuccaccuuucaccugagcauuccgaauuucaaccaguaugaggccaugucuugugacuuuaauggaggcaagaucuccgugcaguacaaccugagccacacauaugcugucgaugccgcuaaucauugcggcaccauugccaacggggugcuccaaacauucaugcggauggcguggggaggcucuuacaucgcccuggacuccgggaagggaagcugggauuguaucaugaccucuuaccaguaucuuauuauccagaauacgacaugggaagaccacugccaguuuucccgccccagcccuauuggcuaccuggggcuccugucccaaagaacccgggauaucuauauuucucgcagacuucugggaacauucaccuggacccucagcgacuccgagggcaacgaaacacccggcggguacugucugacgcgguggaugcugaucgaggcugagcucaaaugcuuuggaaacaccgccguugcuaaguguaaugaaaaacaugaugaggaguucugcgacaugcugcgccuuuuugauuucaacaagcaggccaucagacggcugaaaacagaagcgcagaugagcauucagcucaucaauaaggccgugaacgcucugauuaaugaccaacuuaucaugaagaaccaucugcgcgacauuaugggcaucccuuauugcaauuacucuaaauauugguaccucaaccacaccgucacagggaagaccucccugcccagauguuggcuggugagcaauggaucuuaccucaacgaaacgcacuucagcgaugacaucgagcagcaggccgauaauaugauuacagagcugcuucaaaaagaauauauggaccggcagggcaagaccccucuggggcucguggaucuguuugucuucuccaccucuuuuuaccugaucagcauuuuccuucaccucaucaaaauuccgacacaucgccacaucaccggaaagcccugcccuaaaccccauagacugaaccacaugggcauuuguuccugcggccuguauaagcacccugggguucccgugaaguggaaacgguga

SEQ ID NO: 1656 - RNA, 1473 nt, Artificial Sequence
  derived and/or modified protein sequence (opt5) from LASV(LASV239-NIG-2010;Clade II)__AIT17642__GPC
augggccagaucauuaccuucuuucaagaggugccccacgucaucgaagagguuaugaacauugugcugaucgcccucagccugcuugcuauucugaaggggguguacaaugucgccacaugcggacucuucggccugguguccuuucuucugcucugugggagaucuugcagcacgaccuauaaaggaguuuacgaacugcagacacuggagcucgacauggcgucccugaacaugaccaugccucuuucuuguacaaagaauaacagccaucacuauaucauggugggcaaugauaccgggcuggaacucacacugaccaacacguccaucauuaaucauaaauucugcaaccuuucugacgcucacaagaaaaaucuguacgaucaugcccucaugagcaucauuuccaccuuucaccugagcaucccgaacuucaaucaguaugaggccaugucuugugacuuuaacggaggcaagauuuccguccaguacaaucugagccacgcuuaugccguggaugcugccucucauugcggcacaaucgcgaacgggguucuccaaaccuucaugcggauggccuggggaggcuccuacauugcucuggacagcgggaagggaucuugggauuguaucaugacauccuaccaguaucuuaucauucagaauaccacgugggaggaccacugccaguuuagccgccccuccccuaucggcuaccuggggcuccugucucaaagaacacgggauauuuauaucagccgcagacuucugggaaccuucacauggacccucuccgacagcgaaggcaacgagacccccggcggguacugucugacacgguggaugcugauugaagccgagcucaaaugcuuuggaaacacggcuguggccaaguguaaugagaaacaugaugaagaguucugcgacaugcugcgccuuuuugauuucaacaagcaggcgaucagacggcugaaaaccgaagcccagaugucuauccagcucauuaauaaggcugucaacgcccugaucaaugaccaacuuauuaugaagaaccaucugcgcgacaucaugggcauuccuuauugcaauuacuccaaauauugguaccucaaccacacagugaccgggaagacaagccugcccagauguuggcuggugucuaauggaagcuaccucaacgagacccacuucuccgaugacaucgaacagcaggcugauaauaugaucacggagcugcuucaaaaagaguauauggaccggcagggcaagacaccucuggggcucgucgaucuguuuguuuucucuaccagcuuuuaccugauuuccaucuuccuucaccucgugaaaauuccgacccaucgccacaucauuggaaagcccugcccuaaaccccauagacugaaccacaugggcaucuguagcugcggccuguauaagcacccuggggugcccgucaaguggaaacgguga

SEQ ID NO: 1657 - RNA, 1473 nt, Artificial Sequence
  derived and/or modified protein sequence (opt5) from LASV(LASV241-NIG-2011;Clade II)__AIT17646__GPC
augggccagaucauuaccuucuuucaagaggugccccacgucaucgaagagguuaugaacauugugcugaucgcccucagccugcuugcuauucugaaggggaucuacaauguggccacaugcggacucuucggccuggucuccuuucuucugcucugugggagaucuugcagcacgaccuauaaaggaguguacgaacugcagacacuggagcucgacauggcgucccugaacaugaccaugccucuuucuuguacaaagaauaacagccaucacuauaucaugguuggcaaugaaaccgggcuggagcucacacugaccaacacguccauuaucaaucauaaauucugcaaccuuucugaugcucacaagaaaaaucuguacgaccaugcccucaugagcauuaucuccaccuuucaccugagcauuccgaacuucaaucaguaugaggccaugucuugugauuuuaacggaggcaagaucuccgugcaguacaaucugagccacgcuuaugccgucgacgcugccucucauugcggcacaguggcgaacgggguucuccaaaccuucaugcggauggccuggggaggcuccuacauugcucuggauagcgggaagggaucuugggacuguaucaugacauccuaccaguaucuuaucauucagaauaccacgugggaagaucacugccaguuuagccgccccuccccuaucggcuaccuggggcuccugucucaaagaacacgggacauuuauaucagccgcagacuucugggaaccuucacauggacccucuccgauagcgagggcaacgaaacccccggcggguacugucugacacgguggaugcugauugaggccgagcucaaaugcuuuggaaacacggcuguggccaaguguaaugaaaaacaugacgaggaguucugcgauaugcugcgccuuuuugacuucaacaagcaggcgaucagacggcugaaaaccgaagcccagaugucuauccagcucauuaauaaggcugucaacgcccugaucaaugaucaacuuauuaugaagaaccaucugcgcgacaucaugggcauuccuuauugcaauuacuccaaauauugguaccucaaccacacagugaccgggaagacaagccugcccagauguuggcuggugucuaauggaagcuaccucaacgaaacccacuucuccgacgauaucgagcagcaggcugacaauaugaucacggagcugcuucaaaaagaauauauggaucggcagggcaagacaccucuggggcucgucgaccuguuuguuuucucuaccagcuuuuaccugauuuccaucuuccuucaccucgugaaaauuccgacccaucgccacgugaucggaaagcccugcccuaaaccccauagacugaaccacaugggcauuuguagcugcggccuguauaagcacccugggguccccgugaaguggaaacgguga

SEQ ID NO: 1658 - RNA, 1473 nt, Artificial Sequence
  derived and/or modified protein sequence (opt5) from LASV(LASV242-NIG-2010;Clade II)__AIT17650__GPC
augggccagaucauuaccuucuuucaagaggugccccacgucaucgaagagguuaugaacauugugcugaucgcccucagccugcuugcuauucugaaggggaucuacaauguggccacaugcggacucuucggccuggucuccuuucuucugcucugugggagaucuugcagcacgaccuauaaaggaguguacgaacugcagacacuggagcucgacauggcgucccugaacaugaccaugccucuuucuuguacaaagaauaacagccaucacuauaucaugguuggcaaugaaaccgggcuggagcucacacugaccaacauuuccaucauuaaucauaaauucugcaaccuuucugaugcucacaagaaaaaucuguacgaccaugcccucaugagcaucauuuccacguuucaccugagcaucccgaacuucaaucaguaugaggccaugucuugugauuuuaacggaggcaagauuuccgugcaguacaaucugagccacaccuaugcugucgacgccgcuaaccauugcggcacaaucgccaauggggugcuccaaaccuucaugcggauggcguggggaggcucuuacaucgcccuggauuccgggaagggaagcugggacuguauuaugacaucuuaccaguaucuuaucauucagaacaccacgugggaagaucacugccaguuuucccgccccagcccuaucggcuaccuggggcuccugucccaaagaacacgggacauuuauaucucucgcagacuucugggaaccuucacauggacccucagcgauuccgagggcaacgaaacccccggcggguacugucugacacgguggaugcugaucgaggcugagcucaaaugcuuuggaaauacggccguugcuaaguguaacgaaaaacaugacgaggaguucugcgauaugcugcgccuuuuugacuucaauaagcaggccauuagacggcugaaagcggaagcccagaugagcauccagcucauuaacaaggcugugaaugcccugaucaacgaucaacuuauuaugaagaaucaucugcgcgacaucaugggcaucccuuauugcaacuacucuaaauauugguaccucaaucacaccgucacagggagaaccucccugccccgguguuggcuggugagcaacggaucuuaccucaaugaaacacacuucagcgacgauauugagcagcaggcugacaacaugaucaccgagcugcuucaaaaggaauauauugaucgccagggcaaaacgccucuggggcucguggaccuguuugucuucuccacaucuuuuuaccugaucagcauuuuccuucaccucguuaagaucccgacccauagacacauuaucggaaaacccugcccuaagccccaucggcugaaucacaugggcaucuguuccugcggccuguauaaacacccuggggugcccgugaaguggaagcgcuga

SEQ ID NO: 1659 - RNA, 1473 nt, Artificial Sequence
  derived and/or modified protein sequence (opt5) from LASV(LASV246-NIG-2010;Clade II)__AIT17658__GPC
augggccagaucauuaccuucuuucaagaggugccccacgucaucgaagagguuaugaacauugugcugaucgcccucagccugcuugcuauucugaaggggguguacaaugucgccacaugcggacucuucggccugguguccuuucuucugcucugugggagaucuugcagcaucacguauaaaggaguuuacgaacugcagacccuggagcucgacauggcgaaccugaauaugacaaugccucuuuccuguaccaagaacaauucucaucacuauaucauggugggcaacgaaacagggcuggagcucacccugacaaauaccagcauuaucaaccauaaauucugcaaucuuuccgaugcucacaagaaaaaccuguacgaccaugcccucaugucuauuaucagcacguuucaccuguccauuccgaauuucaaccaguaugaggccaugagcugugauuuuaauggaggcaagaucucuguccaguacaaccugucccacaccuaugcuggcgacgccgcugaucauugcgggacaauugccaauggagugcuccaaaccuucaugcggauggcguggggcgggagcuacaucgcccuggacucuggaaagggcuccugggauuguaucaugacaagcuaccaguaucuuauuauccagaacaccacgugggaagaccacugccaguuuucucgccccuccccuaugggguaccugggacuccugagccaaagaacacgggauauuuauaucucccgcagacuucugggcaccuucacauggacccucucugacagcgagggcaacgaaacccccgggggauacugucugacacgguggaugcugauugaggcugagcucaaaugcuuuggcaauacggccguugcuaaguguaacgaaaaacaugaugaggaguucugcgacaugcugcgccuuuuugauuucaauaagcaggccaucagacggcugaaaaccgaagcgcagauguccauccagcucauuaacaaggccgugaaugcucugaucaacgaccaacuuauuaugaagaaucaucugcgcgacaucauggggauuccuuauugcaacuacagcaaauauugguaccucaaucacacaaucaccggaaagacaucucugcccagauguuggcuggucuccaacggcagcuaccucaaugaaacccacuucucugaugacaucgagcagcaggccgauaacaugauuacggagcugcuucaaaaagaauauaucgaccggcaggggaagacaccucugggacucguggaucuguuuguguucagcaccuccuuuuaccugauuucuaucuuccuucaccucgucaaaauuccgacccaucgccacaucacaggcaagcccugcccuaaaccccauagacugaaucacaugggcauuuguagcugcgggcuguauaagcacccuggaguucccgugcgguggaagcgcuga

SEQ ID NO: 1660 - RNA, 1473 nt, Artificial Sequence
  derived and/or modified protein sequence (opt5) from LASV(LASV251-NIG-2010;Clade II)__AIT17666__GPC
augggccagaucgugaccuucuuucaagaggucccccacguuauugaagaggugaugaacaucgugcugauugcccucagccugcuugcuauccugaaggggauuuacaaugucgccacaugcggacucuucggccugguguccuuucuucugcucugugggagaucuugcagcacgaccuauaaaggaguuuacgaacugcagacacuggagcucgacauggcgucccugaacaugaccaugccucuuucuuguacaaagaauaacagccaucacuauaucauggugggcaaugaaaccgggcuggagcucacacugaccaacacguccaucauuaaucauaaauucugcaaccuuucugaugcucacaagaaaaaucuguacgaccaugcccucaugagcaucauuuccaccuuucaccugagcaucccgaacuucaaucaguaugaggccaugucuugugauuuuaacggaggcaagauuuccguccaguacaaucugagccacacauaugcuguggacgccgcuaaccauugcggcaccaucgccaaugggguucuccaaacauucaugcggauggcguggggaggcucuuacauugcccuggauuccgggaagggaagcugggacuguaucaugaccucuuaccaguaucuuaucauucagaacacgacaugggaagaucacugccaguuuucccgccccagcccuaucggcuaccuggggcuccugucccaaagaacccgggacauuuauaucucucgcagacuucugggaacauucaccuggacccucagcgauuccgagggcaacgaaacacccggcggguacugucugacgcgguggaugcugauugaggcugagcucaaaugcuuuggaaauaccgccguggcuaaguguaacgaaaaacaugacgaggaguucugcgauaugcugcgccuuuuugacuucaauaagcaggccaucagacggcugaaaacagaagcgcagaugagcauccagcucauuaacaaggccgucaaugcucugaucaacgaucaacuuauuaugaagaaucaucugcgcgacaucaugggcauuccuuauugcaacuacucuaaauauugguaccucaaucacaccgugacagggaagaccucccugcccagauguuggcuggugagcaacggaucuuaccucaaugaaacgcacuucagcgacgauaucgagcagcaggccgacaacaugaucacagagcugcuucaaaaagaauauauggaucggcagggcaagaccccucuggggcucgucgaccuguuuguuuucuccaccucuuuuuaccugauuagcaucuuccuucaccucgugaaaauuccgacacaucgccacaucaccggaaagcccugcccuaaaccccauagacugaaucacaugggcauuuguuccugcggccuguauaagcacccuggggugcccgucaaguggaaacgguga

SEQ ID NO: 1661 - RNA, 1473 nt, Artificial Sequence
  derived and/or modified protein sequence (opt5) from LASV(LASV253-NIG-2011;Clade II)__AIT17670__GPC
augggccagaucauuaccuucuuucaagaggugccccacgucaucgaagagguuaugaacauugugcugaucgcccucagccugcuugcuauucugaaggggaucuacaauguggccacaugcggacucuucggccuggucuccuuucuucugcucugugggagaucuugcagcacgaccuauaaaggaguguacgaacugcagacacuggagcucgacauggcgucccugaacaugaccaugccucuuucuuguacaaagaauaacagccaucacuauaucaugguuggcaaugaaaccgggcuggagcucacacugaccaacacguccauuaucaaucauaaauucugcaaccuuucugaugcucacaagaaaaaucuguacgaccaugcccucaugagcauuaucuccaccuuucaccugagcauuccgaacuucaaucaguaugaggccaugucuugugauuuuaacggaggcaagaucuccgugcaguacaaucugagccacacauaugcugucgacgccgcuaaccauugcggcaccauugccaauggggugcuccaaacauucaugcggauggcguggggaggcucuuacaucgcccuggauuccgggaagggaagcugggacuguaucaugaccucuuaccaguaucuuauuauccagaacacgacaugggaagaucacugccaguuuucccgccccagcccuauuggcuaccuggggcuccugucccaaagaacccgggacaucuauauuucucgcagacuucugggaacauucaccuggacccucagcgauuccgagggcaacgaaacacccggcggguacugucugacgcgguggaugcugaucgaggcugagcucaaaugcuuuggaaauaccgccguugcuaaguguaacgaaaaacaugacgaggaguucugcgauaugcugcgccuuuuugacuucaauaagcaggccaucagacggcugaaagcggaagcccagaugagcauucagcucaucaacaaggcugugaaugcccugauuaacgaucaacuuaucaugaagaaucaucugcgcgacauuaugggcaucccuuauugcaacuacucuaaauauugguaccucaaucacacagucaccgggagaacaucccugccccgguguuggcuggugagcaacggaucuuaccucaaugaaacccacuucagcgacgauaucgagcagcaggcugacaacaugauuacggagcugcuucaaaaggaauauaucgaucgccagggcaaaacaccucuggggcucguggaccuguuugucuucuccaccucuuuuuaccugauuagcaucuuccuucaccucguuaagauuccgacccauagacacaucauuggaaaacccugcccuaagccccaucggcugaaucacaugggcaucuguuccugcggccuguauaaacacccuggggugcccgugaaguggaagcgcuga

SEQ ID NO: 1662 - RNA, 1473 nt, Artificial Sequence
  derived and/or modified protein sequence (opt5) from LASV(LASV254-NIG-2011;Clade II)__AIT17674__GPC
augggccagaucauuaccuucuuucaagaggugccccacgucaucgaagagguuaugaacauugugcugaucgcccucagccugcuugcuauucugaaggggaucuacaauguggccacaugcggacucuucggccuggucuccuuucuucugcucugugggagaucuugcagcacgaccuauaaaggaguguacgaacugcagacacuggagcucgacaugaccaaccugaauaugacaaugccucuuuccuguaccaagaacaauucucaucacuauaucaugguuggcaacgaaacagggcuggagcucacccugacgaauaccagcauuaucaaccauaaauucugcaaucuuuccgaugcgcacaagaaaaaccuguacaaucaugcucucaugucuauuaucagcacauuucaccuguccauuccgaacuucaaucaguaugaggccaugagcugugacuuuaacggaggcaagaucucugugcaguacaaucugucccacagcuaugccgucgaugcugccaaccauugcggcaccauugcuaacggggugcuccaaacauucaugcggauggccuggggaggcucuuacaucgcgcuggacuccgggaagggaaauugggauuguaucaugaccagcuaccaguaucuuauuauccagaacacgacaugggaagaccacugccaguuuucucgccccuccccuauuggcuaccuggggcuccugagccaaagaacccgggauaucuauauuucccgcagacuucugggaacauucaccuggacccucucugacagcgagggcaaugaaacacccggcggguacugucugacgcgguggaugcugaucgaggccgagcucaaaugcuuuggaaacaccgcuguugccaaguguaaugaaaaacaugaugaggaguucugcgacaugcugcgccuuuuugauuucaacaagcaggcuaucagacggcugaaaacagaagcccaggcgaauauucagcucaucaacaaggccgugaaugcucugauuaacgaccaacuuaucaugaagaaucaucugcgcgauauuaugggcaucccuuauugcaacuacuccaaauauugguaccucaaucacaccgucacagggaagaccagccugcccagauguuggcuggugucuaacggauccuaccucaaugaaacgcacuucagcgacgacaucgagcagcaggccgauaacaugauuacagagcugcuucaaaaagaauauauggaccggcagggcaagaccccucuggggcucguggaucuguuugucuucucuaccagcuuuuaccugaucuccauuuuccuucaccucguuaaaaucccgacacaucgccacgugauuggaaagcccugcccuaaaccccauagacugaaccacaugggcaucuguucuugcggccuguauaagcacccuggggugcccgucaaguggaaacgguga

SEQ ID NO: 1663 - RNA, 1473 nt, Artificial Sequence
  derived and/or modified protein sequence (opt5) from LASV(LASV256-NIG-2010;Clade II)__AIT17678__GPC
augggccagaucauuaccuucuuucaagaggugccccacgucaucgaagagguuaugaacauugugcugaucacacucagccugcuugccauucugaaggggaucuacaauaucgcuacgugcggacucuucggccugguguccuuucuucugcucugugggagaucuugcagcaccacauauaaaggagucuacgaacugcagacccuggagcucgacaugacaucccugaacaugaccaugccucuuucuuguacaaagaauaacagccaucacuauauuauggugggcaaugaaaccgggcuggagcucacgcugaccaacacauccaucauuaaucauaaauucugcaaccuuucugaugcccacaagaaaaaucuguacgaccaugcgcucaugagcaucauuuccaccuuucaccugagcaucccgaacuucaaucaguaugaggcuaugucuugugauuuuaacggaggcaagauuuccguucaguacaaucugagccacacauaugccguggacgccgcuaaccauugcggcaccaucgccaaugggguccuccaaacguucaugcggauggcuuggggaggcucuuacaucgcccuggauuccgggaagggaagcugggacuguauuaugacaucuuaccaguaucuuaucauucagaacaccacaugggaagaucacugccaguuuucccgccccagcccuaucggcuaccuggggcuccugucccaaagaacccgggacauuuauaucucucgcagacuucugggaaccuucacauggacgcucagcgauuccgagggcaacgaaacccccggcggguacugucugacacgguggaugcugaucgaggcggagcucaaaugcuuuggaaauaccgccguggcuaaguguaacgaaaaacaugacgaggaguucugcgauaugcugcgccuuuuugacuucaauaagcaggccauuagacggcugaaaacagaagcucagaugagcauccagcucauuaacaaggccguuaaugcgcugaucaacgaucaacuuauuaugaagaaucaucugcgcgacaucaugggcaucccuuauugcaacuacucuaaauauugguaccucaaucacaccgugacggggaagacaucccugcccagauguuggcuggucagcaacggaucuuaccucaaugaaacccacuucagcgacgauauugagcagcaggccgacaacaugaucaccgagcugcuucaaaaagaauauauugaucggcagggcaagacaccucuggggcucguggaccuguuuguguucuccaccucuuuuuaccugaucagcauuuuccuucaccucgucaaaaucccgacacaucgccacauuaucggaaagcccugcccuaaaccccauagacugaaucacaugggcaucuguuccugcggccuguauaagcacccugggauucccguuaaguggaaacgguga

SEQ ID NO: 1664 - RNA, 1473 nt, Artificial Sequence
  derived and/or modified protein sequence (opt5) from LASV(LASV267-NIG-2010;Clade II)__AIT17686__GPC
augggccagaucauuaccuucuuucaagaggugccccacgucaucgaagagguuaugaacauugugcugaucgcccucagccugcuugcuauucugaaggggaucuacaauguggccacaugcggacucuucggccuggucuccuuucuucugcucugugggagaucuugcagcacgaccuauaaaggaguguacgaacugcagacacuggagcucgacauggcgucccugaacaugaccaugccucuuucuuguacaaagaauaacagccaucacuauaucaugguuggcaaugaaaccgggcuggagcucacacugaccaacacguccauuaucaaucauaaauucugcaaccuuucugaugcucacaagaaaaaucuguacgaccaugcccucaugagcauuaucuccaccuuucaccugagcauuccgaacuucaaucaguaugaggccaugucuugugauuuuaacggaggcaagaucuccgugcaguacaaucugagccacacauaugcugucgacgccgcuaaccauugcggcaccauugccaauggggugcuccaaacauucaugcggauggcguggggaggcucuuacaucgcccuggauucccgcaaggggagcugggacuguaucaugaccucuuaccaguaucuuauuauccagaacacgacaugggaagaucacugccaguuuuccagacccagcccuauuggauaccugggccuccugucccaacggacccgcgacaucuauauuucuagacggcuucuggggacauucaccuggacccucagcgauuccgagggaaacgaaacacccggcggcuacugucugacgcgcuggaugcugaucgaggcugagcucaaaugcuuugggaauaccgccguugcuaaguguaacgaaaaacaugacgaggaguucugcgauaugcugagacuuuuugacuucaauaagcaggccauccggcgccugaaaacagaagcgcagaugagcauucagcucaucaacaaggccgugaaugcucugauuaacgaucaacuuaucaugaagaaucaccugagagacauuaugggaaucccuuauugcaacuacucuaaauauugguaccucaaucacaccgucacaggcaagaccucccugccccgguguuggcuggugagcaacgggucuuaccucaaugaaacgcauuucagcgacgauaucgagcagcaggccgacaacaugauuacagagcugcuucaaaaagaauauauggaucgccagggaaagaccccucugggccucguggaccuguuugucuucuccaccucuuuuuaccugaucagcauuuuccuucaccucaucaaaauuccgacacauagacacguuaucgggaagcccugcccuaaaccccaucggcugaaucacaugggaauuuguuccugcggccuguauaagcacccuggcgugcccgugaaguggaaacgcuga

SEQ ID NO: 1665 - RNA, 1473 nt, Artificial Sequence
  derived and/or modified protein sequence (opt5) from LASV(LASV271-NIG-2010;Clade II)__AIT17690__GPC
augggccagaucauuaccuucuuucaagaggugccccacgucaucgaagagguuaugaacauugugcugaucgcccucagccugcuugcuauucugaaggggaucuacaauguggccacaugcggacucuucggccuggucuccuuucuucugcucugugggagaucuugcagcacgaccuauaaaggaguguacgaacugcagacacuggagcucgacauggcgucccugaacaugaccaugccucuuucuuguacaaagaauaacagccaucacuauaucaugguuggcaaugaaaccgggcuggagcucacacugaccaacacguccauuaucaaucauaaauucugcaaccuuucugaugcucacaagaaaaaucuguacgaccaugcccucaugagcauuaucuccaccuuucaccugagcauuccgaacuucaaucaguaugaggccaugucuugugauuuuaacggaggcaagaucuccgugcaguacaaucugagccacgcuuaugccgucgacgcugccucucauugcggcacaguggcgaacgggguucuccaaaccuucaugcggauggccuggggaggcuccuacauugcucuggauagcgggaagggaucuugggacuguaucaugacauccuaccaguaucuuaucauucagaauaccacgugggaagaucacugccaguuuagccgccccuccccuaucggcuaccuggggcuccugucucaaagaacacgggacauuuauaucagccgcagacuucugggaaccuucacauggacccucuccgauagcgagggcaacgaaacccccggcggguacugucugacacgguggaugcugauugaggccgagcucaaaugcuuuggaaacacggcuguggccaaguguaaugaaaaacaugacgaggaguucugcgauaugcugcgccuuuuugacuucaacaagcaggcgaucagacggcugaaaaccgaagcccagaugucuauccagcucauuaauaaggcugucaacgcccugaucaaugaucaacuuauuaugaagaaccaucugcgcgacaucaugggcauuccuuauugcaauuacuccaaauauugguaccucaaccacacagugaccgggagaacaagccugccccgguguuggcuggugucuaauggaagcuaccucaacgaaacccacuucuccgacgauaucgagcagcaggcugacaauaugaucacggagcugcuucaaaaggaauauauggaucgccagggcaaaacaccucuggggcucgucgaccuguuuguuuucucuaccagcuuuuaccugauuuccaucuuccuucaccucgugaagauuccgacccauagacacgugaucggaaaacccugcccuaagccccaucggcugaaccacaugggcauuuguagcugcggccuguauaaacacccugggguccccgugaaguggaagcgcuga

SEQ ID NO: 1666 - RNA, 1473 nt, Artificial Sequence
  derived and/or modified protein sequence (opt5) from LASV(LASV274-NIG-2010;Clade II)__AIT17694__GPC
augggccagaucauuaccuucuuucaagaggugccccacgucaucgaagagguuaugaacauugugcugaucgcccucagccugcuugcuauucugaaggggaucuacaauguggccacaugcggacucuucggccuggucuccuuucuucugcucugugggagaucuugcagcacgaucuauaaaggaguguacgaacugcagacccuggagcucgacauggcgucccugaacaugacaaugccucuuucuuguaccaagaauaacagccaucacuauauuaugguuggcaaugaaacagggcuggagcucacccugacaaacaccuccaucauuaaucauaaauucugcaaccuuucugaugcucacaagaaaaaucuguacgaccaugcccucaugagcaucauuuccacguuucaccugagcaucccgaacuucaaucaguaugaggccaugucuugugauuuuaacggaggcaagauuuccgugcaguacaaucugagccacaccuaugcugucgacgccgcuaaccauugcggcacaaucgccaauggggugcuccaaaccuucaugcggauggcguggggaggcucuuacaucgcccuggauuccgggaagggaagcugggacuguauuaugacaucuuaccaguaucuuaucauucagaacaccacgugggaagaucacugccaguuuucccgccccagcccuaucggcuaccuggggcuccugucccaaagaacacgggacauuuauaucucucgcagacuucugggaaccuucacauggacccucagcgauuccgagggcaacgaaacccccggcggguacugucugacacgguggaugcugaucgaggcugagcucaaaugcuuuggaaauacggccguugcuaaguguaacgaaaaacaugacgaggaguucugcgauaugcugcgccuuuuugacuucaauaagcaggccauuagacggcugaaaaccgaagcgcagaugagcauccagcucauuaacaaggccgugaaugcucugaucaacgaucaacuuauuaugaagaaucaucugcgcgacaucaugggcaucccuuauugcaacuacucuaaauauugguaccucaaucacacagucaccgggaagacaucccugcccagauguuggcuggugagcaacggaucuuaccucaaugaaacccacuucagcgacgauauugagcagcaggccgacaacaugaucacggagcugcuucaaaaagaauauauugaucggcagggcaagacaccucuggggcucguggaccuguuugucuucuccaccucuuuuuaccugaucagcauuuuccuucaccucguuaaaaucccgacccaucgccacguggugggaaagcccugcccuaaaccccauagacugaaucacaugggcauuuguuccugcggccuguauaagcacccugggguccccgugaaguggaaacgguga

SEQ ID NO: 1667 - RNA, 1473 nt, Artificial Sequence
  derived and/or modified protein sequence (opt5) from LASV(LASV719-NIG-2009;Clade II)__AIT17704__GPC
augggccagaucauuaccuucuuucaagaggugccccacgucaucgaagagguuaugaacauugugcugaucgcccucagccugcuugcuauucugaaggggaucuacaauguggccacaugcggacucuucggccuggucuccuuucuucugcucugugggagaucuugcagcacgaccuauaaaggaguguacgaacugcagacacuggagcucgacauggcgucccugaacaugaccaugccucuuucuuguacaaagaauaacagccaucacuauaucaugguuggcaaugaaaccgggcuggagcucacacugaccaacacguccauuaucaaucauaaauucugcaaccuuucugaugcucacaagaaaaaucuguacgaccaugcccucaugagcauuaucuccaccuuucaccugagcauuccgaacuucaaucaguaugaggccaugucuugugauuuuaacggaggcaagaucuccgugcaguacaaucugagccacacauaugcugucgacgccgcuaaccauugcggcaccauugccaauggggugcuccaaacauucaugcggauggcguggggaggcucuuacaucgcccuggauuccgggaagggaagcugggacuguaucaugaccucuuaccaguaucuuauuauccagaacacgacaugggaagaucacugccaguuuucccgccccagcccuauuggcuaccuggggcuccugucccaaagaacccgggacaucuauauuucucgcagacuucugggaacauucaccuggacccucagcgauuccgagggcaacgaaacacccggcggguacugucugacgcgguggaugcugaucgaggcugagcucaaaugcuuuggaaauaccgccguugcuaaguguaacgaaaaacaugacgaggaguucugcgauaugcugcgccuuuuugacuucaauaagcaggccaucagacggcugaaaacagaagcgcagaugagcauucagcucaucaacaaggccgugaaugcucugauuaacgaucaacuuaucaugaagaaucaucugcgcgacauuaugggcaucccuuauugcaacuacucuaaauauugguaccucaaucacaccgucacagggaagaccucccugcccagauguuggcuggugagcaacggaucuuaccucaaugaaacgcacuucagcgacgauaucgagcagcaggccgacaacaugauuacagagcugcuucaaaaagaauauaucgaucggcagggcaagaccccucuggggcucguggaccuguuugucuucuccaccucuuuuuaccugauuagcaucuuccuucaccucguuaaaauuccgacacaucgccacgugaucggaaagcccugcccuaaaccccauagacugaaucacaugggcauuuguuccugcggccuguauaagcacccuggggugcccgucaaguggaaacgguga

SEQ ID NO: 1668 - RNA, 1473 nt, Artificial Sequence
  derived and/or modified protein sequence (opt5) from LASV(LASV738-NIG-2009;Clade II)__AIT17712__GPC
augggccagaucauuaccuucuuucaagaggugccccacgucaucgaagagguuaugaacauugugcugaucgcccucagccugcuugcuauucugaaggggaucuacaauguggccacaugcggacucuucggccuggucuccuuucuucugcucugugggagaucuugcagcacgaccuauaaaggaguguacgaacugcagacacuggagcucgacauggcgucccugaacaugaccaugccucuuucuuguacaaagaauaacagccaucacuauaucaugguuggcaaugaaaccgggcuggagcucacacugaccaacacguccauuaucaaucauaaauucugcaaccuuucugaugcucacaagaaaaaucuguacgaccaugcccucaugagcauuaucuccaccuuucaccugagcauuccgaacuucaaucaguaugaggccaugucuugugauuuuaacggaggcaagaucuccgugcaguacaaucugagccacacauaugcugucgacgccgcuaaccauugcggcaccauugccaauggggugcuccaaacauucaugcggauggcguggggaggcucuuacaucgcccuggauuccgggaagggagcuugggacuguaucaugaccagcuaccaguaucuuauuauccagaacacgacaugggaagaucacugccaguuuucucgccccuccccuauuggcuaccuggggcuccugagccaaagaacccgggacaucuauauuucccgcagacuucugggaacauucaccuggacccucucugauagcgagggcaacgaaacacccggcggguacugucugacgcgguggaugcugaucgaggccgagcucaaaugcuuuggaaauaccgcuguugccaaguguaacgaaaaacaugacgaggaguucugcgauaugcugcgccuuuuugacuucaauaagcaggcgaucaugagacugaaaacagaagcccagauguccauucagcucaucaacaaggcugugaaugcccugauuaacgaucaacuuaucaugaagaaucaucugcgggacauuaugggcaucccuuauugcaacuacagcaaauauugguaccucaaucacaccgucacagggaagaccucucugccccgcuguuggcugguguccaacggaagcuaccucaaugaaacgcacuucucugacgauaucgagcagcaggcugacaacaugauuacagagaugcugcaaaaagaauauaucgauagacagggcaagaccccucuugggcugguggaccucuuugucuucagcaccuccuuuuaccugauuucuaucuuccugcaccuuguuaaaauuccgacacaucggcacgugaucggaaagcccugcccuaaaccccaucgccucaaucacaugggcauuuguagcugcggccuguauaagcacccuggggugcccgucagauggaagcgguga

SEQ ID NO: 1669 - RNA, 1473 nt, Artificial Sequence
  derived and/or modified protein sequence (opt5) from LASV(LASV966-NIG-2009;Clade II)__AIT17718__GPC
augggccagaucauuaccuucuuucaagaggugccccacgucaucgaagagguuaugaacauugugcugaucgcccucagccugcuugcuauucugaaggggaucuacaauguggccacaugcggacucuucggccuggucuccuuucuucugcucugugggagaucuugcagcacgaccuauaaaggaguguacgaacugcagacacuggagcucgacauggcgucccugaacaugaccaugccucuuucuuguacaaagaauaacagccaucacuauauccggguuggcaaugaaaccgggcuggagcucacacugaccaacgcuuccauuaucaaucauaaauucugcaaccuuucugaugcccacaagaaaaaucuguacgaccaugcccucaugagcauuaucuccacguuucaccugagcauuccgaacuucaaucaguaugaggcuaugucuugugauuuuaacggaggcaagaucuccgugcaguacaaucugagccacgccuaugcuauugacgccgcgaaccauugcggcaccgucgccaauggggugcuccaaacauucaugcgcauggcuuggggaggcucuuacaucgcccuggauuccgggagaggaaacugggacuguaucaugaccagcuaccaguaucuuauuauccagaacacaaccugggaagaucacugccaguuuucucggcccuccccuauuggcuaccuggggcuccugagccaacgcacgagagacaucuauauuucccggcgccuucugggaacauucaccuggacacucucugauagcgagggcaaugaaacccccggcggguacugucugaccagauggaugcugaucgaggcugagcucaagugcuuuggaaacacagccguugcgaaauguaaugaaaagcaugacgaggaguucugcgauaugcugcggcuuuuugacuucaacaaacaggccauccgcagacugaagacggaagcucagauguccauucagcucaucaauaaagccgugaacgcucugauuaaugaucaacuuaucaugaagaaccaucugcgggacauuaugggcaucccuuauugcaauuacagcaaguauugguaccucaaccacaccgucacagggaaaaccucucugccccgcuguuggcugguguccaauggaagcuaccucaacgaaacacacuucucugacgauaucgagcagcaggccgacaauaugauuaccgagcugcuucaaaaggaauauauggauagacagggcaaaacgccucuggggcucguggaccuguuugucuucagcacauccuuuuaccugaucucuauuuuccuucaccucguuaagaucccgacccaucggcacgugauuggaaaacccugcccuaagccccaucgccugaaccacaugggcaucuguagcugcggcuuuuauaaacacccuggggugcccgucaaguggaagagauga

SEQ ID NO: 1670 - RNA, 1473 nt, Artificial Sequence
  derived and/or modified protein sequence (opt5) from LASV(LASV969-NIG-2009;Clade II)__AIT17724__GPC
augggccagaucauuaccuucuuucaagaggugccccacgucaucgaagagguuaugaacauugugcugaucgcccucagccugcuugcuauucugaaggggaucuacaauguggccacaugcggacucuucggccuggucuccuuucuucugcucugugggagaucuugcagcacgaccuauaaaggaguguacgaacugcagacacuggagcucgacauggcgaaccugaauaugaccaugccucuuuccuguacaaagaacaauucucaucacuauaucaugguuggcaacgaaaccgggcuggagcucacacugaccaauacgagcauuaucaaccauaaauucugcaaucuuuccgaugcucacaagaaaaaccuguacgaccaugcccucaugucuauuaucagcaccuuucaccuguccauuccgaauuucaaccaguaugaggccaugagcugugauuuuaauggaggcaagaucucugugcaguacaaccugucccacacauaugcugucgacgccgcuaaucauugcggcaccguggccaacgggguucuccaaacauucaugcggauggcguggggaggcagcuacauugcccuggauucugggaagggauccugggacuguaucaugaccagcuaccaguaucuuaucauucagaacacgacaugggaagaucacugccaguuuucucgccccuccccuaucggcuaccuggggcuccugagccaaagaacccgggacauuuauaucucccgcagacuucugggaacauucaccuggacccucucugauagcgagggcaaugaaacacccggcggguacugucugacgcgguggaugcugauugaggcugagcucaaaugcuuuggaaacaccgccguggcuaaguguaaugaaaaacaugacgaggaguucugcgauaugcugcgccuuuuugacuucaacaagcaggccaucagacggcugaaaacagaagcgcagauguccauccagcucauuaauaaggccgucaacgcucugaucaaugaucaacuuauuaugaagaaccaucugcgcgacaucaugggcauuccuuauugcaauuacagcaaauauugguaccucaaccacaccgugacagggaagaccucucugcccagauguuggcugguguccaauggaagcuaccucaacgaaacgcacuucucugacgauaucgagcagcaggccgacaauaugaucacagagcugcuucaaaaagaauauauggaucggcagggcaagaccccucuggggcucgucgaccuguuuguuuucagcaccuccuuuuaccugauuucuaucuuccuucaccucgugaaaauuccgacacaucgccacaucaugggaaagcccugcccuaaaccccauagacugaaccacaugggcauuuguagcugcggccuguauaagcacccuggggugcccgucaaguggaaacgguga

SEQ ID NO: 1671 - RNA, 1473 nt, Artificial Sequence
  derived and/or modified protein sequence (opt5) from LASV(LASV971-NIG-2009;Clade II)__AIT17728__GPC
augggccagaucauuaccuucuuucaagaggugccccacgucaucgaagagguuaugaacauugugcugaucgcccucagccugcuugcuauucugaaggggaucuacaauguggccacaugcggacucuucggccuggucuccuuucuucugcucugugggagaucuugcagcacgaccuauaaaggaguguacgaacugcagacacuggagcucgacaugggcucccugaacaugaccaugccucuuucuuguacaaagaauaacagccaucacuauaucaugguugggaaugaaaccggacuggagcucacacugaccaacacguccauuaucaaucauaaauucugcaaccuuucugaugcgcacaagaaaaaucuguacgaccaugcucucaugagcauuaucuccaccuuucaccugagcauuccgaacuucaaucaguaugaggccaugucuugugauuuuaacggcggcaagaucuccgugcaguacaaucugagccacacauaugccgucgacgcugccaaccauugcgggaccauugcuaauggagugcuccaaacauucaugcggauggccuggggcgggucuuacaucgcgcuggauuccggaaagggcagcugggacuguaucaugaccucuuaccaguaucuuauuauccagaacacgacaugggaagaucacugccaguuuucccgccccagcccuauuggguaccugggacuccugucccaaagaacccgggacaucuauauuucucgcagacuucugggcacauucaccuggacccucagcgauuccgagggcaacgaaacacccgggggauacugucugacgcgguggaugcugaucgaggccgagcucaaaugcuuuggcaauaccgcuguugccaaguguaacgaaaaacaugacgaggaguucugcgauaugcugcgccuuuuugacuucaauaagcaggcuaucagacggcugaaaacagaagcccagaugagcauucagcucaucaacaaggcggugaaugcccugauuaacgaucaacuuaucaugaagaaucaucugcgcgacauuauggggaucccuuauugcaacuacucuaaauauugguaccucaaucacaccgucacaggaaagaccucccugcccagauguuggcuggugagcaacggcucuuaccucaaugaaacgcacuucagcgacgauaucgagcagcaggcugacaacaugauuacagagcugcuucaaaaagaauauauggaucggcaggggaagaccccucugggacucguggaccuguuugucuucuccaccucuuuuuaccugaucagcauuuuccuucaccucguuaaaaucccgacacaucgccacgugauuggcaagcccugcccuaaaccccauagacugaaucacaugggcaucuguuccugcgggcuguauaagcacccuggagugcccgucaaguggaaacgguga

SEQ ID NO: 1672 - RNA, 1473 nt, Artificial Sequence
  derived and/or modified protein sequence (opt5) from LASV(LASV975-NIG-2009;Clade II)__AIT17732__GPC
augggccagaucauuaccuucuuucaagaggugccccacgucaucgaagagguuaugaacauugugcugaucgcccucagccugcuugcuauucugaaggggaucuacaauguggccacaugcggacucuucggccuggucuccuuucuucugcucugugggagaucuugcagcacgaccuauaaaggaguguacgaacugcagacacuggagcucgacauggcgucccugaacaugaccaugccucuuucuuguacaaagaauaacagccaucacuauaucaugguuggcaaugaaaccgggcuggagcucacacugaccaacacguccauuaucaaucauaaauucugcaaccuuucugaugcucacaagaaaaaucuguacgaccaugcccucaugagcauuaucuccaccuuucaccugagcauuccgaacuucaaucaguaugaggccaugucuugugauuuuaacggaggcaagaucuccgugcaguacaaucugagccacacauaugcugucgacgccgcuaaccauugcggcaccauugccaauggggugcuccaaacauucaugcggauggcguggggaggcucuuacaucgcccuggauuccgggaagggaagcugggacuguaucaugaccucuuaccaguaucuuauuauccagaacacgacaugggaagaucacugccaguuuucccgccccagcccuauuggcuaccuggggcuccugucccaaagaacccgggacaucuauauuucucgcagacuucugggaacauucaccuggacccucagcgauuccgagggcaacgaaacacccggcggguacugucugacgcgguggaugcugaucgaggcugagcucaaaugcuuuggaaauaccgccguugcuaaguguaacgaaaaacaugacgaggaguucugcgauaugcugcgccuuuuugacuucaauaagcaggccaucagacggcugaaaacagaagcgcagaugagcauucagcucaucaacaaggccgugaaugcucugauuaacgaucaacuuaucaugaagaaucaucugcgcgacauuaugggcaucccuuauugcaacuacucuaaauauugguaccucaaucacaccgucacagggaagaccucccugcccagauguuggcuggugagcaacggaucuuaccucaaugaaacgcacuucagcgacgauaucgagcagcaggccgacaacaugauuacagagcugcuucaaaaagaauauaucgaucggcagggcaagaccccucuggggcucguggaccuguuugucuucuccaccucuuuuuaccugauuagcaucuuccuucaccucguuaaaauuccgacacaucgccacaucgugggaaagcccugcccuaaaccccauagacugaaucacaugggcauuuguuccugcggccuguauaagcacccuggggugcccgucaaguggaaacgguga

SEQ ID NO: 1673 - RNA, 1473 nt, Artificial Sequence
  derived and/or modified protein sequence (opt5) from LASV(LASV976-NIG-2009;Clade II)__AIT17736__GPC
augggccagaucgugaccuucuuucaagaggucccccacguuauugaagaggugaugaacaucgugcugauugcccucagccugcuugcuauccugaaggggauuuacaaugucgccacaugcggacucuucggccugguguccuuucuucugcucugugggagaucuugcagcacgaccuauaaaggaguuuacgaacugcagacacuggagcucgacauggcgucccugaacaugaccaugccucuuucuuguacaaagaauaacagccaucacuauaucauggugggcaaugaaaccgggcuggagcucacacugaccaacacguccaucauuaaucauaaauucugcaaccuuucugaugcucacaagaaagaccuguacgaucaugcccucaugagcaucauuuccaccuuucaccugagcaucccgaauuucaaccaguaugaggccaugucuugugacuuuaauggaggcaagauuuccguccaguacaaccugagccacacauaugcuguggaugccgcuaaucauugcggcaccaucgccaacgggguucuccaaacauucaugcggauggcguggggaggcucuuacauugcccuggacuccgggaagggaagcugggauuguaucaugaccucuuaccaguaucuuaucauucagaauacgacaugggaagaccacugccaguuuucccgccccagcccuaucggcuaccuggggcuccugucccaaagaacccgggauauuuauaucucucgcagacuucugggaacauucaccuggacccucagcgacuccgagggcaacgaaacacccggcggguacugucugacgcgguggaugcugauugaggcugagcucaaaugcuuuggaaacaccgccguggcuaaguguaaugaaaaacaugaugaggaguucugcgacaugcugcgccuuuuugauuucaacaagcaggccaucaugagacugaaaacagaagcgcagaugagcauccagcucauuaauaaggccgucaacgcucugaucaaugaccaacuuauuaugaagaaccaucugcgggacaucaugggcauuccuuauugcaauuacucuaaauauugguaccucaaccacaccgugacagggaagaccucccugccccgcuguuggcuggugagcaauggaucuuaccucaacgaaacgagauucagcgaugacaucgagcagcaggccgauaauaugaucacagagaugcugcaaaaagaauaucuugaccggcagggcaagaccccucuggggcucgucgaucuguuuguuuucuccaccucuuuuuaccugauuagcaucuuccuucaccucgugaaaauuccgacacaccgccauaucauuggaaagcccugcccuaaaccccacagacugaaccauaugggcaucuguuccugcggccuguauaagcacccuggggugcccgucaaguggaaacgguga

SEQ ID NO: 1674 - RNA, 1473 nt, Artificial Sequence
  derived and/or modified protein sequence (opt5) from LASV(LASV978-NIG-2009;Clade II)__AIT17744__GPC
augggccagaucauuaccuucuuucaagaggugccccacgucaucgaagagguuaugaacauugugcugaucgcccucagccugcuugcuauucugaaggggaucuacaauguggccacaugcggacucuucggccugauguccuuucuucugcucugugggagaucuugcagcacgaccuauaaaggagucuacgaacugcagacacuggagcucgacauggcgaaccugaauaugaccaugccucuuuccuguacaaagaacaauucucaucacuauaucauggugggcaacgaaaccgggcuggagcucacacugaccaauacgagcauuaucaaccauaaauucugcaaucuuuccgaugcucacaagaaaaaccuguacgaccaugcccucaugucuauuaucagcaccuuucaccuguccauuccgaauuucaaccaguaugaggccaugagcugugauuuuaauggaggcaagaucucuguucaguacaaccugucccacgcuuaugccguggacgcugccaaucauugcggcacaauugcgaacgggguccuccaaaccuucaugcggauggccuggggaggcagcuacaucgcucuggauucugggaagggauccugggacuguaucaugacaagcuaccaguaucuuauuauccagaacaccucuugggaagaucacugccaguuuucccgccccagcccuauuggcuaccuggggcuccugucccaaagaacgcgggacaucuauauuucucgcagacuucugggaacauucaccuggacacucagcgauuccgagggcaaugaaacccccggcggguacugucugacccgguggaugcugaucgaggccgagcucaaaugcuuuggaaacacagcuguggccaaguguaaugaaaaacaugacgaggaguucugcgauaugcugcgccuuuuugacuucaacaagcaggcgaucagacggcugaaaacggaagcccagaugagcauucagcucaucaauaaggcuguuaacgcccugauuaaugaucaacuuaucaugaagaaccaucugcgcgacauuaugggcaucccuuauugcaauuacucuaaauauugguaccucaaccacaccgugacagggaagaccucccugcccagauguuggcuggucagcaauggaucuuaccucaacgaaacacacuucagcgacgauaucgagcagcaggcugacaauaugauuaccgagcugcuucaaaaagaauauaucgaucggcagggcaagacgccucuggggcucguggaccuguuuguguucuccacaucuuuuuaccugauuagcaucuuccuucaccucgucaaaauuccgacccaucgccacguuaucggaaagcccugcccuaaaccccauagacugaaccacaugggcauuuguuccugcggccuguauaagcacccuggggugcccgugaaguggaaacgguga

SEQ ID NO: 1675 - RNA, 1473 nt, Artificial Sequence
  derived and/or modified protein sequence (opt5) from LASV(LASV981-NIG-2009;Clade II)__AIT17752__GPC
augggccagaucauuaccuucuuucacgaggugccccaugucaucgaagagguuaugaacauugugcugaucgcccucagccugcuugcuauucugaaggggaucuacaauguggccacaugcggacucuucggccuggucuccuuucuucugcucugugggagaucuugcagcacgaccuauaaaggaguguacgaacugcaaacacuggagcucgacauggcgucccugaacaugaccaugccucuuucuuguacaaagaauaacagccaccauuauaucaugguuggcaaugaaaccgggcuggagcucacacugaccaacacguccauuaucaaucacaaauucugcaaccuuucugaugcucauaagaaaaaucuguacgaccacgcccucaugagcauuaucuccaccuuucaccugagcauuccgaacuucaaucaguaugaggccaugucuugugauuuuaacggaggcaagaucuccgugcaguacaaucugagccauacauaugcuauugacgccgcuaaccacugcggcaccaucgccaaugggguccuccagacauucaugcggauggcguggggaggcucuuacaucgcccuggauuccgggcgcggaagcugggacuguauuaugaccucuuaccaauaucuuaucauucagaacacgacaugggaagaucauugccaguuuuccagacccagcccuaucggcuaccuggggcuccugucccagcggacccgcgacauuuauaucucuagacggcuucugggaacauucaccuggacccucagcgauuccgagggcaacgaaacacccggcggguacugucugacgcgcuggaugcugaucgaggcugagcucaagugcuuuggaaauaccgccguggcuaaauguaacgaaaagcacgacgaggaguucugcgauaugcugagacuuuuugacuucaauaaacaagccauucggcgccugaagacagaagcgcagaugagcauccagcucauuaacaaagccguuaaugcucugaucaacgaucagcuuauuaugaagaaucaccugagagacaucaugggcaucccuuauugcaacuacucuaaguauugguaccucaaucauaccgugacagggaaaaccucccugccccgguguuggcuggucagcaacggaucuuaccucaaugaaacgcacuucagcgacgauauugagcaacaggccgacaacaugaucacagagcugcuucagaaggaauauauugaucgccaaggcaaaaccccucuggggcucguggaccuguuuguguucuccaccucuuuuuaccugaucagcauuuuccuucaucucgucaagaucccgacacacagacauguuauuggaaaacccugcccuaagccccaccggcugaaucacaugggcaucuguuccugcggccuguauaaacauccuggggugcccgugaaguggaagcgcuga

SEQ ID NO: 1676 - RNA, 1473 nt, Artificial Sequence
  derived and/or modified protein sequence (opt5) from LASV(LASV982-NIG-2009;Clade II)__AIT17756__GPC
augggccagaucauuaccuucuuucaagaggugccccacgucaucgaagagguuaugaacauugugcugaucgcccucagccugcuugcuauucugaaggggaucuacaauguggccacaugcggacucuucggccuggucuccuuucuucugcucugugggagaucuugcagcaucacguauaaaggaguguacgaacugcagacccuggagcucgacauggcgucccugaacaugacaaugccucuuucuuguaccaagaauaacagccaucacuauauuaugguuggcaaugaaacagggcuggagcucacccugacaaacaccuccaucauuaaucauaaauucugcaaccuuucugaugcucacaagaaaaaucuguacgaccaugcccucaugagcaucauuuccacguuucaccugagcaucccgaacuucaaucaguaugaggccaugucuugugauuuuaacggaggcaagauuuccgugcaguacaaucugagccacaccuaugcugucgacgccgcuaaccauugcggcacaaucgccaauggggugcuccaaaccuucaugcggauggcguggggaggcucuuacaucgcccuggauuccgggcgcggaagcugggacuguauuaugacaucuuaccaguaucuuaucauucagaacaccacgugggaagaucacugccaguuuuccagacccagcccuaucggcuaccuggggcuccugucccaacggacacgcgacauuuauaucucuagacggcuucugggaaccuucacauggacccucagcgauuccgagggcaacgaaacccccggcggguacugucugacacgcuggaugcugaucgaggcugagcucaagugcuuuggaaauacggccguugcuaaauguaacgaaaagcaugacgaggaguucugcgauaugcugagacuuuuugacuucaauaaacaggccauucggcgccugaaggcggaagcccagaugagcauccagcucauuaacaaagcugugaaugcccugaucaacgaucaacuuauuaugaagaaucaccugagagacaucaugggcaucccuuauugcaacuacucuaaguauugguaccucaaucacaccgucacagggcggaccucccugccccgcuguuggcuggugagcaacggaucuuaccucaaugaaacacauuucagcgacgauauugagcagcaggcugacaacaugaucaccgagcugcuucaaaaagaauauauugauagacagggcaagacgccucuggggcucguggaccuguuugucuucuccacaucuuuuuaccugaucagcauuuuccuucaccucguuaaaaucccgacccaucggcacauuaucggaaagcccugcccuaaaccccaucgccugaaucacaugggcaucuguuccugcggccuguauaagcacccuggggugcccgugaaauggaagagauga

SEQ ID NO: 1677 - RNA, 1473 nt, Artificial Sequence
  derived and/or modified protein sequence (opt5) from LASV(LASV988-NIG-2009;Clade II)__AIT17758__GPC
augggccagaucauuaccuucuuucaagaggugccccacgucaucgaagagguuaugaacauugugcugaucgcccucagccugcuugcuauucugaaggggaucuacaauguggccacaugcggacucuucggccuggucuccuuucuucugcucugugggagaucuugcagcacgaccuauaaaggaguguacgaacugcagacacuggagcucaacauggcgucccugaauaugaccaugccucuuucuuguacaaagaacaauagccaucacuauaucaugguuggcaacgaaaccgggcuggagcucacacugaccaauacguccauuaucaaccauaaauucugcaaucuuucugacgcucacaagcggaaccuguacgaucaugcccucaugagcauuaucuccaccuuucaccugagcauuccgaauuucaaccaguaugaggccaugucuugugacuuuaauggaggcaaaaucuccgugcaguacaaccugagccacacauaugcugucgaugccgcuaagcauugcggcaccauugccaauggggugcuccaaacauucaugcgcauggcguggggaggcucuuacaucgcccuggacuccgggaagggaagcugggauuguaucaugaccucuuaccaguaucuuauuauccagaacacgacaugggaagaccacugcgaguuuuccagacccagcccuauuggcuaccuggggcuccugucccagcggacccgcgauaucuauauuucuagacggcuucugggaacauucaccuggacccucagcgacuccgaaggcaacgagacacccggcggguacugucugacgcgcuggaugcugaucgaggcugaacucaaaugcuuuggaaauaccgccguugcuaaguguaacgagaaacaugaugaagaguucugcgacaugcugagacuuuuugauuucaauaagcaagccauccggcgccugaaagcggaagcccagaugagcauucagcucaucaacaaggcugugaaugcccugauuaacgaccagcuuaucaugaagaaucaccugagagauauuaugggcaucccuuauugcaacuacucuaaauauugguaccucaaucacacagucaccgggaagacaucccugccccgguguuggcuggugagcaacggaucuuaccucaaugagacccauuucagcgacgacaucgagcaacaggcugauaacaugauuacggaacugcuucagaaagaguauaucgaccgccaaggcaagacaccucuggggcucguggaucuguuugucuucuccaccucuuuuuaccugauuagcaucuuccuucaccucguuaaaauuccgacccauagacacgugaucggaaagcccugcccuaaaccccaucggcugaaucacaugggcauuuguuccugcggccuguauaagcacccuggggugcccgucaaguggaaacgcuga

SEQ ID NO: 1678 - RNA, 1473 nt, Artificial Sequence
  derived and/or modified protein sequence (opt5) from LASV(LASV989-NIG-2009;Clade II)__AIT17762__GPC
augggccagaucauuaccuucuuucaagaggugccccacgucaucgaagagguuaugaacauugugcugaucgcccucagccugcuugcuauucugaaggggaucuacaauguggccacaugcggacucuucggccuggucuccuuucuucugcucugugggagaucuugcagcacgaccuauaaaggaguguacgaacugcagacacuggagcucgacauggcgucccugaacaugaccaugccucuuucuuguacaaagaauaacagccaucacuauaucaugguuggcaaugaaaccgggcuggagcucacacugaccaacacguccauuaucucucauaaauucugcaaucuuagcgaugcucacaagaaaaaccuguacgaccaugcccucauguccauuaucagcaccuuucaccugucuauuccgaauuucaaccaguaugaggccauguccugugauuuuaauggaggcaagaucagcgugcaguacaaccugucucacacauaugcugucgacgccgcuaaucauugcggcaccauugccaacggggugcuccaaacauucaugcggauggcguggggaggcuccuacaucgcccuggauagcgggaagggaucuugggacuguaucaugaccuccuaccaguaucuuauuauccagaauacgacaugggaagaucacugccaguuuagccgccccuccccuauuggcuaccuggggcuccugucucaaagaacccgggacaucuauauuagccgcagacuucugggaacauucaccuggacccucuccgauagcgagggcaacgaagcucccggcggguacugucugacacgguggaugcugaucgaggccgagcucaaaugcuuuggaaacacggcuguugccaaguguaaugaaaaacaugacgaggaguucugcgauaugcugcgccuuuuugacuucaacaagcaggcgaucagacggcugaaaaccgaagcccagaugucuauucagcucaucaauaaggcugugaacgcccugauuaaugaucaacuuaucaugaagaaccaucugcgcgacauuaugggcaucccuuauugcaauuacuccagauauugguaccucaaccacacagucaccgggaaaacaagccugccccgguguuggcuggugucuaauggaagcuaccucaacgaaacccacuucuccgacgauaucgagcagcaggcugacaauaugauuacggagcugcuucaaaaggaauauauggaucgccagggcaaaacaccucuggggcucguggaccuguuugucuucucuaccagcuuuuaccugaucuccauuuuccuucaccucguuaagaucccgacccauagacacgugauuggaaaacccugcccuaagccccaucggcugaaccacaugggcaucuguagcugcggccuguauaaacacccuggggugcccgucaaguggaagcgcuga

SEQ ID NO: 1679 - RNA, 1473 nt, Artificial Sequence
  derived and/or modified protein sequence (opt5) from LASV(LASV991-NIG-2009;Clade II)__AIT17770__GPC
augggccagaucgugaccuucuuucaagaggucccccacguuauugaagaggugaugaacaucgugcugauugcccucagccugcuugcuauccugaaggggauuuacaaugucgccacaugcggacucuucggccugguguccuuucuucugcucugugggagaucuugcagcacgaccuauaaaggaguuuacgaacugcaggcgcuggagcucgacauguccucucugaacaugacaaugccucuuagcuguaccaagaauaacucccaucacuauaucauggugggcaaugaaacagggcuggagcucacccugacaaacaccucuaucauucaucacaaauucugcaaucuuagcgaugcucauaagaaagaccuguacgaucacgcccucauguccaucauuagcacguuucaccugucuaucccgaacuucaaucaguaugaggccauguccugugacuuuaacggaggcaagauuagcguccaguacaaucugucucauaccuaugcuguggaugccgcuaaccacugcggcacaaucgccaaugggguucuccaaaccuucaugcggauggcguggggaggcuccuacauugcccuggacagcgggaagggaggcugggauuguaucaugacaucuuaccaguuucuuaucauucagaacaccacgugggaagaccauugccaguucucccgccccagcccuaucggguaucugggacuccugucccaaagaacacgggauauuuacaucucucgcagacuucugggcaccuuuacauggacccucagcgacuccgagggcaaugaaacccccgggggauauugucugacacgguggaugcugauugaggcugagcucaaaugcuucggcaacacggccguggcuaaguguaacgaaaaacacgaugaggaauuuugcgacaugcugcgccuuuucgauuucaauaagcaggccaucaaaagacugaagaccgaggcgcagaugagcauccaccucauuaacaaggccgucaaugcucugaucaacgaccagcuuauuaugaaaaaucaucugcgggacaucauggggauuccuuacugcaacuauucuaaguacugguaucucaaucacacagugaccggaaaaacaucccugccccgcuguuggcuggugagcaacggcucuuaccucaaugaaacccauuuuagcgaugacaucgagcaacaggccgauaacaugaucacggagcugcuucagaaggaauacauugacagacaagggaaaacaccucugggacucgucgaucuguucguguuuuccaccucuuucuaucugaucagcauuuuucuucaccucguuaagaucccgacccaucggcacgugauuggcaaacccugcccuaagccccaccgccugaaucauaugggcaucuguuccugcgggcuguacaagcacccuggaguccccgugagauggaaacgguga

SEQ ID NO: 1680 - RNA, 1473 nt, Artificial Sequence
  derived and/or modified protein sequence (opt5) from LASV(LASV993-NIG-2009;Clade II)__AIT17778__GPC
augggccagaucauuaccuucuuucaagaggugccccacgucaucgaagagguuaugaacauugugcugaucgcccucagccugcuugcuauucugaaggggaucuacaauguggccacaugcggacucuucggccuggucuccuuucuucugcucugugggagaucuugcagcacgaccuauaaaggaguguacgaacugcagacacuggagcucgacauggcgaaccugaauaugaccaugccucuuuccuguacaaagaacaauucucaucacuauaucaugguuggcaacgaaaccgggcuggagcucacacugaccaauacgagcauuaucaaccauaaauucugcaaucuuuccgaugcucacaagaaaaaccuguacgaccaugcccucaugucuauuaucagcaccuuucaccuguccauuccgaauuucaaccaguaugaggccaugagcugugauuuuaauggaggcaagaucucugugcaguacaaccugucccacacauaugcucgggacgccgcuaaucauugcggcaccauugccaacgggguccuccaaacauucaugcgcauggcguggggaggcagcuacaucgcccuggauucugggaagggauccugggacuguaucaugaccagcuaccaguaucuuauuauccagaacacgacaugggaagaucacugccaguuuucuagacccuccccuauuggcuaccuggggcuccugagccaacggacccgcgacaucuauauuuccagacggcuucugggaacauucaccuggacccucucugauagcgagggcaaugaaacacccggcggguacugucugacgcgcuggaugcugaucgaggcugagcucaaaugcuuuggaaacaccgccguggcuaaguguaaugaaaaacaugacgaggaguucugcgauaugcugagacuuuuugacuucaacaagcaggccauccggcgccugaaaacagaagcgcagaugaauauucagcucaucaacaaggccguuaaugcucugauuaacgaucaacuuaucaugaagaaucaccugagagacauuaugggcaucccuuauugcaacuacuccaaauauugguaccucaaucacaccgugacagggaagaccagccugccccgguguuggcuggucucuaacggauccuaccucaaugaaacgcauuucagcgacgauaucgagcagcaggccgacaacaugauuacagagcugcuucaaaaagaauauauggaucgccagggcaagaccccucuggggcucguggaccuguuuguguucucuaccagcuuuuaccugaucuccauuuuccuucaccucgucaaaaucccgacacauagacacguuauuggaaagcccugcccuaaaccccaucggcugaaucacaugggcaucuguucuugcggccuguauaagcacccuggggugcccgugaaguggaaacgcuga

SEQ ID NO: 1681 - RNA, 1473 nt, Artificial Sequence
  derived and/or modified protein sequence (opt5) from LASV(Nig08-04;Clade II)__ADU56610__GPC
augggccagaucgugaccuucuuucaagaggucccccacguuauugaagaggugaugaacaucgugcugauugcccucagccugcuugcuauccugaaggggauuuacaaugucgccacaugcggacucuucggccugaucuccuuucuucugcucugugggagaucuugcagcacgaccuauaaaggaguguacgaacugcagacacuggagcucgacauggcgaaccugaauaugaccaugccucuuuccuguacaaagaacucuagccaucacuauaucaugguuggcaaugaaaccgggcuggagcucacacugaccaacacguccauuaucaaucauaaauucugcaaccuuucugaugcucacaagaaaaaucuguacgaccaugcccucaugagcauuaucuccaccuuucaccugagcauuccgaacuucaaucaguaugaggccaugucuugugauuuuaacggaggcaagaucuccgugcaguacaaucugagccacgcuuaugccgucgacgcugccaaccauugcggcacaauugcgaauggggugcuccaaaccuucaugcggauggccuggggaggcucuuacaucgcucuggauuccgggaagggaaacugggacuguaucaugacaagcuaccaguaucuuauuauccagaacaccacgugggaagaucacugccaguuuucucgccccuccccuauuggcuaccuggggcuccugagccaaagaacacgggacaucuauauuucccgcagacuucugggaaccuucacauggacccucucugauagcgagggcaaugaagcccccggcggguacugucugacccgguggaugcugaucgaggcugagcucaaaugcuuuggaaacacagccaucgcgaaguguaaugaaaaacaugacgaggaguucugcgauaugcugcgccuuuuugacuucaacaagcaggccauuaaaagacugaaggcugaagcccagauguccauccagcucauuaauaaggcuguuaacgcccugaucaaugaucaacuuauuaugaaaaaccaucugcgggacaucaugggcaucccuuauugcaauuacagcaaguauugguaccucaaccacacggugaccgggaaaacaucucugccccgcuguuggcugauuuccaauggaagcuaccucaacgaaacccacuucucugacgauaucgagcagcaggccgacaauaugauuacagagcugcuucaaaaggaauauauggauagacagggcaaaaccccucuggggcucgucgaccuguuuguguucagcacguccuuuuaccugaucucuauuuuccuucaccucgugaagaucccgacacaucggcacauugucggacgccccugcccuaaaccccauagacugaaccacaugggcaucuguagcugcggccuguauaagcacccugggguucccgugaaguggaaacgguga

SEQ ID NO: 1682 - RNA, 1473 nt, Artificial Sequence
  derived and/or modified protein sequence (opt5) from LASV(Nig08-A41;Clade II)__ADU56626__GPC
augggccagaucauuaccuucuuucaagaggugccccacgucaucgaagagguuaugaacauugugcugaucgcccucagccugcuugcuauucugaaggggaucuacaauguggccacaugcggacucuucggccuggucuccuuucuucugcucugugggagaucuugcagcacgaccuauaaaggaguguacgaacugcagacacuggagcucaacauggcgucccugaauaugaccaugccucuuucuuguacaaagaacaauagccaucacuauaucaugguuggcaacgaaaccgggcuggagcucacacugaccaauacguccauuaucaaccauaaauucugcaaucuuucugacgcucacaagcggaaccuguacgaucaugcccucaugagcauuaucuccaccuuucaccugagcauuccgaauuucaaccaguaugaggccaugucuugugacuuuaauggaggcaaaaucuccgugcaguacaaccugagccacacauaugcugucgaugccgcuaagcauugcggcaccauugccaauggggugcuccaaacauucaugcgcauggcguggggaggcucuuacaucgcccuggacuccgggaagggaagcugggauuguaucaugaccucuuaccaguaucuuauuauccagaacacgacaugggaagaccacugccaguuuuccagacccagcccuauuggcuaccuggggcuccugucccaacggacccgcgauaucuauauuucuagacggcuucugggaacauucaccuggacccucagcgacuccgagggcaacgaaacacccggcggguacugucugacgcgcuggaugcugaucgaggcugagcucaaaugcuuuggaaauaccgccguugcuaaguguaacgaaaaacaugaugaggaguucugcgacaugcugagacuuuuugauuucaauaagcaggccauccggcgccugaaagcggaagcccagaugagcauucagcucaucaacaaggcugugaaugcccugauuaacgaccaacuuaucaugaagaaucaccugagagauauuaugggcaucccuuauugcaacuacucuaaauauugguaccucaaucacacagucaccgggaagacaucccugccccgguguuggcuggugagcaacggaucuuaccucaaugaaacccauuucagcgacgacaucgagcagcaggcugauaacaugauuacggagcugcuucaaaaagaauauaucgaccgccagggcaagacaccucuggggcucguggaucuguuugucuucuccaccucuuuuuaccugauuagcaucuuccuucaccucguuaaaauuccgacccauagacacgugaucggaaagcccugcccuaaaccccaucggcugaaucacaugggcauuuguuccugcggccuguauaagcacccuggggugcccgucaaguggaaacgcuga

SEQ ID NO: 1683 - RNA, 1473 nt, Artificial Sequence
  derived and/or modified protein sequence (opt5) from LASV(Nig08-A47;Clade II)__ADU56630__GPC
augggccagaucauuaccuucuuucaagaggugccccacgucaucgaagagguuaugaacauugugcugaucgcccucagccugcuugcuauucugaaggggaucuacaauguggccacaugcggacucuucggccuggucuccuuucuucugcucugugggagaucuugcagcacgaccuauaaaggaguguacgaacugcagacacuggagcucgacauggcgucccugaacaugaccaugccucuuucuuguacaaagaauaacagccaucacuauaucaugguuggcaaugaaaccgggcuggagcucacacugaccaacacguccauuaucaaucauaaauucugcaaccuuucugaugcucacaagaaaaaucuguacgaccaugcccucaugagcauuaucuccaccuuucaccugagcauuccgaacuucaaucaguaugaggccaugucuugugauuuuaacggaggcaagaucuccgugcaguacaaucugagccacgcuuaugccgucgacgcugccaaccauugcggcacaauugcgaauggggugcuccaaaccuucaugcggauggccuggggaggcucuuacaucgcucuggauuccgggaagggaagcugggacuguaucaugacaucuuaccaguaucuuauuauccagaacaccacgugggaagaucacugccaguuuucccgccccagcccuauuggcuaccuggggcuccugucccaaagaacacgggacaucuauauuucucgcagacuucugggaaccuucacauggacccucagcgauuccgagggcaacgaaacccccggcggguacugucugacacgguggaugcugaucgaggccgagcucaaaugcuuuggaaauacggcuguugccaaguguaacgaaaaacaugacgaggaguucugcgauaugcugcgccuuuuugacuucaauaagcaggcgaucagacggcugaaaaccgaagcccagaugagcauucagcucaucaacaaggcugugaaugcccugauuaacgaucaacuuaucaugaagaaucaucugcgcgacauuaugggcaucccuuauugcaacuacucuaaauauugguaccucaaucacacagucaccgggaagacaucccugcccagauguuggcuggugagcaacggaucuuaccucaaugaaacccacuucagcgacgauaucgagcagcaggcugacaacaugauuacggagcugcuucaaaaagaauauauggaucggcagggcaagacaccucuggggcucguggaccuguuugucuucuccaccucuuuuuaccugaucagcauuuuccuucaccucguucgcaucccgacccauagacacgugauuggaaaacccugcccuaagccccaucggcugaaucacaugggcaucuguuccugcggccuguauaaacacccuggggugcccgucaaguggaagcgcuga

SEQ ID NO: 1684 - RNA, 1473 nt, Artificial Sequence
  derived and/or modified protein sequence (opt5) from LASV(CSF;Clade III)__AAL13212__GPC
augggccagaucgugaccuucuuucaagaggucccccacguuauugaagagaucaugaacauugugcugaucacacucagccugcuugccauucugaaggggguguacaaucucgcuacgugcggacugaucggccuuaucaccuuccuguuucucugugggagauccugcucuaugacauauaaaggaagcuaccagcuggaaacccuggagcucaacauggaaacacugaauaugaccaugccucuuuccuguacaaagaacaccucucaucacuauauucgggucggcaaugagacggggcuggagcucacccugacaaacaccagcaucauuaaucauaaauucugcaaccuuuccgacgcccacaagaaaaaucuguacgaucauucucucaugagcaucauuuccacauuucaccugagcaucccgaacuucaaucaguaugaagcgaugucuugugacuuuaacggaggcaagauuuccauccaguacaaucugagccacaccuaugcuggcgaugccgccaagcauugcgggacgcucgcuaacggaauccugcaaacauucaugcgcauggccuggggcgggucuuacauugcucuugacuccggaagaggcaauugggauuguaucaugaccagcuaccaguaucugauuauccagaacacaaccugggaggaccacugccaguuuucucggcccuccccuauuggguaccucggacugcuuagccaacgcaccagagaaaucuauaucucccggcgccugcucggcacauucacguggacccugucugauagcgagggcaacgagaaucccgggggauacugucugacaagauggaugcucauugaagccgagcugaaaugcuuuggcaacaccgcgguggccaaguguaaugaaaaacaugacgaggaguucugcgauaugcuucggcuguuugacuucaacaagcaggcuauccagcgccucaaagccgaagcucagauguccauucaacugaucaauaaggccguuaacgcgcuuauuaaugaucagcugaucaugaagaaccaccucagagacaucauggggauuccuuauugcaauuacagcaaauauugguaccugaaccacacaaccacgggacggacaucucugccccgcuguuggcucguguccaauggcagcuaccugaacgagaccagauucucugaugacaucgaacagcaagccgacaauaugauuaccgagaugcuucagaaggaauauaucgaucggcaggggaaaacaccucugggacucgucgaccuguuuguguucagcaccuccuuuuaccugauuucuaucuuccuucaucucauuaagaucccgacacaccgccauaucguuggcggccccugcccuaaaccccacagacugaaccauaaggggauuuguagcugcggacuguauaaacggccuggcguguccgucagauggaagcgcuga

SEQ ID NO: 1685 - RNA, 1473 nt, Artificial Sequence
  derived and/or modified protein sequence (opt5) from LASV(ISTH2121-NIG-2012;Clade III)__AIT17540__GPC
augggccagaucgugaccuucuuucaagaggucccccacguuauugaagagaucaugaacauugugcugaucacacucagccugcuugccauucugaaggggaucuacaauuucgcuacgugcggacucaucggccugauuaccuuucuuuuccugugugggagauccugcucuacaaucuauaaaggaagcuaccagcuccagacccuggaacugaacauggagacacucaauaugaccaugccucuguccuguacaaagaacaauucucaucacuauauucgggugggcaacgaaaccgggcuugagcugacgcucaccaauacaagcaucauuaaccauaaauuuugcaaucuguccgaggcccacaagaaaaaccuuuacgaccaugcgcugaugucuaucauuagcaccuuccaccucuccaucccgaauuuuaaccaguaugaagcuaugagcugugauuucaauggaggcaagaucucuguccaauacaaccugucccacagcuaugccguggacgccgcuaaucauugcggcacaguugccaacggggugcugcagaccuuuaugcgcauggcuuggggaggcucuuacauugcccucgauuccgggagaggaaacugggacuguaucaugacgagcuaccaguaucugauuauccagaauacaaccugggaggaucacugccaauucucucggcccuccccuauuggcuaccuugggcugcucagccagcgcacaagagacaucuauaucucccggcgccugcuuggaaccuuuaccuggacacugucugauagcgaaggcaaggagacgcccggcggguacugucucaccagauggaugcugauugaggcggaacugaaaugcuucggaaacacagccgucgcuaaguguaaugagaaacaugacgaagaguuuugcgauaugcuccggcuguucgacuucaacaagcaggccauccagcgccuuaaaaccgaagcucaaauguccauucagcugaucaauaaggccgugaacgcgcucauuaaugaucagcugaucaugaagaaccaccuuagagacaucaugggcauuccuuauugcaauuacagcaaauauugguaccugaaccacacaucuaccgggcggacgucccuccccaaguguuggcugguuagcaauggaucuuaccugaacgagacacauuuuagcgaugacaucgagcaacaggccgacaauaugauuaccgaaaugcuccagaaagaguauaucgaucgccagggcaagaccccucuggggcuuguggaccuguucgucuuuuccacaucuuucuaccucauuagcaucuuucugcaccuggugaaaauuccgacccauagacacaucgugggaaaguccugccccaaaccucaucggcuuaaccacaugggcaucuguagcugcggccucuauaagcaacccggggucccuguuaaguggaaacgcuga

SEQ ID NO: 1686 - RNA, 1473 nt, Artificial Sequence
  derived and/or modified protein sequence (opt5) from LASV(Nig08-A19;Clade III)__ADU56618__GPC
augggccagaucgugaccuucuuucaagaggucccccacguuauugaagaggugaugaacaucgugcugauugcccucagcauccuggcuauucuuaaggggcuguacaauaucgccacaugcggacucaucggccuggucacguuccuucugcucuccgggagaucuuguagcaugaccuauaaaggaguguacgaacugcagacacuggagcucaacaugaauacccugaacaugacaaugccucuuuccugcaccaagaauaacucucaucacuauauuaugguuggcaaugaaacagggcuggagcucacccugacgaacaccagccuucugcaucacaaauuuuguaaucucuccgacgcgcauaagaaaaaccuguacgaucacacacugaugucuaucauuagcaccuuccaccucuccaucccgaauuuuaaccaguaugaggcuaugagcugcgacuucaauggaggcaagauuacagugcaguacaaccugucucauuccuaugccaucgaugccgcuaaucacuguggcaccgucgccaacggggugcuucaaacguuuaugcggauggcuuggggaggcagcuacauugcccuggacucugggcgcggaaagugggauugcaucaugacauccuaccaguaucucaucauucagaacaccacaugggaagaccauugucaguucagcagacccucuccuaucggcuaccuggggcuucugucccaacggacccgcgauauuuauaucagcagacggcuccugggaaccuuuacauggacgcuguccgacucugagggcaaugaaacccccggcggguacugccucacacgcuggaugcugauugaggcggagcuuaaauguuucggaaacaccgccguugcuaagugcaaugaaaaacacgaugaggaauuuugugacaugcugagacucuucgauuuuaacaagcaggccauccggcgccugaaagcugaggcccagaugagcauccagcuuauuaauaaggcggugaacgcccugaucaaugaccaacucauuaugaagaaccaccugagagauaucaugggcauuccuuauugcaauuacuccaaauauugguaccugaaccauacaagcaccgggcggacgucucucccccgcugcuggcuggucuccaauggaagcuaccuuaacgaaacacacuucucugacgacaucgagcagcaggcugauaauaugaucaccgagaugcugcaaaaggaauaucucgacagacagggcaaaaccccucuggggcugguggaucuuuucguguuuagcacauccuucuaccucauuucuaucuuucugcaucuggucaagauuccgacccaccggcauaucguuggaaaacccuguccuaagccccaccgccucaaccacaugggcauuugcagcuguggccuguauaaacagccuggggugcccgugagauggaagcgguga

SEQ ID NO: 1687 - RNA, 1473 nt, Artificial Sequence
  derived and/or modified protein sequence (opt5) from LASV(ONM-299;Clade III)__ANH09734__GPC
augggccagaucgugaccuucuuucaagaggucccccacguuauugaagagaucaugaacauugugcugaucacacucagccugcuugccauucugaaggggcucuacaauuucgcuacgugcggacugaucggccuuaucaccuuucuguuccucugugggagauccugcucuaugauuuauaaaggaagcuaccagcuggaaacacuggagcucaacauggaaacccugaauaugacaaugccucuuuccuguaccaagaacaauucucaucacuauauccgggugggcaacgagacagggcuggagcucacccugacgaauaccagcauuaucggacauaaauuuugcaaccuuuccgacgcccacaagaaaaaucuguacgaucauucucucaugagcauuaucuccacauuccaccugagcauuccgaacuuuaaucaguaugaagcgaugucuugugacuucaacggcggcaagaucuccauccaguacaaucugagccacaccuaugcuggggaugccgccaagcauugcggaacagucgcuaacggcgugcuccaaaccuuuaugcgcauggccuggggaggaucuuacauugcucuggacuccggcagagggaauugggauuguaucaugacgagcuaccaguaucuuauuauccagaacacaaccugggaggaccacugccaguucucucggcccuccccuauuggauaccugggccuccugagccaacgcacaagagauaucuauaucucccggcgccuucugggcaccuuuaccuggacacucucugacagcgaagggaaagagacgcccggaggcuacugucugaccagauggaugcugauugaggccgaacucaagugcuucgggaacacagcgguugccaaauguaaugagaagcaugaugaagaguuuugcgacaugcugcggcuuuucgauuucaacaaacaggcuauccagcgccugaagaccgaagcccagauguccauucaacucaucaauaaggcugugaacgcccugauuaaugaccagcuuaucaugaaaaaccaccugagagauaucauggggauuccuuauugcaauuacagcaaguauugguaccucaaccacacaucuaccggccggacgucccugcccaaauguuggcuggucagcaaugggucuuaccucaacgagacacauuuuagcgacgacaucgagcagcaagcggauaauaugauuaccgaaaugcugcagaaggaguauaucgaccgccagggaaaaaccccucuuggccugguggauguuuucguguuuuccacaucuuucuaccucauuagcaucuuucugcaccuggucaagauuccgacccauagacacaucgugggcaaauccugccccaagccucaucggcuuaaccacauggggaucuguagcugcggacucuauaagcagcccggcgugccuguccgcuggaaaagauga

SEQ ID NO: 1688 - RNA, 1473 nt, Artificial Sequence
  derived and/or modified protein sequence (opt5) from LASV(ONM-700;Clade III)__ANH09738__GPC
augggccagaucgugaccuucuuucaagaggucccccacguuauugaagagaucaugaacauugugcugaucacacucagccugcuugccauucugaaggggcucuacaauuucgcuacgugcggacugaucggccuuaucaccuuucuguuccucugugggagauccugcucuaugauuuauaaaggaagcuaccagcuggaaacacuggagcucaacauggaaacccugaauaugacaaugccucuuuccuguaccaagaacaauucucaucacuauauccgggugggcaacgagacagggcuggagcucacccugacgaauaccagcauuaucaaccauaaauuuugcaaucuuuccgacgcccacaagcgcaaccuguacgaucauucucucaugagcauuaucuccacauuccaccugagcauuccgaauuuuaaccaguaugaagcgaugucuugugacuucaauggaggcaaaaucuccauccaguacaaccugagccacaccuaugcuggcgaugccgccaagcauugcgggacagucgcuaauggagugcuccaaaccuuuaugagaauggccuggggcgggucuuacauugcucuggacuccggacggggcaacugggauuguaucaugacgagcuaccaguaucuuauuauccagaacacaaccugggaggaccacugccaguucucucgccccuccccuauuggguaccugggacuccugagccaaagaacacgggauaucuauaucucccgcagacuucugggcaccuuuaccuggacacucucugacagcgaaggcaaggagacgcccgggggauacugucugacccgguggaugcugauugaggccgaacucaaaugcuucggcaauacagcgguugccaaguguaacgagaaacaugaugaagaguuuugcgacaugcugcgccuuuucgauuucaauaagcaggcuauccagagacugaaaaccgaagcccagauguccauucaacucaucaacaaggcugugaaugcccugauuaacgaccagcuuaucaugaagaaucaucugcgggauaucauggggauuccuuauugcaacuacagcaaauauugguaccucaaucacacaucuaccggacgcacgucccugcccaaguguuggcuggucagcaacggcucuuaccucaaugagacacacuuuagcgacgacaucgagcagcaagcggauaacaugauuaccgaaaugcugcagaaagaguauaucgacagacaggggaagaccccucuuggacugguggauguuuucauguuuuccacaucuuucuaccucauuagcaucuuucugcaccuggugaaaauuccgacccaucggcacaucgucggcaaguccugccccaaaccucaucgccuuaaucacaugggcaucuguagcugcgggcucuauaagcagcccggagugccugugagauggaagcgguga

SEQ ID NO: 1689 - RNA, 1473 nt, Artificial Sequence
  derived and/or modified protein sequence (opt5) from LASV(Weller;Clade III)__AAT49010__GPC
augggccagaucgugaccuucuuucaagaggucccccacguuauugaagaggugaugaacaucgugcugauugcccucagcguccuggcuauccuuaaggggcuguacaauuucgccacaugcggacucauuggccuggugacguuucuucugcucuccgggagaucuuguagcaugaucuauaaaggaguuuacgaacugcagacccuggagcucaacauggaaacacugaauaugaccaugccucuuuccugcacaaagaacaccucucaucacuauauccgggugggcaaugacacagggcuggagcucacccugacgaacgagacccuucugcaucacaaauucuguaaucucagcgaugcgcauaagcgcaaccuguacgaccacgcucugauguccauuaucucuacauuucaccucagcauuccgaauuucaaccaguaugaagccauguccugcgauuuuaauggaggcaaaaucaccguccaguacaaccugagccauucuuaugccguggacgcugccaagcacuguggcacaguugcuaauggggugcuucaaaccuucaugagaauggccuggggaggcuccuacauugcgcuggauagccggcaugggaacugggacugcaucaugacgucuuaccaguaucucauuauccagaauacaaccugggaggaucacugucaguuuucccgccccagcccuaucggauaccugggccuucugucucaaagaacacgggacauuuauaucucccgcagacuccuggggaccuucaccuggacacugagcgauuccgaaggaaacgagacgcccggcggcuacugccucacccgguggaugcugauugaggccgaacuuaaguguuuugggaacacagcugucgccaaaugcaaugagaagcacgacgaagaguucugugauaugcugcgccucuuugacuucaacaaacaggcuaucagacggcugaagaccgaagcccagaugucuauucagcuuaucaauaaagcggugaacgcccugaucaaugaucaacucauuaugaagaaccaucugcgcgacaucaugggcauuccuuauugcaauuacagcaaguauugguaccugaaccacacauccaccggaaaaacgagccuccccagaugcuggcuggugucuaauggguccuaccuuaacgagacacauuucagcgacgauaucgagcagcaggcugacaauaugauuaccgaaaugcugcaaaaggaguaucucgaucggcagggaaaaaccccucugggccuggucgaccuuuuuguuuucucuaccagcuuuuaccucaucuccaucuuccugcaccugauuaagaucccgacacaucgccacauuguggggaaacccuguccuaagccccacagacucaaccauaugggaaucugcucuuguggccuguauaaacagccuggcgugcccguccgguggaagagauga

SEQ ID NO: 1690 - RNA, 1476 nt, Artificial Sequence
  derived and/or modified protein sequence (opt5) from LASV(BA366;Clade IV)__ADI39451__GPC
augggccagaucgugaccuucuuucaagaggucccccacguuauugaagaggugaugaacaucgugcugauugcccucagcguccuggcugugcuuaaggggcuguacaauguugccacaugcggacucaucggccugauugcguuccuucugcucugugggagauccugcacgaccacacuguauaaaggaguguacgaacugcaggcucucgagcugaacauggaaacccuuaauaugacaaugccucugucuuguaccaagaacaauagccaucacuauaucauggucggcaacgagacagggcucgagcugacccuuacgaauaccuccaucauuaaccauaaauuuugcaaucugucugacgcccacaagaaaaaccucuacgaucaugcccugaugagcaucauuuccacauuccaccugucuaucccgaauuuuaaccaguaugaagcuaugagcugugacuucaauggaggcaagauuuccgugcaguacaaccucagccacaccuaugccguugaugcugccaaucauugcggcacaguggcgaacgggguccugcaaaccuuuaugcggauggccuggggaggcucuuacaucgcucuugacuccgggcgcggaagcugggauuguauuaugacgucuuaccaguaucugaucauccagaacacaaccugggaggaccacugccaguucuccagacccagcccuauuggcuaccucgggcugcuuucucaacggacacgcgauaucuauauuuccagacggcugcucggaaccuuuaccuggacacugagcgacuccgaaggcaaggauacgcccggcggguacugucugacccgcuggaugcucaucgaggccgagcugaaaugcuucggaaauacagcuguggccaaguguaacgaaaaacaugacgaggaauuuugcgauaugcuuagacuguucgacuuuaauaagcaggcgauucagcggcucaaagccgaggcucagaugucuauccaacugaucaacaaggccgugaaugcucuuauuaacgaucagcugaucaugaagaaucaccuccgcgacauuaugggcaucccuuauugcaacuacagcaaauauugguaccugaaucacaccauuacagggagaaccucccugcccaaguguuggcucgucagcaacggaucuuaccugaaugaaacgcauuucuccgacgauaucgagcagcaagccgacaacaugaucacagagaugcuucagaaagaauauauugagcggcagggcaagaccccucuggggcucguugaucuguucguguuuagcaccucuuucuaccugaucagcauuuuucuucaccucaucaaaauuccgacacaucgccacaucgugaauaagcccugcccuaaaccccauagacugaaccacaugggagucuguuccugcggccuguauaagcagccuggcgugcccguucgguggaagcgcuga

SEQ ID NO: 1691 - RNA, 1476 nt, Artificial Sequence
  derived and/or modified protein sequence (opt5) from LASV(G1180-SLE-2010;Clade IV)__AIT17168__GPC
augggccagaucgugaccuucuuucaagaggucccccacguuauugaagaggugaugaacaucgugcugauugcccucagcauccuggcuguccuuaaggggcuguacaauuucgccacaugcggacucgugggccugcuuacguuucugcuccugugugggagauccugcaccgcgucucgguauaaaggaguuuacgaacugcagacacucgagcugaacauggaaacccuuaauaugacaaugccucugagcuguaccaagaacaauucccaucacuauauuauggugggcaacgagacagggcucgagcugacccuuacgaauaccucuaucaucaaccauaaauucugcaaucugagcgacgcucacaagaaaaaccucuacgaucaugcccugauguccauuaucucuacauuucaccugagcauuccgaauuucaaccaguaugaagccauguccugugacuuuaauggaggcaagaucagcguccaguacaaccucucucacuccuaugcuggcgaugccgcuaaucauugcgggaccguggccaacggaguucugcaaacauucaugcgcauggcguggggcgggagcuacauugcccuugacucuggacacggcuccugggauuguaucaugaccagcuaccaguaucugauuauccagaacacgacaugggaggaccauugccaguuuucuagacccuccccuaucggguaccucggacugcuuagccaacggacccgcgauauuuauaucuccagacggcugcucggcacauucaccuggacccugucugacagcgaaggcaaggauacacccgggggauacugucugacgcgcuggaugcucauugaggcugagcugaaaugcuuuggcaauaccgccguggcuaaguguaacgaaaaacacgacgaggaguucugcgauaugcuuagacuguuugacuucaauaagcaggccauccagcggcucaaagcggaagcccagauguccauucaacugaucaacaaggcugucaaugcccuuaucaacgaucagcugauuaugaagaaucaccuccgcgacaucauggggauuccuuauugcaacuacagcaaauauugguaccugaaucauacaaccacaggaaagaccucucugcccaaauguuggcucguguccaacggcagcuaccugaaugaaacgcacuucucugacgauaucgagcagcaagcugacaacaugauuacagagaugcuucagaaggaauauauggagagacaggggaaaaccccucugggacucguggaucuguuugucuucagcaccuccuuuuaccugaucucuaucuuccuucaucucguuaagauuccgacacaccggcauaucgugggcaaaagcugccccaagccucaccgccugaaucacaugggcauuuguuccugcgggcuguauaagcagcccggagugccugucaaauggaagagauga

SEQ ID NO: 1692 - RNA, 1476 nt, Artificial Sequence
  derived and/or modified protein sequence (opt5) from LASV(G1190-SLE-2010;Clade IV)__AIT17172__GPC
augggccagaucgugaccuucuuucaagaggucccccacguuauugaagaggugaugaacaucgugcugauugcccucagcauccuggcuguccuuaaggggcuguacaauuucgccacaugcggacucgugggccugguuacguuucuucugcucugugggagauccugcaccacaucucuguauaaaggaguguacgaacugcagacccucgagcugaacauggaaacacuuaauaugaccaugccucugagcuguacaaagaacaauucccaucacuauauuauggucggcaacgagaccgggcucgagcugacgcuuaccaauacaucuaucaucaaccauaaauucugcaaucugagcgacgcgcacaagaaaaaccucuacgaucaugcucugauguccauuaucucuaccuuucaccugagcauuccgaauuucaaccaguaugaagccauguccugugacuuuaauggaggcaagaucagcgugcaguacaaccucucucacuccuaugccggcgaugcugccaaucauugcgggacaguugcuaacggagugcugcaaaccuucaugcggauggccuggggcgggagcuacauugcgcuugacucuggacgcggcagaugggauuguaucaugacguccuaccaguaucugauuauccagaacacaaccugggaggaccacugccaguuuagccggcccucuccuaucggguaccucggacugcuuucccaacgcacaagagauauuuauaucagccggcgccugcucggcaccuucaccuggacacuguccgacucugaaggcaaggauacgcccgggggauacugucugaccagauggaugcucauugaggccgagcugaaaugcuuuggcaauacagcugucgccaaguguaacgaaaaacaugacgaggaguucugcgauaugcuucggcuguuugacuucaauaagcaggcuauccagcgccucaaagccgaagcgcagaugagcauucaacugaucaacaaggccgugaaugcucuuaucaacgaucagcugauuaugaagaaucaccucagagacaucauggggauuccuuauugcaacuacuccaaauauugguaccugaaucacaccacaaccggaaagacgagccugcccaaauguuggcucgugucuaacggcuccuaccugaaugaaacacauuucagcgacgauaucgagcagcaagccgacaacaugauuaccgagaugcuucagaaggaauauauggagcggcaggggaaaaccccucugggacucgucgaucuguuuguuuucucuaccagcuuuuaccugaucuccaucuuccuucaccucgugaagauuccgacacaucgccacaucgugggcaaacccugcccuagaccccaucggcugaaucacaugggcauuuguucuugcgggcuguauaagcagccuggaguccccgugaaguggaaacgcuga

SEQ ID NO: 1693 - RNA, 1476 nt, Artificial Sequence
  derived and/or modified protein sequence (opt5) from LASV(G1200-LIB-2010;Clade IV)__AIT17176__GPC
augggccagaucgugaccuucuuucaagaggucccccacguuauugaagaggugaugaacaucgugcugauugcccucagccugcuugcuguccugaaggggcucuacaauguggccacaugcggacugaucggccuuauuacguuccugcuccugugugggagauccugcaccacaaaccuguauaaaggaguuuacgaacuccaggcgcuggagcuuaauauggaaacccugaacaugacaaugccucucucuuguaccaagaauaacagccaucacuauaucauggugggcaaugagacagggcuggagcuuacccugacgaacaccuccaucauuaaucauaaauuuugcaaccucucugacgcucacaagaaaaaucuguacgaucaugcccugaugagcaucauuuccacauuccaccucucuaucccgaacuuuaaucaguaugaagccaugagcugugacuucaacggaggccggauuuccguccaguacaaucugagccacucuuaugcuggcgaugccgcuucccauugcgggaccaucgccaacggagugcuucaaacauuuaugcgcauggcguggggcgggagcuacauugcccuggacucuggacacggcgggugggauuguaucaugaccuccuaccaguaucucaucauucagaacacgacaugggaggaccauugccaguucagcagacccucuccuaucggauaccugggccuucugucccaacggacccgcgauauuuauaucagcagacggcuccugggcacauuuaccuggacccuguccgacucugaagggaaggauacacccggaggcuacugucucacgcgcuggaugcugauugaggcugagcuuaagugcuucgggaauaccgccguugcuaaauguaacgaaaagcacgacgaggaauuuugcgauaugcugagacucuucgacuuuaauaaacaggccauccagcggcugaaggcggaggcccagaugagcauccaacuuauuaacaaagcugugaaugcccugaucaacgaucagcucauuaugaagaaucaucugcgcgacaucaugggcauuccuuauugcaacuacuccaaguauugguaccugaaucacacagucaccggaaaaacaagccuccccaaguguuggcuggugucuaacggguccuaccuuaaugaaacccacuucagcgacgauaucgagcagcaagcugacaacaugaucacggagaugcugcagaaagaauauauggagagacagggaaagacaccucucggccugguggaucuguucgucuuuucuaccagcuucuaccuuauuuccaucuuucuccaucugguuaaaauuccgacccaccggcauguggugggcaagcccugcccuaaaccccaccgccugaaucacauggggaucuguucuugcggacucuauaagcagccuggcguccccgugagauggaagcgguga

SEQ ID NO: 1694 - RNA, 1476 nt, Artificial Sequence
  derived and/or modified protein sequence (opt5) from LASV(G1442-SLE-2011;Clade IV)__AIT17180__GPC
augggccagaucgugaccuucuuucaagaggucccccacguuauugaagaggugaugaacaucgugcugauugcccucagcauccuggcuguccuuaaggggcuguacaauguggccacaugcggacucauuggccugguuacguuccuucugcucugugggagauccugcaccacaacccuguauaaaggaguguacgaacugcagacacucgagcugaacauggaaacccuuaauaugacaaugccucugucuuguaccaagaacaauagccaucacuauauccgggucggcaacgagacggggcucgagcugacccuuacaaauaccuccaucauuaaccauaaauuuugcaaucugucugacgcgcacaagaaaaaccucuacgaucaugcucugaugagcaucauuuccacauuccaccugucuaucccgaauuuuaaccaguaugaagccaugagcugugacuucaauggaggcaagauuuccgugcaguacaaccucagccacucuuaugccggcgaugcugccaaucauugcgggaccguugcuaacggagugcugcaaacguuuaugcgcauggccuggggcggguccuacaucgcgcuugacagcggaagaggcaacugggauuguauuaugacaucuuaccaguaucugaucauccagaauaccacaugggacgaucacugccaguucucccggcccagcccuauuggguaccucggacugcuuucucaacgcaccagagacgucuauaucucccggcgccugcucggcaccuuuacauggacgcugagcgauuccgagggcaaggacacccccgggggauacugucugacaagauggaugcucauugaagccgagcugaaaugcuucggcaacaccgcuguggccaaguguaaugagaaacaugaugaagaguuuugcgacaugcuucggcuguucgauuuuaacaagcaggcuauccagcgccucaaagccgaagcgcagaugucuauucaacugaucaauaaggccgugaacgcucuuaucaaugaccagcugauuaugaagaaccaccucagagacaucauggggauuccuuauugcaauuacagcaaauauugguaccugaacaauacagccaccggaaagacgucccugcccaaauguuggcucaucagcaacggcucuuaccugaaugagacacacuucuccgaugacauugaacaggaggcugauaacaugaucaccgagaugcuucaaaaggaauauauggagcggcaggggaaaaccccucugggacucgucgaccuguucguuuuuagcacaucuuucuaccugaucagcauuuuucuucaucucgugaagaucccgacccaccgccauauugugggcaaauccugccccaagccucacagacugaaucauaugggcaucuguucuugcgggcuguauaagcagcccggagucccugugcgguggaaacgcuga

SEQ ID NO: 1695 - RNA, 1476 nt, Artificial Sequence
  derived and/or modified protein sequence (opt5) from LASV(G1529-SLE-2011;Clade IV)__AIT17184__GPC
augggccagaucgugaccuucuuucaagaggucccccacguuauugaagaggugaugaacaucgugcugauugcccucagcauccuggcuguccuuaaggggcuguacaauguggccacaugcggacucauuggccugguuacguuccuucugcucugugggagauccugcaccacaacccuguauaaaggaguguacgaacugcaggcgcucgagcugaacauggaaacacuuaauaugaccaugccucugucuuguacaaagaacaauagccaucacuauauccgggucggcaacgagaccgggcucgagcugacgcuuaccaauacauccaucauugaccauaaauuuugcaaccugucugaugcucacaagaaaaaucucuacgaccaugcccugaugagcaucauuuccaccuuccaccugucuaucccgaacuuuaaucaguaugaagccaugagcugugauuucaacggaggcaagauuuccgugcaguacaaucucagccacucuuaugcuggcgacgccgcuaaccauugcgggacaguugccaauggagugcugcaaaccuuuaugcgcauggcguggggcggguccuacaucgcccuugauagcggaagaaacggcugggacuguauuaugacgucuuaccaguaucugaucauccagaacacaaccugggaugaccacugccaguucucccggcccagcccuauuggguaccucggacugcuuucucaacgcacaagagauaucuauauuucccggcgccugcucggcaccuuuaccuggacacugagcgacuccgagggcaaggauacgcccgggggauacugucugaccagauggaugcucaucgaagcugagcugaaaugcuucggcaauacagccgucgcuaaguguaacgagaaacaugacgaagaguuuugcgauaugcuucggcuguucgacuuuaauaagcaggccauucgcagacucaaagcggaagcccagaugucuauccagcugaucaacaaggcugugaaugcccuuauuaacgaccaacugaucaugaagaaucaccuccgggauauuauggggaucccuuauugcaacuacagcaaauauugguaccugaauaacaccgcuacaggaaagaccucccugccccgcuguuggcucgugagcaauggcucuuaccugaacgagacgcacuucuccgacgauauugaacagcaggccgacaauaugaucacagagaugcuucaaagagaguauauggaacggcaggggaaaaccccucugggacucgucgaucuguucguuuuuagcaccucuuucuaccugaucagcauuuuucuucaucucgugaagaucccgacacaccgccauauugugggcaaacccugcccuaagccccacagacugaaccauaugggcaucuguuccugcgggcuguauaaacagccuggaguccccgugaaguggaagcgguga

SEQ ID NO: 1696 - RNA, 1476 nt, Artificial Sequence
  derived and/or modified protein sequence (opt5) from LASV(G1618-SLE-2011;Clade IV)__AIT17188__GPC
augggccagaucgugaccuucuuucaagaggucccccacguuauugaagaggugaugaacaucgugcugauugcccucagcauccuggcuguccuuaaggggcuguacaauuucgccacaugcggauuugugggccucguuuccuuccugcuucugugugggagaucuugcacgaccagccucuauaaaggaguguacgaacugcagacacuggagcucaacauggaaacccugaauaugacaaugccucuuuccuguaccaagaacaauucucaucacuauauuauggucggcaacgagacagggcuggagcucacccugacgaauaccagcaucaucaaccauaaauuuugcaaucuuuccgacgcgcacaagaaaaaccuguacgaucaugcucucaugucuauuaucagcacauuccaccuguccauuccgaauuuuaaccaguaugaagccaugagcugugacuucaauggaggcaagaucucugugcaguacaaccugucccacagcuaugccguugaugcugccaaucauugcggcaccguggcuaacgggguccuccaaacauuuaugcggauggccuggggaggcucuuacauugcgcuggacuccgggcacggaagcugggauuguaucaugaccucuuaccaguaucuuauuauccagaacacgacaugggaggaccauugccaguucucccgccccagcccuaucggcuaccuggggcuccugucccaaagaacccgggauauuuauaucucucgcagacuucugggaacauuuaccuggacccucagcgacuccgaaggcaaggauacacccggcggguacugucugacgcgguggaugcugauugaggccgagcucaaaugcuucggaaauaccgcuguggccaaguguaacgaaaaacacgacgaggaauuuugcgauaugcugcgccuuuucgacuucaauaagcaggcuauccagagacugcgggccgaggcgcagaugagcauucaacucaucaacaaagccgugaaugcucugaucaacgaucagcuuauuaugaagaaucaucugcgcgacaucaugggcauuccuuauugcaacuacucuaaguauugguaccucaaucacacaaccacagggagaaccucccugcccaaauguuggcuggucagcaacggaucuuaccucaaugaaacgcacuuuagcgacgauaucgagcagcaagccgacaacaugauuacagagaugcugcagaaggaauauauggagcggcagggcaaaaccccucuugggcugguugaucucuucguguuuuccaccucuuucuaccugaucagcaucuuucugcaucuugugaagauuccgacacaccgccauaucgucggaaaauccugccccaagccucacagacucaaucacaugggcauuuguagcugcggccuguaugggcagcccggagugccuguuaaauggaagcgguga

SEQ ID NO: 1697 - RNA, 1476 nt, Artificial Sequence
  derived and/or modified protein sequence (opt5) from LASV(G1646-SLE-2011;Clade IV)__AIT17192__GPC
augggccagaucgugaccuucuuucaagaggucccccacguuauugaagaggugaugaacaucgugcugauugcccucagcauccuggcuguccuuaaggggcuguacaauuucgccacaugcggauuuauuggccucguguccuuccugcuucugugugggagaucuugcacgaccagccucuauaaaggaguuuacgaacugcagacacuggagcucaacauggaaacccugaauaugacaaugccucuuuccuguaccaagaacaauucucaucacuauaucauggugggcaacgagacagggcuggagcucacccugacgaauaccagcaucauuaaccauaaauuuugcaaucuuuccgacgcgcacaagaaaaaccuguacgaucaugcucucaugucuaucauuagcacauuccaccuguccaucccgaauuuuaaccaguucgaagccaugagcugugacuuuaauggaggcaagauuucuguccaguauaaccugucccacagcuacgccguggaugcugccaaucauugcggcaccguugcuaacggggugcuccaaacauucaugcggauggccuggggaggcucuuauaucgcgcuggacuccgggcacggaagcugggauuguauuaugaccucuuaccaguaccuuaucauccagaacacgacaugggaggaccauugccaguuuucccgccccagcccuauuggcuaucuggggcuccugucccaaagaacccgggauaucuacauuucucgcagacuucugggaacauucaccuggacccucagcgacuccgaaggcaaggauacacccggcggguauugucugacgcgguggaugcugaucgaggccgagcucaaaugcuuuggaaauaccgcugucgccaaguguaacgaaaaacacgacgaggaguucugcgauaugcugcgccuuuucgacuuuaauaagcaggcuauucagagacugaaagccgaagcgcagaugagcauccaacucaucaacaaggccgugaaugcucugauuaacgaucagcuuaucaugaagaaucaucugcgggacauuaugggcaucccuuacugcaacuauucuaaauacugguaucucaaucacacaaccacagggcgcaccucccugcccaaguguuggcuggugagcaacggaucuuaccucaaugaaacgcacuucagcgacgauauugagcagcaagccgacaacaugaucacagagaugcugcagaaagaauacauggagagacagggcaagaccccucuugggcuggucgaucucuuuguuuucuccaccucuuuuuaucugaucagcauuuuccugcaucuugugaaaaucccgacacaccggcauauugugggaaaguccugccccaaaccucaccgccucaaucacaugggcaucuguagcugcggccuguacgggcagcccggagucccugugaaguggaagagauga

SEQ ID NO: 1698 - RNA, 1476 nt, Artificial Sequence
  derived and/or modified protein sequence (opt5) from LASV(G1647-SLE-2011;Clade IV)__AIT17196__GPC
augggccagaucgugaccuucuuucaagaggucccccacguuauugaagaggugaugaacaucgugcugauugcccucagcauccuggcuguccuuaaggggcuguacaaucucgccacaugcggacuggugggccuuguuacguuccugcuccugugugggagauccugcaccacaucucuguauaaaggaguguacgaacuccagacccuggagcuuaacauggaaacacugaauaugaccaugccucucagcuguacaaagaacaauucccaucacuauauuauggucggcaacgagaccgggcuggagcuuacgcugaccaauacaucuaucaucaaccauaaauuuugcaaucucagcgacgcgcacaagaaaaaccuguacgaucaugcucugauguccauuaucucuaccuuccaccucagcauuccgaauuuuaaccaguaugaagccauguccugugacuucaauggaggcaagaucagcgugcaguacaaccugucucacuccuaugccggcgaugcugccaaucauugcgggacaguugcuaacggagugcuucaaaccuuuaugcggauggccuggggcgggagcuacauugcgcuggacucuggacgcggcagaugggauuguaucaugacguccuaccaguaucucauuauccagaacacaaccugggaggaccacugccaguucagccggcccucuccuaucggguaccugggacuucugucccaacgcacaagagauauuuauaucagccggcgccuccugggcaccuuuaccuggacacuguccgacucugaaggcaaggauacgcccgggggauacugucucaccagauggaugcugauugaggccgagcuuaaaugcuucggcaauacagcugucgccaaguguaacgaaaaacaugacgaggaauuuugcgauaugcugcgccucuucgacuuuaauaagcaggcuauccagcggcugaaagccgaggcgcagaugaacauucaacuuaucaauaaggccgugaacgcucugaucaaugaucagcucauuaugaagaaccaccugagagacaucauggggauuccuuauugcaauuacagcaaauauugguaccugaaccacaccacaaccggaaagacgucccucccccgguguuggcuggugagcaauggcucuuaccuuaacgaaacacauuucuccgacgauaucgagcagcaagccgacaauaugauuaccgagaugcugcagaaagaauauauggagcgccaggggaagaccccucucggacuggucgaucuguucguuuuuagcacaucuuucuaccuuaucagcaucuuucuccaccuggugaaaauuccgacccauagacacaucgugggcaagcccugcccuaaaccccaucggcugaaccacaugggcauuuguuccugcggguucuauaagcagccuggaguccccgugaaguggaaacgcuga

SEQ ID NO: 1699 - RNA, 1476 nt, Artificial Sequence
  derived and/or modified protein sequence (opt5) from LASV(G1774-SLE-2011;Clade IV)__AIT17204__GPC
augggccagaucgugaccuucuuucaagaggucccccacguuauugaagaggugaugaacaucgugcugauugcccucagcauccuggcuguccuuaaggggcuguacaaucucgccacaugcggacuggugggccuuguuacguuccugcuccugugugggagauccugcaccucuagccuguauaaaggaguguacgaacuccagacacuggagcuuaacauggaaacccugaauaugacaaugccucucuccuguaccaagaacucuagccaucacuauauucgggucggcaaugagacagggcuggagcuuacccugacgaacaccuccaucaucaaucauaaauuuugcaaccucucugacgcgcacaagaaaaaucuguacgaucaugcucugaugagcauuaucuccacauuccaccucagcauuccgaacuuuaaucaguaugaagccaugucuugugacuucaacggaggcaagaucuccgugcaguacaaucugagccacucuuaugccggcgaugcugccaaccauugcgggaccguugcuaauggagugcuucaaacauuuaugcgcauggccuggggcggguccuacauugcgcuggacagcggacacgauagaugggacuguaucaugaccucuuaccaguaucucauuauccagaacacgacaugggaggaucauugccaguucucccggcccagcccuaucggcuaccuggggcuucugucccaacgcaccagagacauuuauaucucucggcgccuccugggaacauuuaccuggacccugagcgauuccgaaggcaaggacacacccggcggguacugucucacgagauggaugcugauugaggccgagcuuaaaugcuucggaaacaccgcugucgccaaguguaaugaaaaacacgaugaggaauuuugcgacaugcugcggcucuuugauuuuaacaagcaggcuauccagcgccugaaagccgaggcgcagaugagcauucaacuuaucaauaaggccgugaacgcucugaucaaugaccagcucauuaugaagaaccaccugagagacaucaugggcauuccuuauugcaauuacucuaaauauugguaccugaaccauacaaucaccgggaagacaucccuccccaaauguuggcuggugagcaauggaucuuaccuuaacaagacccacuucagcgaugacauugaacagcaagccgauaauaugaucacggagaugcugcagaaagaguauauggaacggcagggcaagacaccucucgggcuggucgaccuguucguuuucuccaccucuuucuaccuuaucagcauuuuucuccaucugaucaaaauuccgacccaccgccauaucgugggaaagcccugcccuaagccccacagacugaaccacaugggcauuuguuccugcggccucuauaaacagccuggggugcccgucaaguggaaacgguga

SEQ ID NO: 1700 - RNA, 1476 nt, Artificial Sequence
  derived and/or modified protein sequence (opt5) from LASV(G1792-SLE-2011;Clade IV)__AIT17208__GPC
augggccagaucgugaccuucuuucaagaggucccccacguuauugaagaggugaugaacaucgugcugauugcccucagcauccuggcuguccuuaaggggcuguacaauuucgccacaugcggacucauuggccuggugacguuucuucugcucugugggagauccugcaccacaucucuguauaaaggaguuuacgaacugcagacccucgagcugaacauggaaacacuuaauaugaccaugccucugagcuguacaaagaacaauucccaucacuauaucauggugggcaacgagaccgggcucgagcugacgcuuaccaauacaucuaucauuaaccauaaauucugcaaucugagcgacgcgcacaagaaaaaccucuacgaucaugcucugauguccaucauuucuaccuuucaccugagcaucccgaauuucaaccaguaugaagccauguccugugacuuuaauggaggcaagauuagcguccaguacaaccucucucacuccuaugccggcgaugcugccaaucauugcgggacaguggcuaacggaguucugcaaaccuucaugcggauggccuggggcgggagcuacaucgcgcuugacucuggacgcggccagugggauuguauuaugacguccuaccaguaucugaucauccagaacacaaccugggaggaccacugccaauuuagcagacccucuccuauuggguaccucggacugcuuucccagcggacacgcgauaucuauauuagcagacggcugcucggcaccuucaccuggacacuguccgacucugaaggcaaggauacgcccgggggauacugucugacccgcuggaugcucaucgaggccgagcugaaaugcuuuggcaauacagcuguggccaaguguaacgaaaaacaugacgaggaguucugcgauaugcuuagacuguuugacuucaauaagcaggcuauucagcggcucaaagccgaagcgcaaaugagcauccagcugaucaacaaggccgucaaugcucuuauuaacgaucagcugaucaugaagaaucaccuccgcgacauuauggggaucccuuauugcaacuacuccaaauauugguaccugaaucacaccacaaccggaaagacgagccugcccaaauguuggcucgugucuaacggcuccuaccugaaugaaacacauuucagcgacgauauugagcaacaggccgacaacaugaucaccgagaugcuucagaaggaauauauggagagacaggggaaaaccccucugggacucguggaucuguuugucuucucuaccagcuuuuaccugaucuccauuuuccuucaccucguuaagaucccgacacaucggcacauugugggcaaaucuugccccaagccucaucgccugaaucacaugggcaucuguagcugcgggcuguauaagcaacccggagugccugucaaauggaagagauga

SEQ ID NO: 1701 - RNA, 1476 nt, Artificial Sequence
  derived and/or modified protein sequence (opt5) from LASV(G1897-SLE-2011;Clade IV)__AIT17210__GPC
augggccagaucgugaccuucuuucaagaggucccccacguuauugaagaggugaugaacaucgugcugauugcccucagcauccuggcuguccuuaaggggcuguacaaucucgccacaugcggacuggugggccuuguuacguuccugcuccugugugggagauccugcaccacaucucuguauaaaggaguguacgaacuccagacccuggagcuuaacauggaaacacugaauaugaccaugccucucagcuguacaaagaacaauucccaucacuauauuauggucggcaacgagaccgggcuggagcuuacgcugaccaauacaucuaucaucaaccauaaauuuugcaaucucagcgacgcgcacaagaaaaaccuguacgaucaugcucugauguccauuaucucuaccuuccaccucagcauuccgaauuuuaaccaguaugaagccauguccugugacuucaauggaggcaagaucagcgugcaguacaaccugucucacuccuaugccggcgaugcugccaaucauugcgggacaguugcuaacggagugcuucaaaccuuuaugcggauggccuggggcgggagcuacauugcgcuggacucuggacgcgauagaugggacuguaucaugacguccuaccaguaucucauuauccagaacacaaccugggaggaucacugccaguucagccggcccucuccuaucggcuaccuggggcuucugucccaacgcacaagagacauuuauaucagccggcgccuccugggaaccuuuaccuggacacuguccgauucugaaggcaaggacacgcccggcggguacugucucaccagauggaugcugauugaggccgagcuuaaaugcuucggaaauacagcugucgccaaguguaacgaaaaacaugaugaggaauuuugcgacaugcugcgccucuucgauuuuaauaagcaggcuauccagcggcugaaagccgaggcgcagaugagcauucaacuuaucaacaaggccgugaaugcucugaucaacgaccagcucauuaugaagaaucaccugagagacaucaugggcauuccuuauugcaacuacuccaaauauugguaccugaaucacaccacaaccgggaagacgagccuccccaaauguuggcuggugucuaacggauccuaccuuaaugaaacacauuucagcgaugacaucgagcagcaagccgauaacaugauuaccgagaugcugcagaaggaauauauggagcggcagggcaaaaccccucucgggcuggucgaccuguucguuuuuagcacaucuuucuaccuuaucuccaucuuucuccgccuggugaagauuccgacccacagacauaucgugggaaaacccugcccuaagccccaccggcugaaucauaugggcauuuguucuugcggccucuauaagcagccugggguccccgugaaauggaagcgcuga

SEQ ID NO: 1702 - RNA, 1476 nt, Artificial Sequence
  derived and/or modified protein sequence (opt5) from LASV(G1932-SLE-2011;Clade IV)__AIT17212__GPC
augggccagaucgugaccuucuuucaagaggucccccacguuauugaagaggugaugaacaucgugcugauugcccucagcauccuggcuguccuuaaggggcuguacaaucucgccacaugcggacuggugggccuuguuacguuccugcuccugugugggagauccugcaccacaucucuguauaaaggaguguacgaacuccagacccuggagcuuaacauggaaacacugaauaugaccaugccucucagcuguacaaagaacaauucccaucacuauauuauggucggcaacgagaccgggcuggagcuuacgcugaccaauacaucuaucaucaaccauaaauuuugcaaucucagcgacgcgcaccggaagaaccuguacgaucaugcucugauguccauuaucucuaccuuccaccucagcauuccgaauuuuaaccaguaugaagccauguccugugacuucaauggaggcaaaaucagcgugcaguacaaccugucucacuccuaugccggcgaugcugccaaucauugcgggacaguugcuaacggagugcuucaaaccuuuaugcgcauggccuggggcgggagcuacauugcgcuggacucuggaagaggcaagugggauuguaucaugacguccuaccaguaucucauuauccagaacacaaccugggaggaccacugccaguucagccggcccucuccuaucggguaccugggacuucugucccaacgcacaagagauauuuauaucagccggcgccuccugggcaccuuuaccuggacacuguccgacucugaaggcaaggauacgcccgggggauacugucucaccagauggaugcugauugaggccgagcuuaaaugcuucggcaauacagcugucgccaaguguaacgaaaaacaugacgaggaauuuugcgauaugcugcgccucuucgacuuuaauaagcaggcuauccagcggcugaaagccgaggcgcagaugagcauucaacuuaucaacaaggccgugaaugcucugaucaacgaucagcucauuaugaagaaucaccugagagacaucauggggauuccuuauugcaacuacuccaaauauugguaccugaaucacaccacaaccggaaagacgagccucccccgguguuggcuggugucuaacggcuccuaccuuaaugaaacacauuucagcgacgauaucgagcagcaagccgacaacaugauuaccgagaugcugcagaaagaauauauggagcgccaggggaagaccccucucggacuggucgaucuguucguuuuuagcacaucuuucuaccuuaucuccaucuuucuccaccuggugaaaauuccgacccauagacacaucgugggcaagcccugcccuaaaccccaucggcugaaucacaugggcauuuguucuugcgggcucuauaagcagccuggaguccccgugaaguggaaacgcuga

SEQ ID NO: 1703 - RNA, 1476 nt, Artificial Sequence
  derived and/or modified protein sequence (opt5) from LASV(G1959-SLE-2011;Clade IV)__AIT17216__GPC
augggccagaucgugaccuucuuucaagaggucccccacguuauugaagaggugaugaacaucgugcugauugcccucagcauccuggcuguccuuaaggggcuguacaauuucgccacaugcggacucgugggccugguuacguuucuucugcucugugggagauccugcaccacaucucuguauaaaggaguguacgaacugcagacccucgagcugaacauggaaacacuuaauaugaccaugccucugagcuguacaaagaacaauucccaucacuauauuauggucggcaacgagaccgggcucgagcugacgcuuaccaauacaucuaucaucaaccauaaauucugcaaucugagcgacgcgcacaagaaaaaccucuacgaucaugcucugauguccauuaucucuaccuuucaccugagcauuccgaauuucaaccaguaugaagccauguccugugacuuuaauggaggcaagaucagcgugcaguacaaccucucucacuccuaugccggcgaugcugccaaucauugcgggacaguugcuaacggagugcugcaaaccuucaugcggauggccuggggcgggagcuacauugcgcuugacucuggacacggccgcugggauuguaucaugacguccuaccaguaucugauuauccagaacacaaccugggaggaccauugccaguuuagcagacccucuccuaucggguaccucggacugcuuucccaacggacacgcgauauuuauaucagcagacggcugcucggcaccuucaccuggacacuguccgacucugaaggcaaggauacgcccgggggauacugucugacccgcuggaugcucauugaggccgagcugaaaugcuuuggcaauacagcugucgccaaguguaacgaaaaacacgacgaggaguucugcgauaugcuuagacuguuugacuucaauaagcaggcuauccagcggcucaaagccgaagcgcagaugagcauucaacugaucaacaaggccgugaaugcucuuaucaacgaucagcugauuaugaagaaucaccuccgcgacaucauggggauuccuuauugcaacuacuccaaauauugguaccugaaucauaccacaaccggaaagacgagccugcccaaauguuggcucgugucuaacggcuccuaccugaaugaaacacacuucagcgacgauaucgagcagcaagccgacaacaugauuaccgagaugcuucagaaggaauauauggagagacaggggaaaaccccucugggacucgucgaucuguuuguuuucucuaccagcuuuuaccugaucuccaucuuccuucaucucgugaagauuccgacacaccggcauaucgugggcaaacccugcccuaagccccaccgccugaauuauaugggcauuuguucuugcgggcuguacaagcagccuggaguccccgugagauggaaacgguga

SEQ ID NO: 1704 - RNA, 1476 nt, Artificial Sequence
  derived and/or modified protein sequence (opt5) from LASV(G2141-SLE-2011;Clade IV)__AIT17224__GPC
augggccagaucgugaccuucuuucaagaggucccccacguuauugaagaggugaugaacaucgugcugauugcccucagcauccuggcuguccuuaaggggcuguacaauguggccacaugcggacucauuggccugguuacguuccuucugcucugugggagauccugcaccacaacccuguauaaaggaguguacgaacugcaggcgcucgagcugaacauggaaacacuuaauaugaccaugccucugucuuguacaaagaacaauagccaucacuauauccgggucggcaacgacaccgggcucgagcugacgcuuaccaauacauccaucauucagcauaaauuuugcaaccugucugaugcucacaagaaaaaucucuacgaccauacccugaugagcaucauuuccacauuccaccugucuaucccgaacuuuaaucaguaugaggccaugagcugugauuucaacggaggcaagauuuccgugcaauacaaucucagccacucuuaugccggcgacgcugccucccauugcgggaccguugcuaacggagugcugcagacguuuaugcgcauggccuggggcgggagcuacaucgcgcuugauucuggaagaggcaauugggacuguauuaugacauccuaccaguaucugaucauccagaacaccacaugggaagaucacugccaauucagccggcccucuccuauuggguaccucggacugcuuucccagcgcaccagagacaucuauauuagccggcgccugcucggcaccuuuacauggacgcuguccgauucugagggcagagacacccccgggggauacugucugacacgguggaugcucaucgaagccgagcugaagugcuucggcaacaccgcugucgccaaauguaaugagaagcaugaugaagaguuuugcgacaugcuucgccuguucgauuuuaacaaacaggcuauucagagacucaagacagaagcccaaaugagcauccagcugaucaauaaagcggugaacgcccuuauuaaugaccagcugaucaugaagaaccaccuccgggacauuauggggaucccuuauugcaauuacuccaaguauugguaccugaacaauaccauuacgggaaaaagcucucugcccaaguguuggcucguguccaacggcagcuaccugaaugagacacacuucucugaugacaucgaacaagaggcugauaacaugaucaccgagaugcuucagaaagaauauauggagcgccaggggaagaccccucugggacucgucgaccuguucguuuuuagcacauccuucuaccugauuucuaucuuucuucaucucgugaaaauuccgacccacagacauaucgugggcaagcccugcccuaaaccccaccggcugaaucauaugggcgucuguagcugcgggcuguauaagcagccuggagugcccguucgcuggaagagauga

SEQ ID NO: 1705 - RNA, 1476 nt, Artificial Sequence
  derived and/or modified protein sequence (opt5) from LASV(G2147-SLE-2011;Clade IV)__AIT17228__GPC
augggccagaucgugaccuucuuucaagaggucccccacguuauugaagaggugaugaacaucgugcugauugcccucagcauccuggcuguccuuaaggggcuguacaauuucgccacaugcggacucgugggccugcuuacguuucugcuccugugugggagauccugcaccacaucucuguauaaaggaguuuacgaacuccagacccuggagcuuaacauggaaacacugaauaugaccaugccucucagcuguacaaagaacaauucccaucacuauauuauggugggcaacgagaccgggcuggagcuuacgcugaccaauacaucuaucaucgaccauaaauucugcaaccucagcgaugcgcacaagaaaaaucuguacgaccaugcucugauguccauuaucucuaccuuucaccucagcauuccgaacuucaaucaguaugaagccauguccugugauuuuaacggaggcaagaucagcguccaguacaaucugucucacuccuaugccggcgacgcugccaaccauugcgggacaguggcuaauggaguucuucaaaccuucaugcggauggccuggggcgggagcuacauugcgcuggauucuggacgcggcgggugggacuguaucaugacguccuaccaguaucucauuauccagaacacaaccugggaggaucacugccaguuuagcagacccucuccuaucggauaccugggccuucugucccaacggacacgcgacauuuauaucagcagacggcuccugggcaccuucaccuggacacuguccgauucugaagggaaggacacgcccggaggcuacugucucacccgcuggaugcugauugaggccgagcuuaaaugcuuugggaacacagcuguggccaaguguaaugaaaaacaugaugaggaguucugcgacaugcugagacucuuugauuucaacaagcaggcuauccagcggcugaaagccgaagcgcagaugagcauucaacuuaucaauaaggccgucaacgcucugaucaaugaccagcucauuaugaagaaccaucugcgcgacaucaugggcauuccuuauugcaauuacuccaaauauugguaccugaaccacaccacaaccggaaagacgagccuccccaaauguuggcuggugucuaauggguccuaccuuaacgaaacacacuucagcgaugacaucgagcagcaagccgauaauaugauuaccgagaugcugcagaaggaauauauggagagacagggaaaaaccccucucggccugguggaccuguuugucuucucuaccagcuuuuaccuuaucuccaucuuccuccaccugguuaagauuccgacacaucggcacaucgugggcaaaucuugccccaagccucaucgccugaaccacauggggauuuguagcugcggacucuauaagcagcccggcgugccugucaaauggaagagauga

SEQ ID NO: 1706 - RNA, 1476 nt, Artificial Sequence
  derived and/or modified protein sequence (opt5) from LASV(G2165-SLE-2011;Clade IV)__AIT17232__GPC
augggccagaucgugaccuucuuucaagaggucccccacguuauugaagaggugaugaacaucgugcugauugcccucagcauccuggcuguccuuaaggggcuguacaauuucgccacaugcggacucgugggccugguuacguuucuucugcucugugggagauccugcaccacaucucuguauaaaggaguguacgaacugcagacccucgagcugaacauggaaacacuuaauaugaccaugccucugagcuguacaaagaacaauucccaucacuauauucgggucggcaacgagaccgggcucgagcugacgcuuaccaauacaucuaucaucaaccauaaauucugcaaucugagcgacgcgcacaagaaaaaccucuacgaucaugcucugauguccauuaucucuaccuuucaccugagcauuccgaauuucaaccaguaugaagccauguccugugacuuuaaugagggaaagaucagcgugcaguacaaccucucucacuccuaugccggcgaugcugccaaucauugcggcacaguugcuaacggggugcugcaaaccuucaugcgcauggccuggggaggcagcuacauugcgcuugacucugggagaggaaagugggauuguaucaugacguccuaccaguaucugauuauccagaacacaaccugggaagaccacugccaguuuagccggcccucuccuaucggcuaccucgggcugcuuucccaacgcacaagagauauuuauaucagccggcgccugcucggaaccuucaccuggacacuguccgacucugagggcaaagauacgcccggcggguacugucugaccagauggaugcucauugaggccgaacugaagugcuuuggaaauacagcugucgccaaauguaacgagaagcaugacgaagaguucugcgauaugcuucggcuguuugacuucaauaaacaggcuaucgaacgccucaaggccgaggcgcagaugagcauucagcugaucaacaaggccgugaaugcucuuaucaacgaucaacugauuaugaaaaaucaccucagagacaucaugggcauuccuuauugcaacuacuccaaguauugguaccugaaucacaccacaaccgggaaaacgagccugcccaaguguuggcucgugucuaacggauccuaccugaaugagacacauuucagcgacgauaucgaacagcaggccgacaacaugauuaccgagaugcuucaaaaagaauauauggagcggcagggcaagaccccucuggggcucgucgaucuguuuguuuucucuaccagcuuuuaccugaucuccaucuuccuucaccucgugaaaauuccgacacaucgccacaucgugggaaagucuugccccaagccucauagacugaaucacaugggcauuuguagcugcggccuguauaaacagcccggggucccugugaaguggaaacgguga

SEQ ID NO: 1707 - RNA, 1476 nt, Artificial Sequence
  derived and/or modified protein sequence (opt5) from LASV(G2184-SLE-2011;Clade IV)__AIT17236__GPC
augggccagaucgugaccuucuuucaagaggucccccacguuauugaagaggugaugaacaucgugcugauugcccucagcauccuggcuguccuuaaggggcuguacaauuucgccacaugcggacucgugggccugguuacguuucuucugcucugugggagauccugcaccacaucucuguauaaaggaguguacgaacugcagacccucgagcugaacauggaaacacuuaauaugaccaugccucugagcuguacaaagaacaauucccaucacuauauuauggucggcaacgagaccgggcucgagcugacgcuuaccaauacaucuaucaucaaccauaaauucugcaaucugagcgacgcgcacaagaaaaaccucuacgaucaugcucugauguccauuaucucuaccuuucaccugagcauuccgaauuucaaccaguaugaagccauguccugugacuuuaauggaggccggaucagcgugcaguacaaccucucucacuccuaugccggcgaggcugccaaucauugcgggacaguugcuaacggagugcugcaaaccuucaugcgcauggccuggggcgggagcuacauugcgcuugauucuggaagaggcaagugggacuguaucaugacguccuaccaguaucugauuauccagaacacaaccugggaagaucacugccaguuuagccggcccucuccuaucggguaccucggacugcuuucccaacgcacaagagacauuuauaucagccggcgccugcucggcaccuucaccuggacacuguccgauucugagggcaaggacacgcccgggggauacugucugaccagauggaugcucauugaggccgaacugaaaugcuuuggcaauacagcugucgccaaguguaacgagaaacaugaugaagaguucugcgacaugcuucggcuguuugauuucaauaagcaggcuauccagcgccucaaagccgaagcgcagaugagcauucaacugaucaacaaggccgugaaugcucuuaucaacgaccagcugauuaugaagaaucaccucagagauaucauggggauuccuuauugcaacuacucccgguauugguaccugaaucacaccacaaccggaaaaacgagccugcccaaguguuggcucgugucuaacggcuccuaccugaaugagacacauuucagcgacgacaucgagcagcaagccgauaacaugauuaccgaaaugcuucagaaagaguauauggaacgccaggggaagaccccucugggacucgucgaccuguuuguuuucucuaccagcuuuuaccugaucuccaucuuccuucaccucgugaaaauuccgacacauagacacaucgugggcaagucuugccccaaaccucaucggcugaaucacaugggcauuuguagcugcgggcuguauaagcagcccggagucccugugaaguggaaacgcuga

SEQ ID NO: 1708 - RNA, 1476 nt, Artificial Sequence
  derived and/or modified protein sequence (opt5) from LASV(G2197-SLE-2011;Clade IV)__AIT17240__GPC
augggccagaucgugaccuucuuucaagaggucccccacguuauugaagaggugaugaacaucgugcugauugcccucagcauccuggcuguccuuaaggggcuguacaaucucgccacaugcggacuggugggccuuguuacguuccugcuccugugugggagauccugcaccacaucucuguauaaaggauuuuacgaacuccagacccuggagcuuaacauggaaacacugaauaugaccaugccucucagcuguacaaagaacaauucccaucacuauauucgggugggcaacgagaccgggcuggagcuuacgcugaccaauacaucuaucaucgaccauaaauucugcaaccucagcgaugcgcacaagaaaaaucuguacgaccaugcucugauguccauuaucucuaccuuucaccucagcauuccgaacuucaaucaguaugaagccauguccugugauuuuaacggaggcaagaucagcguccaguacaaucugucucacuccuaugccggcgacgcugccaaccauugcgggacaguggcuaauggaguucuucaaaccuucaugcgcauggccuggggcgggagcuacauugcgcuggauucuggaagaggccggugggacuguaucaugacguccuaccaguaucucauuauccagaacacaaccugggaggaucacugccaguuuagccgccccucuccuaucggguaccugggacuucugucccaaaagacaagagacauuuauaucagccggcgccuccugggcaccuucaccuggacacuguccgauucugaaggcaaagacacgcccgggggauacugucucaccagauggaugcugauugaggccgagcuuaagugcuuuggcaacacagcuguggccaaauguaaugaaaagcaugaugaggaguucugcgacaugcugcggcucuuugauuucaacaaacaggcuauccagcgccugaaggccgaagcgcagaugagcauucaacuuaucaauaaggccgucaacgcucugaucaaugaccagcucauuaugaaaaaccaccugagagacaucauggggauuccuuauugcaauuacuccaaguauugguaccugaaccacaccacaaccggaaaaacgagccuccccaaguguuggcuggugucuaauggcuccuaccuuaacgaaacacauuucagcgaugacaucgagcagcaagccgauaauaugauuaccgagaugcugcagaaagaauauauggagcggcaggggaagaccccucucggacugguggaccuguuugucuucucuaccagcuuuuaccuuaucuccaucuuccuccaccugguuaaaauuccgacacaucgccacaucgugggcaagucuugccccaagccucauagacugaaccacaugggcauuuguagcugcgggcucuauaaacagcccggagugccugucaaguggaaacgguga

SEQ ID NO: 1709 - RNA, 1476 nt, Artificial Sequence
  derived and/or modified protein sequence (opt5) from LASV(G2222-SLE-2011;Clade IV)__AIT17244__GPC
augggccagaucgugaccuucuuucaagaggucccccacguuauugaagaggugaugaacaucgugcugauugcccucagcauccuggcuguccuuaaggggcuguacaaucucgccacaugcggacuggugggccuuguuacguuccugcuccugugugggagauccugcaccacaaaccuguauaaaggaguguacgaacuccagacccuggagcuuaauauggaaacacugaacaugaccaugccucucucuuguacaaagaauagcucccaucacuauauucgggucggcaacgagaccgggcuggagcuuacgcugaccaauacaucuaucaucgaccauaaauuuugcaaccucagcgaugcgcacaagaaaaaucuguacgaccaugcucugauguccauuaucucuaccuuccaccucagcauuccgaacuuuaaucaguaugaagccauguccugugauuucaacggaggcaagaucagcgugcaguacaaucugucucacuccuauguuggcgacgccgcugaucauugcgggacaguggccaacggaguccuucaaaccuuuaugcgcauggcuuggggcgggagcuacauugcccuggacucuggaagaggcaagugggauuguaucauuacguccuaccaguaucucaucauccagaauacaaccugggaggaccacugccaguucagccggcccucuccuauuggguaccugggacuucugucccaacgcacaagagauaucuauauuagccggcgccuccugggcaccuuuaccuggacacuguccgacucugaaggcaaagauacgcccgggggauacugucucaccagauggaugcugaucgaggcggagcuuaagugcuucggcaacacagccguggcuaaauguaacgaaaagcaugacgaggaauuuugcgauaugcugcgccucuucgacuuuaauaaacaggccauucagcggcugaaggcugaggcccagaugagcauccaacuuaucaacaaggcggugaaugcccugauuaacgaccagcucaucaugaaaaaucaccugagagauauuauggggaucccuuauugcaacuacuccaaguauugguaccugaaucacaccauuacaggaaaaaccagccucccccgguguuggcuggucucuaacggcuccuaccuuaaugaaacgcgcuucagcgacgauaucgagcagcaagcugacaacaugaucacagagaugcugcagaaggaauauauggagagacaggggaaaaccccucucggacugguugaucuguucguguuuucuaccagcuucuaccuuauuuccaucuuucuccaucuggugaagauuccgacacaccggcauaucgucggcaaacccugcccuaagccccaccgccugaaucauaugggcauuuguucuugcgggcucuauaagcagccuggagugcccguuaaauggaagagauga

SEQ ID NO: 1710 - RNA, 1476 nt, Artificial Sequence
  derived and/or modified protein sequence (opt5) from LASV(G2230-SLE-2012;Clade IV)__AIT17246__GPC
augggccagaucgugaccuucuuucaagaggucccccacguuauugaagaggugaugaacaucgugcugauugcccucagccugcuugcuguccugaaggggcucuacaauguggccacaugcggacugaucggccuuauuacguuccugcuccugugugggagauccugcaccacaaaccuguauaaaggaguuuacgaacuccagacccuggagcuuaauauggaaacacugaacaugaccaugccucucucuuguacaaagaauagcucccaucacuauaucauggugggcaacgagaccgggcuggagcuuacgcugaccaauacaucuaucauuaaccauaaauuuugcaaucucagcgacgcgcacaagaaaaaccuguacgaucauacccugauguccaucauuucuacauuccaccucagcaucccgaauuuuaaccaguaugaagcuauguccugugacuucaauggaggcaagauuagcguccaguacaaccugucucacuccuaugccguggaugccgcuaaucauugcggcaccguugccaacgggauccuucaaacguuuaugcggauggcuuggggaggcagcuacauugcccuggacucugggcgcggaaacugggauuguaucaugacauccuaccaguaucucaucauucagaauaccacaugggaggaccacugccaguucagcagacccucuccuaucggcuaccuggggcuucugucccaacggacccgcgauauuuauaucagcagacggcuccugggaaccuuuacauggacgcuguccgacucugaaggcaacgauacccccggcggguacugucucacacgcuggaugcugauugaggcggagcuuaagugcuucggaaauaccgccguggcuaaauguaacgaaaagcaugacgaggaauuuugcgauaugcugagacucuucgacuuuaauaaacaggccauccagcggcugaaggcugaggcccagaugagcauccaacuuauuaacaaagcggucaaugcccugaucaacgaucagcucauuaugaagaaucaucugcgcgacaucaugggcauuccuuauugcaacuacuccaaguauugguaccugaaucacacaaccacggggaaaacaagccuccccaaguguuggcuggugucuaacggauccuaccuuaaugaaacccacuucagcgacgauaucgagcagcaagcugacaacaugaucaccgagaugcugcagaaagaauauauggagagacagggcaagacaccucucgggcugguggaucuguucgucuuuucuaccagcuucuaccuuauuuccaucuuucuccaccugguuaaaauuccgacacaucggcacaucgugggaaagcccugcccuaaaccccaucgccugaaucacaugggcauuuguucuugcggccucuauaagcagccuggggugcccgucagauggaagcgguga

SEQ ID NO: 1711 - RNA, 1476 nt, Artificial Sequence
  derived and/or modified protein sequence (opt5) from LASV(G2259-SLE-2012;Clade IV)__AIT17250__GPC
augggccagaucgugaccuucuuucaagaggucccccacguuauugaagaggugaugaacaucgugcugauugcccucagccugcuugcuguccugaaggggcucuacaauguggccacaugcggacugaucggccuuguuacguuccugcuccugugugggagauccugcaccacaaaccuguauaaaggaguguacgaacuccagacccuggagcuuaauauggaaacacugaacaugaccaugccucucucuuguacaaagaauaacagccaucacuauauuauggucggcaaugagaccgggcuggagcuuacgcugaccaacacauccaucaucaaucauaaauuuugcaaccucucugacgcgcacaagaaaaaucuguacgaucauacccugaugagcauuaucuccacauuccaccucucuauuccgaacuuuaaucaguaugaagcuaugagcugugacuucaacggaggcaagaucuccgugcaguacaaucugagccacucuuaugccguugaugccgcuaaccauugcggcaccguggccaacgggguccuucaaacguuuaugcggauggcuuggggaggcuccuacauugcccuggacagcgggcgcggaaauugggauuguaucaugacaucuuaccaguaucucauuauccagaacaccacaugggaggaccacugccaguucuccagacccagcccuaucggcuaccuggggcuucugucucaacggacccgcgauauuuauaucuccagacggcuccugggaaccuuuacauggacgcugagcgacuccgaaggcaaugauacccccggcggguacugucucacacgcuggaugcugauugaggcggagcuuaagugcuucggaaacaccgccguggcuaaauguaaugaaaagcaugacgaggaauuuugcgauaugcugagacucuucgacuuuaacaaacaggccauccagcggcugaaggcugaggcccagaugucuauucaacuuaucaauaaagcggugaacgcccugaucaaugaucagcucauuaugaagaaccaucugcgcgacaucaugggcauuccuuauugcaauuacagcaaguauugguaccugaaccacacaaccacggggaaaacaucccuccccaaguguuggcuggucagcaauggaucuuaccuuaacgaaacccacuucuccgacgauaucgagcagcaagcugacaauaugauuaccgagaugcugcagaaagaauauauggagagacagggcaagacaccucucgggcugguugaucuguucguguuuagcaccucuuucuaccuuaucagcaucuuucuccaccuggugaaaauuccgacacaucggcacaucgucggaaagcccugcccuaaaccccaucgccugaaccacaugggcauuuguuccugcggccucuauaagcagccuggggugcccguuagauggaagcgguga

SEQ ID NO: 1712 - RNA, 1476 nt, Artificial Sequence
  derived and/or modified protein sequence (opt5) from LASV(G2263-SLE-2012;Clade IV)__AIT17254__GPC
augggccagaucgugaccuucuuucaagaggucccccacguuauugaagaggugaugaacaucgugcugauugcccucagcauccuggcuguccuuaaggggcuguacaauuucgccacaugcggaauugugggccucguuacguuucugcuucugugugggagauccugcaccacaucucucuauaaaggaguguacgaacugcagacccuggagcucaacauggaaacacugaauaugaccaugccucuuagcuguacaaagaacaauucccaucacuauaucauggucggcaacgagaccgggcuggagcucacgcugaccaauacaucuaucauuaaccauaaauucugcaaucuuagcgacgcgcacaagaaaaaccuguacgaucaugcucucauguccaucauuucuaccuuucaccugagcaucccgaauuucaaccaguaugaagccauguccugugacuuuaauggaggcaagauuagcgugcaguacaaccugucucacuccuaugccggcgaugcugccaaucauugcgggacaguugcuaacggagugcuccaaaccuucaugcggauggccuggggcgggagcuacaucgcgcuggacucuggacgcgauagaugggacuguauuaugacguccuaccaguaucuuaucauccagaacacaaccugggaggaucacugccaguuuagccggcccucuccuauuggcuaccuggggcuccugucccaacgcacaagagacaucuauauuagccggcgccuucugggaaccuucaccuggacacucuccgauucugaaggcaagaauacgcccggcggguacugucugaccagauggaugcugaucgaggccgagcucaaaugcuuuggaaacacagcugucgccaaguguaaugaaaaacaugacgaggaguucugcgauaugcugcggcuuuuugacuucaacaagcaggcuauucagcgccugaaagccgaagcgcagaugagcaucucccucaucaauaaggccgugaacgcucugauuaaugaucaacuuaucaugaagaaccaccugagagacauuaugggcaucccuuauugcaauuacagcaaauauugguaccucaaccacaccacaaccgggaagacgucucugccccgguguuggcugguguccaauggaagcuaccucaacgaaacacauuucucugacgauauugagcagcaggccgacaauaugaucaccgagaugcugcaaaaagaauauauggaucgccagggcaagaccccucuugggcuggucgaccucuuuguuuucagcacauccuuuuaccugaucucuauuuuccugcaccuugugaaaaucccgacccauagacacauugugggaaagacaugccccaaaccucaucggcucaaccacaugggcaucuguagcugcggccuguauaagcagcccggggucccugugaaguggaaacgcuga

SEQ ID NO: 1713 - RNA, 1476 nt, Artificial Sequence
  derived and/or modified protein sequence (opt5) from LASV(G2280-SLE-2012;Clade IV)__AIT17258__GPC
augggccagaucgugaccuucuuucaagaggucccccacguuauugaagaggugaugaacaucgugcugauugcccucagcauccuggcuguccuuaaggggcuguacaauauugccacaugcggacucgugggccugguuacguuccuucugcucugugggagauccugcaccacaucucuguauaaaggaguguacgaacugcagacccucgagcugaacauggaaacacuuaauaugaccaugccucugagcuguacaaagaacaauucccaucacuauaucauggucggcaacgagaccgggcucgagcugacgcuuaccaauacaucuaucauuaaccauaaauuuugcaaucugagcgacgcgcacaagaaaaaccucuacgaucaugcucugauguccaucgugucuaccuuccaccugagcauuccgaauuuuaaccaguaugaagccauguccugugacuucaauggaggcaagaucagcguucaguacaaccucucucacuccuaugccguggaugcugccaaucauugcggcacagucgcuaacggggugcugcaaaccuuuaugcggauggccuggggaggcagcuacauugcgcuugacucugggcgcggaggcugggauuguaucaugacguccuaccaguaucugauuauccagaacgugacaugggaggaccacugccaguucagcagacccucuccuaucggguaccucggacugcuuucccaacggacccgcgaugucuauauuagcagacggcugcucggcacauuuaccuggacccuguccgacucugaaggcaaugauacacccgggggauacugucugacgcgcuggaugcucaucgaggccgagcugaagugcuucggcaacaccgcuguugccaaauguaaugaaaagcaugacgaggaauuuugcgauaugcuuagacuguucgacuuuaacaaacaggcuauucagcggcucaaggccgaggcgcagaugagcauccaacugauuaauaaagccgugaacgcucuuaucaaugaucagcugaucaugaagaaccaccuccgcgacauuauggggaucccuuauugcaauuacuccaaguauugguaccugaaccacacaaccacaggaaaaaccagccugcccaaguguuggcucgugucuaauggcuccuaccugaacgaaacgcauuucagcgacgauauugagcagcaagccgacaauaugaucacagagaugcuucagaaagaauauauggagagacaggggaagaccccucugggacucgucgaucuguucguguuuucuaccagcuucuaccugauuuccaucuuucuucaccucguuaaaaucccgacacaucggcacauugugggcaagcccugcccuaaaccccaucgccugaaccacaugggcaucuguucuugcgggcuguauaagcagccuggaguccccgugaaguggaaaagauga

SEQ ID NO: 1714 - RNA, 1476 nt, Artificial Sequence
  derived and/or modified protein sequence (opt5) from LASV(G2295-SLE-2012;Clade IV)__AIT17262__GPC
augggccagaucgugaccuucuuucaagaggucccccacguuauugaagaggugaugaacaucgugcugauugcccucagcauccuggcuguccuuaaggggcuguacaaucucgccacaugcggacuggugggccuuguuacguuccugcuccugugugggagauccugcaccacaucucuguauaaaggaguguacgaacuccagacccuggagcuuaacauggaaacacugaauaugaccaugccucucagcuguacaaagaacaauucccaucacuauauuauggucggcaacgagaccgggcuggagcuuacgcugaccaauacaucuaucaucaaccauaaauuuugcaaucucagcgacgcgcacaagaaaaaccuguacgaucaugcucugauguccauuaucucuaccuuccaccucagcauuccgaauuuuaaccaguaugaagccauguccugugacuucaauggaggcaagaucagcgugcaguacaaccugucucacuccuaugccggcgaugcugccacacauugcgggaccguugcuaauggagugcuucaaacguuuaugcggauggccuggggcgggagcuacauugcgcuggacucuggacgcggcaagugggauuguaucaugacauccuaccaguaucucauuauccagaacaccacaugggaggaccacugccaguucagcagacccucuccuaucggguaccugggacuucugucccaacggacccgcgauauuuauaucagcagacggcuccugggcaccuuuacauggacgcuguccgacucugaaggcaaagauacccccgggggauacugucucacacgcuggaugcugauugaggccgagcuuaagugcuucggcaacaccgcugucgccaaauguaaugaaaagcaugacgaggaauuuugcgauaugcugagacucuucgacuuuaacaaacaggcuauccagcggcugaagacagaggcccagaugagcauucaacuuaucaauaaggcggugaacgcccugaucaaugaucagcucauuaugaaaaaccaucugcgcgacaucauggggauuccuuauugcaauuacuccaaguauugguaccugaaccacaccacgacaggaaaaaccagccuccccagauguuggcuggugucuaauggcuccuaccuuaacgaaacccacuucagcgacgauaucgagcagcaagcugacaauaugauuacagagaugcugcagaaggaauauauggagcggcaggggaaaaccccucucggacuggucgaucuguucguuuuuagcacaucuuucuaccuuaucuccaucuuucuccaccuggugaagauuccgacgcaucgccacaucgugggcaaacccugcccuaagccccauagacugaaccacaugggcauuuguucuugcgggcucuauaagcagccuggaguccccgugaaauggaagcgguga

SEQ ID NO: 1715 - RNA, 1476 nt, Artificial Sequence
  derived and/or modified protein sequence (opt5) from LASV(G2315-SLE-2012;Clade IV)__AIT17266__GPC
augggccagaucgugaccuucuuucaagaggucccccacguuauugaagaggugaugaacaucgugcugauugcccucagcauccuggcuguccuuaaggggcuguacaaucucgccacaugcggacuggugggccuuguuacguuccugcuccugugugggagauccugcaccacaucucuguauaaaggaguguacgaacuccagacccuggagcuuaacauggaaacacugaauaugaccaugccucucagcuguacaaagaacaauucccaucacuauauuauggucggcaacgagaccgggcuggagcuuacgcugaccaauacaucucucaucaaccauaaauuuugcaaucugagcgacgcgcacaagaaaaaccuguacgaucaugcucucauguccaucauuucuaccuuccaccugagcaucccgaauuuuaaccaguaugaagccauguccugugacuucaauggaggcaagauuagcgugcaguacaaccuuucucacuccuaugccguugaugcugccaaucauugcggcacaguggcuaacgggguccugcaaaccuuuaugcggauggccuggggaggcagcuacaucgcgcucgacucugggcgcggaggcugggauuguauuaugacguccuaccaguaucugaucauucagaacacaaccugggaggaccacugccaguucagcagacccucuccuaucggguaccuuggacugcucucccaacggacacgcgauaucuauauuagcagacggcugcugggcaccuuuaccuggacacucuccgacucugaaggcaaggauacgcccgggggauacugucugacccgcuggaugcuuaucgaggccgagcugaaaugcuucggcaauacagcuguggccaaguguaacgaaaaacaugacgaggaauuuugcgauaugcucagacuguucgacuuuaauaagcaggcuauucagcggcuuaaagccgaggcgcagaugagcauccaacugauuaacaaggccgugaaugcucucaucaacgaucagcugaucaugaagaaucaucugcgcgacauuauggggaucccuuauugcaacuacuccaaauauugguaccucaaucacaccacaaccggaagaacgagccugccccgguguuggcuugucucuaacggcuccuaccugaaugaaacacacuucagcgacgauauugagcagcaagccgacaacaugaucaccgagaugcuccagaaggaauauauggagcgccaggggaaaaccccucugggacugguugaucuuuucguguuuucuaccagcuucuaccucauuuccaucuuucugcaccuggugaagaucccgacacauagacacauugucggcaaaucuugccccaagccucaucggcucaaucacaugggcaucuguagcugcgggcuguauaaacagcccggagugccuguuaaguggaagcgcuga

SEQ ID NO: 1716 - RNA, 1476 nt, Artificial Sequence
  derived and/or modified protein sequence (opt5) from LASV(G2318-SLE-2012;Clade IV)__AIT17270__GPC
augggccagaucgugaccuucuuucaagaggucccccacguuauugaagaggugaugaacaucgugcugauugcccucagcguccuggcugugcuuaaggggcuguacaauuucgccacaugcggacucguuggccuggugacguuucuucugcucugugggagauccugcucuaccagcgucuauaaaggaguguacgaacugcagacacuggagcucaacauggaaacccugaauaugacaaugccucuuuccuguaccaagaacaauucucaucacuauaucaugguuggcaacgagacagggcuggagcucacccugacgaauaccagcauuaucaaccauaaauucugcaaucuuuccgacgcgcacaagaaaaaccuguacgaucaugcucucaugucuaucauuagcacauuucaccuguccaucccgaauuucaaccaguaugaagccaugagcugugacuuuaauggaggcaagauuucugugcaguacaaccugucccacagcuaugccgucgaugcugccaaucauugcggcaccguggcuaacggggugcuccaaacauucaugcggauggccuggggaggcucuuacaucgcgcuggacuccgggcacggaggcugggauuguauuaugaccaacuaccaguaucuuaucauucagaauacgacaugggaggaccauugccaguuuagccgccccucuccuaucggguaccugggacuccugucccaaagaacccgggauaucuauauuagccgcagacuucugggcacauucaccuggacccucuccgacucugaaggcaaggauacacccgggggauacugucugacgcgguggaugcugaucgaggccgagcucaaaugcuuuggcaacaccgcugucgccaaguguaaugaaaaacacgacgaggaguucugcgauaugcugcgccuuuuugacuucaacaagcaggcuauucagagacugaaagccgaagcgcagaugagcauccaacucauuaauaaggccguuaacgcucugaucaaugaucagcuuaucaugaagaaccaucugcgggacauuauggggaucccuuauugcaauuacuccaaauauugguaccucaaccacacaaccacaggacgcaccagccugcccaaguguuggcuggugucuaauggcuccuaccucaacgaaacgcacuucagcgacgauauugagcagcaagccgacaauaugaucacagagaugcugcagagagaauauauggagcggcaggggaaaaccccucuuggacugguggaucucuuugucuucucuaccagcuuuuaccugauuuccaucuuccugcaucuugugaagaucccgacacaccgccauauuguuggcaaaucuugccccaagccucacagacucaaccacaugggcaucuguagcugcgggcuguauaaacagcccggagugccugucaaguggaagcgguga

SEQ ID NO: 1717 - RNA, 1476 nt, Artificial Sequence
  derived and/or modified protein sequence (opt5) from LASV(G2363-SLE-2012;Clade IV)__AIT17274__GPC
augggccagaucgugaccuucuuucaagaggucccccacguuauugaagaggugaugaacaucgugcugauugcccucagcauccuggcuguccuuaaggggcuguacaauguggccacaugcggacucacgggccugguugcguuccuucugcucugugggagauccugcaccacaacccuguauaaaggaguguacgaacugcaggcucucgagcugaacauggaaacacuuaauaugaccaugccucugucuuguacaaagaacaauagccaucacuauauucgggucggcaacgagaccgggcucgagcugacgcuuaccaauacauccaucaucgaacaucgcuuuugcaaccugucugacgcccacaaaaagaaucucuacgaucaugcccugaugagcauuaucuccaccuuccaccugucuauuccgaacuuuaaucaguaugaggcuaugagcugugacuucaacggaggcaaaaucuccgugcaguacaaucucagccacucuuaugccguugaugcugccaaccauugcggcacaguggcgaaugggguccugcaaaccuuuaugagaauggccuggggaggcuccuacauugcucuugacagcgggcggaacggaugggauuguaucaugacgucuuaccaguaucugauuauccagaacacaaccugggaagaccacugccaguucucccgccccagcccuaucggcuaccucgggcugcuuucucaaagaacacgggauauuuauaucucccgcagacugcucggaaccuuuaccuggacacugagcgacuccgagggcaaggauacgcccggcggguacugucugacccgguggaugcucauugaggccgaacugaagugcuucggaaauacagcuguggccaaauguaacgagaagcaugacgaagaguuuugcgauaugcuucgccuguucgacuuuaauaaacaggcgauccagagacucaaggccgaagcucagaugucuauucaacugaucaacaaagccgugaaugcucuuaucaacgaucagcugauuaugaagaaucaccuccgggacaucaugggcauuccuuauugcaacuacagcaaguauugguaccugaauaacaccgccacagggaaaaccucccugccccgcuguuggcucgucagcaauggaucuuaccugaacgagacgcacuucuccgacgauaucgagcagcaagccgacaauaugauuacagaaaugcuucagaaggaguauauggaaagacagggcaaaaccccucuggggcucguugaucuguucguguuuagcaccucuuucuaccugaucagcaucuuucuucaucucgugaagauuccgacacaccggcauaucgucggaaaacccugcccuaagccccaccgccugaaccauaugggcauuuguuccugcggccuguauaaacagccuggggcucccgugagauggaagcgguga

SEQ ID NO: 1718 - RNA, 1476 nt, Artificial Sequence
  derived and/or modified protein sequence (opt5) from LASV(G2384-SLE-2012;Clade IV)__AIT17276__GPC
augggccagaucgugaccuucuuucaagaggucccccacguuauugaagaggugaugaacaucgugcugauugcccucagcauccuggcuguccuuaaggggcuguacaauuucgccacaugcggacucgugggccugguuacguuucuucugcucugugggagauccugcaccacaucucuguauaaaggaguguacgaacugcagacccucgagcugaacauggaaacacuuaauaugaccaugccucugagcuguacaaagaacaauucccaucacuauauuauggucggcaacgagaccgggcucgagcugacgcuuaccaauacaucuaucaucaaccauaaauucugcaaucugagcgacgcgcacaagaaaaaccucuacgaucaugcucugauguccauuaucucuaccuuucaccugagcauuccgaauuucaaccaguaugaagccauguccugugacuuuaauggaggcaagaucagcgugcaguacaaccucucucacuccuaugccggcgaugcugccaaucauugcgggacaguugcuaacggagugcugcaaaccuucaugcggauggccuggggcgggagcuacauugcgcuugacucuggacacggcaagugggauuguaucaugacguccuaccaguaucugauuauccagaacacaaccugggaggaccauugccaguuuagccgccccucuccuaucggguaccucggacugcuuucccaaagaacacgggauauuuauaucagccgcagacugcucggcaccuucaccuggacacuguccgacucugaaggcaaagauacgcccgggggauacugucugacccgguggaugcucauugaggccgagcugaagugcuuuggcaauacagcugucgccaaauguaacgaaaagcacgacgaggaguucugcgauaugcuucgccuguuugacuucaauaaacaggcuauccagagacucaaggccgaagcgcagaugagcauucaacugaucaacaaggccgugaaugcucuuaucaacgaucagcugauuaugaaaaaucaccuccgggacaucauggggauuccuuauugcaacuacuccaaguauugguaccugaaucauaccacaaccggaaaaacgagccugcccaaguguuggcucgugucuaacggcuccuaccugaaugaaacacacuucagcgacgauaucgagcagcaagccgacaacaugauuaccgagaugcuucagaaagaauauauggagcgccaggggaagaccccucugggacucgucgaucuguuuguuuucucuaccagcuuuuaccugaucuccaucuuccuucaucucgugaaaauuccgacacacagacauaucgugggcaagucuugccccaagccucaccggcugaaucacaugggcauuuguagcugcgggcuguauaaacagcccggagucccugugcgcuggaagagauga

SEQ ID NO: 1719 - RNA, 1473 nt, Artificial Sequence
  derived and/or modified protein sequence (opt5) from LASV(G2392-SLE-2012;Clade IV)__AIT17280__GPC
augggccagaucgugaccuucuuucaagaggucccccacguuauugaagaggugaugaacaucgugcugauugcccucagcauccuggcuguccuuaaggggcuguacaauuucgccacaugcggacucgugggccugguuacguuucuucugcucugugggagauccugcaccacaucucuguauaaaggaguguacgaacugcagacccucgagcugaacauggaaacacuuaauaugaccaugccucugagcuguacaaagaacaauucccaucacuauauucgggucggcaacgagaccgggcucgagcugacgcuuaccaauacaucuaucaucgaccauaaauucugcaaccugagcgaugcgcacaagaaaaaucucuacgaccaugcucugauguccauuaucucuaccuuucaccugagcauuccgaacuucaaucaguaugaagccauguccugugauuuuaacggaggcaagaucagcgugcaguacaaucucucucacuccuaugccggcgacgcugccaaccauugcgggacaguugcuaauggagugcugcaaaccuucaugcgcauggccuggggcgggagcuacauugcgcuugauucuggacacgagugggacuguaucaugacguccuaccaguaucugauuauccagaacacaaccugggauaaccauugccaguuuagcagacccucuccuaucggcuaccucgggcugcuuucccaacggacacgcgacauuuauaucagcagacggcugcucggaaccuucaccuggacacuguccgauucugaaggcaaggacacgcccggcggguacugucugacccgcuggaugcucauugaggccgagcugaaaugcuuuggaaauacagcugucgccaaguguaacgaaaaacacgaugaggaguucugcgacaugcuuagacuguuugauuucaauaagcaggcuauccagcggcucaaaguggaagcccagaugagcauucaacugaucaacaaggcggugaaugcccuuaucaacgaccagcugauuaugaagaaucaccuccgcgacaucaugggcauuccuuauugcaacuacuccaaauauugguaccugaaucauaccacaaccgggaagacgagccugcccaaauguuggcucgucucuaacggauccuaccugaaugaaacacacuucagcgaugacaucgagcagcaagcugauaacaugauuaccgagaugcuucagaaggaauauauggagagacagggcaaaaccccucuggggcucguugaccuguuuguguucucuaccagcuuuuaccugaucuccaucuuccuucaucucgugaagauuccgacacaccggcauaucgucggaaaaucuugccccaagccucaccgccugaaucacaugggcauuuguagcugcggcuuuuauaagcagcccggggugccuguuaaauggaagagauga

SEQ ID NO: 1720 - RNA, 1476 nt, Artificial Sequence
  derived and/or modified protein sequence (opt5) from LASV(G2405-SLE-2012;Clade IV)__AIT17284__GPC
augggccagaucgugaccuucuuucaagaggucccccacguuauugaagaggugaugaacaucgugcugauugcccucagcguccuggcugugcuuaaggggcuguacaauuucgccacaugcggaaucguuggccucgugacguuucugcuucugugugggagauccugcaccacaucucucuauaaaggagucuacgaacugcagacccuggagcucaacauggaaacacugaauaugaccaugccucuuagcuguacaaagaacaauucccaucacuauauuauggugggcaacgacaccgggcuggagcucacgcugaccaauacaucuaucaucaaccauaaauucugcaaucuuagcgaugcgcacaagaaaaaccuguacgaccaugcucucauguccauuaucucuaccuuucaccugagcauuccgaauuucaaccaguaugaggccauguccugugauuuuaauggaggcaagaucagcguucaguacaaccugucucacuccuaugccggcgacgcugccgaucauugcgggacaguggcuaauggaguccuccaaaccuucaugcggauggccuggggcgggagcuacauugcgcuggacucuggacgcggcagaugggauuguaucaugacguccuaccaguaucuuauuauccagaacacaaccugggaagaccacugccaguuuagccggcccucuccuaucggguaccugggacuccugucccaacgcacaagagauauuuauaucagccggcgccuucugggcaccuucaccuggacacucuccgacucugagggcaaggauacgcccgggggauacugucugaccagauggaugcugauugaagccgagcucaaaugcuuuggcaacacagcuguggccaaguguaaugagaaacaugacgaagaguucugcgauaugcugcggcuuuuugacuucaacaagcaggcuauccagcgccugaaagccgaagcgcagaugagcauucaacucaucaauaaggccgugaacgcucugaucaaugaccagcuuauuaugaagaaccaccugagagauaucauggggauuccuuauugcaauuacuccaaauauugguaccucaaccacaccacaaccggaaagacgagccugcccaaauguuggcuggucucuaauggcuccuaccucaacgagacacauuucagcgacgauaucgaacagcaagccgacaauaugauuaccgagaugcugcagaaggaguauauggaacggcaggggaaaaccccucuuggacugguugaucucuuuguguucucuaccagcuuuuaccugaucuccaucuuccugcaccuugugaagauuccgacacaucgccacaucgucggcaaacccugcccuaagccccauagacucaaccacaugggcauuuguucuugcgggcuguauaagcagccuggagugcccguuaaauggaagcgguga

SEQ ID NO: 1721 - RNA, 1476 nt, Artificial Sequence
  derived and/or modified protein sequence (opt5) from LASV(G2427-SLE-2012;Clade IV)__AIT17288__GPC
augggccagaucgugaccuucuuucaagaggucccccacguuauugaagaggugaugaacaucgugcugauugcccucagcauccuggcuguccuuaaggggcuguacaauuucgccacaugcggacucgugggccugguuacguuucuucugcucugugggagauccugcaccacaucucuguauaaaggaguguacgaacugcagacccucgagcugaacauggaaacacuuaauaugaccaugccucugagcuguacaaagaacaauucccaucacuauauuauggucggcaacgagaccgggcucgagcugacgcuuaccaauacaucuaucaucaaccauaaauucugcaaucugagcgacgcgcacaagaaaaaccucuacgaucaugcucugauguccauuaucucuaccuuucaccugagcauuccgaauuucaaccaguaugaagccauguccugugacuuuaauggaggcaagaucagcgugcaguacaaccucucucacuccuaugccguugaugcugccaaucauugcggcacaguggcuaacgggguccugcaaaccuucaugcggauggccuggggaggcggguacauugcgcuugacagcggacgcggcaacugggauuguaucaugacgucuuaccaguaucugauuauccagaauacaaccugggaggaccacugccaguuuuccagacccagcccuaucggguaccucggacugcuuucucaacggacacgcgauauuuauaucuccagacggcugcucggcaccuucaccuggacacugagcgacuccgaaggcaaggauacgcccgggggauacugucugacccgcuggaugcucauugaggccgagcugaaaugcuuuggcaacacagcuguggccaaguguaaugaaaaacaugacgaggaguucugcgauaugcuuagacuguuugacuucaacaagcaggcuauccagcggcucaaagccgaagcgcagaugucuauucaacugaucaauaaggccgugaacgcucuuaucaaugaucagcugauuaugaagaaccaccuccgcgacaucauggggauuccuuauugcaauuacagcaaauauugguaccugaaccacaccgucacaggaaagaccucccugcccaaauguuggcucguuagcaauggcucuuaccugaacgaaacgcauuucuccgacgauaucgagcagcaagccgacaauaugauuacagagaugcuucagaaggaauauauggagagacaggggaaaaccccucugggacucguggaucuguuuguguucagcaccucuuuuuaccugaucagcaucuuccuucaccucgucaagauuccgacacaucggcacaucgugggcaaauccugccccaagccucaucgccugaaccacaugggcauuuguucuugcgggcuguauaagcagcccggaguuccugugagauggaaacgguga

SEQ ID NO: 1722 - RNA, 1476 nt, Artificial Sequence
  derived and/or modified protein sequence (opt5) from LASV(G2431-SLE-2012;Clade IV)__AIT17292__GPC
augggccagaucgugaccuucuuucaagaggucccccacguuauugaagaggugaugaacaucgugcugauugcccucagcaucauggcuguccugaaggggcuuuacaauauugccacaugcggacuggugggccucguuacguuccugcuucugugugggagauccugcaccacaacccucuauaaaggaguguacgaacugcagacacuggagcucaacauggaaacccugaauaugacaaugccucuuucuuguaccaagaacaauagccaucacuauaucauggucggcaacgagacggggcuggagcucacccugacaaauaccuccaucauuaaccauaaauuuugcaaucuuucugacgcgcacaagaaaaaccuguacgaucaugcucucaugagcaucauuuccacauuccaccugucuaucccgaauuuuaaccaguaugaagccaugagcugugacuucaauggaggcaagauuuccgugcaguacaaccugagccacucuuaugccggcgaugcugccaaucauugcgggaccguugcuaacggagugcuccaaacguuuaugcggauggccuggggcggguccuacaucgcgcuggacagcggacacggcgggugggauuguauuaugacaucuuaccaguaucuuaucauccagaacaccacaugggaggaccauugccaguucacccgccccuccccuauuggauaccugggccuccugagccaaagaacccgggauaucuauauuucucgcagacuucugggcacauuuacguggacccucuccgacagcgaagggaaugauacacccggaggcuacugucugacccgguggaugcugaucgaggccgagcucaagugcuucgggaacacagcugucgccaaauguaaugaaaagcacgacgaggaauuuugcgauaugcugcgccuuuucgacuuuaacaaacaggcuauucagagacugcgggccgaggcgcagauguccauccaacucaucaauaaggccgugaacgcucugauuaaugaucagcuuaucaugaaaaaccaucugcgcgacauuaugggaaucccuuauugcaauuacucuaaguauugguaccucaaccacaccacgacaggcagaaccagccugccccgguguuggcugguguccaaugggagcuaccucaacgaaacccacuucucugacgauauugagcagcaagccgacaauaugaucacagagaugcugcagaaggaauauauggagcgccagggaaaaaccccucuuggccuggucgaucucuucguuuuuagcacauccuucuaccugaucucuauuuuucugcaucuuaucaagauuccgacgcacagacauaucgugggcaaacccugcccuaagccccaccggcucaaccacauggggguguguagcugcggacuguauaaacagccuggcguccccgugcgcuggaagagauga

SEQ ID NO: 1723 - RNA, 1476 nt, Artificial Sequence
  derived and/or modified protein sequence (opt5) from LASV(G2511-SLE-2012;Clade IV)__AIT17294__GPC
augggccagaucgugaccuucuuucaagaggucccccacguuauugaagaggugaugaacaucgugcugauugcccucagcauccuggcuguccuuaaggggcuguacaaucucgccacaugcggacuggugggccuuguuacguuccugcuccugugugggagauccugcaccacaucucuguauaaaggaguguacgaacuccagacccuggagcuuaacauggaaacacugaauaugaccaugccucucagcuguacaaagaacaauucccaucacuauauuauggucggcaacgagaccgggcuggagcuuacgcugaccaauacaucuaucaucgaccauaaauuuugcaaccucagcgaugcgcacaagaaaaaucuguacgaccaugcucugauguccauuaucucuaccuuccaccucagcauuccgaacuuuaaucaguaugaagccauguccugugauuucaacggaggcaagaucagcgugcaguacaaucugucucacuccuaugccggcgacgcugccaaccauugcgggacaguugcuaauggagugcuucaaaccuuuaugcggauggccuggggcgggagcuacauugcgcuggauucuggacgcggcgggugggacuguaucaugacguccuaccaguaucucauuauccagaacacaaccugggaggaucacugccaguucagcagacccucuccugucggauaccugggccuucugucccaacggacacgcgacaucuauauuagcagacggcuccugggcaccuuuaccuggacacuguccgauucugaagggaaggacacgcccggaggcuacugucucacccgcuggaugcugaucgaggccgagcuuaaaugcuucgggaacacagcuguggccaaguguaaugaaaaacaugaugaggaauuuugcgacaugcugagacucuucgauuuuaacaagcaggcuauucagcggcugaaaaccgaggcccagaugagcauccaacuuauuaauaaggcggugaacgcccugaucaaugaccagcucaucaugaagaaccaucugcgcgacauuaugggaaucccuuauugcaauuacuccaaauauugguaccugaaccacacaaccacgggcaagacaagccuccccagauguuggcuggucucuaauggguccuaccuuaacgaaacccacuucagcgaugacauugagcagcaagcugauaauaugaucaccgagaugcugcagaaagaauauauggagcggcagggaaagacaccucucggccugguugaccuguucguguuuucuaccagcuucuaccuuauuuccaucuuucuccaccuggugaaaaucccgacacaucgccacauugucggcaagcccugcccuaaaccccauagacugaaccacauggggaucuguucuugcggacucuauaagcagccuggcgugcccguuaaguggaaacgguga

SEQ ID NO: 1724 - RNA, 1476 nt, Artificial Sequence
  derived and/or modified protein sequence (opt5) from LASV(G2554-SLE-2012;Clade IV)__AIT17298__GPC
augggccagaucgugaccuucuuucaagaggucccccacguuauugaagaggugaugaacaucgugcugauugcccucagcauccuggcuguccuuaaggggcuguacaauauugccacaugcggacuccugggccuuguguguuuccugcuccugugcgggagauccuguacgaccucucuguauaaaggaguuuacgaacuccagacacuggagcuuaacauggaaacccugaauaugacaaugccucucagcugcaccaagaacaauucccaucacuauaucauggugggcaacgagacagggcuggagcuuacccugacgaauaccucuaucauuaaccauaaauuuuguaaucucagcgacgcgcacaagaaaaaccuguacgaucaugcucugauguccaucauuucuacauuccaccucagcaucccgaauuuuaaccaguaugaagccauguccugcgacuucaauggaggcaagauuagcguccaguacaaccugucucacuccuaugccguggaugcugccagccauuguggcaccaucgcuaaugggguucuucaaacauuuaugcggauggccuggggaggcucuuacauugcgcuggacuccgggcacggaggcugggauugcaucaugaccagcuaccaguaucucaucauucagaacacgacaugggaggaccauugucaguucucucgccccuccccuaucggguaccugggacuucugagccaaagaacccgggauauuuauaucucccgcagacuccugggcacauuuaccuggacccugucugacagcgaaggcaaggauacacccgggggauacugccucacgcgguggaugcugauugaggccgagcuuaaauguuucggcaacaccgcuguggccaagugcaaugaaaaacacgacgaggaauuuugcgauaugcugcgccucuucgacuuuaacaagcaggcuauccagagacugaaagccgaggcgcagauguccauccaacuuauuaauaaggccgucaacgcucugaucaaugaucagcucauuaugaagaaccaucugcgggacaucauggggauuccuuauuguaauuacagcaaauauugguaccugaaccacacaaccacaggaaagaccucucuccccaaaugcuggcugguguccaauggcagcuaccuuaacgaaacgcacuucucugacgauaucgagcagcaagccgacaauaugaucacagagaugcugcagaaggaauauauggagcgccaggggaaaaccccucucggacugguggaucuguucgucuuuagcaccuccuucuaccuuauuucuaucuuucuccaucugguuaagauuccgacacacagacauguggugggcaaacccuguccuaagccccaccggcugaaccacaugggcaucugcagcugugggcucuauggacagccuggcguccccgugaaguggaaacgcuga

SEQ ID NO: 1725 - RNA, 1476 nt, Artificial Sequence
  derived and/or modified protein sequence (opt5) from LASV(G2557-SLE-2012;Clade IV)__AIT17302__GPC
augggccagaucgugaccuucuuucaagaggucccccacguuauugaagaggugaugaacaucgugcugauugcccucagccugcuugcuguccugaaggggcucuacaauguggccacaugcggacugaucggccuuguuacguuccugcuccugugugggagauccugcaccacaaaccuguauaaaggaguguacgaacuccagacccuggagcuuaauauggaaacacugaacaugaccaugccucucucuuguacaaagaauaacagccaucacuauauuauggucggcaaugagaccgggcuggagcuuacgcugaccaacacauccaucaucucucauaaauuuugcaaucucagcgacgcgcacaagaaaaaccuguacgaucauacccugauguccauuaucucuacauuccaccucagcauuccgaauuuuaaccaguaugaagcuauguccugugacuucaauggaggcaagaucagcgugcaguacaaccugucucacuccuaugccguugaugccgcuaaucauugcggcaccguggccaacgggguccuucaaacguuuaugcggauggcuuggggaggcagcuacauugcccuggacucugggcgcggaaacugggauuguaucaugacauccuaccaguaucucauuauccagaauaccacaugggaggaccacugccaguucagcagacccucuccuaucggcuaccuggggcuucugucccaacggacccgcgauauuuauaucagcagacggcuccugggaaccuuuacauggacgcuguccgacucugaaggcaacgauacccccggcggguacugucucacacgcuggaugcugauugaggcggagcuuaagugcuucggaaauaccgccguggcuaaauguaacgaaaagcaugacgaggaauuuugcgauaugcugagacucuucgacuuuaauaaacaggccauccagcggcugaaggcugaggcccagaugagcauucaacuuaucaacaaagcggugaaugcccugaucaacgaucagcucauuaugaagaaucaucugcgcgacaucaugggcauuccuuauugcaacuacuccaaguauugguaccugaaucacacaaccacggggaaaacaagccuccccaaguguuggcuggucucuaacggauccuaccuuaaugaaacccacuucagcgacgauaucgagcagcaagcugacaacaugauuaccgagaugcugcagaaagaauauauggagagacagggcaagacaccucucgggcugguugaucuguucguguuuucuaccagcuucuaccuuaucuccaucuuucuccaccuggugaaaauuccgacacaucggcacaucgucggaaagcccugcccuaaaccccaucgccugaaucacaugggcauuuguucuugcggccucuauaagcagccuggggugcccguuagauggaagcgguga

SEQ ID NO: 1726 - RNA, 1476 nt, Artificial Sequence
  derived and/or modified protein sequence (opt5) from LASV(G2587-SLE-2012;Clade IV)__AIT17310__GPC
augggccagaucgugaccuucuuucaagaggucccccacguuauugaagaggugaugaacaucgugcugauugcccucagcauccuggcuguccuuaaggggcuguacaaucucgccacaugcggacuggugggccuuguuacguuccugcuccugugugggagauccugcaccacaucucuguauaaaggaguguacgaacuccagacccuggagcuuaacauggaaacacugaauaugaccaugccucucagcuguacaaagaacaauucccaucacuauauuauggucggcaacgagaccgggcuggagcuuacgcugaccaauacaucuaucaucaaccauaaauuuugcaaucucagcgacgcgcacaagaaaaaccuguacgaucaugcucugauguccauuaucucuaccuuccaccucagcauuccgaauuuuaaccaguaugaagccauguccugugacuucaauggaggcaagaucagcgugcaguacaaccugucucacuccuaugccggcgaugcugccacacauugcgggaccguugcuaauggagugcuucaaacguuuaugcggauggccuggggcgggagcuacauugcgcuggacucuggacgcggcaagugggauuguaucaugacauccuaccaguaucucauuauccagaacaccacaugggaggaccacugccaguucagcagacccucuccuaucggguaccugggacuucugucccaacggacccgcgauauuuauaucagcagacggcuccugggcaccuuuacauggacgcuguccgacucugaaggcaaagauacccccgggggauacugucucacacgcuggaugcugauugaggccgagcuuaagugcuucggcaacaccgcugucgccaaauguaaugaaaagcaugacgaggaauuuugcgauaugcugagacucuucgacuuuaacaaacaggcuauccagcggcugaagacagaggcccagaugagcauucaacuuaucaauaaggcggugaacgcccugaucaaugaucagcucauuaugaaaaaccaucugcgcgacaucauggggauuccuuauugcaauuacuccaaguauugguaccugaaccacaccacgacaggaaaaaccagccuccccagauguuggcuggugucuaauggcuccuaccuuaacgaaacccacuucagcgacgauaucgagcagcaagcugacaauaugauuacagagaugcugcagaaggaauauauggagcggcaggggaaaaccccucucggacuggucgaucuguucguuuuuagcacaucuuucuaccuuaucuccaucuuucuccaccuggugaagauuccgacgcaucgccacaucgugggcaaacccugcccuaagccccauagacugaacuauaugggcauuuguucuugcgggcucuacaagcagccuggaguccccgugaaauggaagcgguga

SEQ ID NO: 1727 - RNA, 1476 nt, Artificial Sequence
  derived and/or modified protein sequence (opt5) from LASV(G2612-SLE-2012;Clade IV)__AIT17314__GPC
augggccagaucgugaccuucuuucaagaggucccccacguuauugaagaggugaugaacaucgugcugauuacacucagcauccuggccguccuuaaggggcuguacaauguggcuacgugcggacucguuggccuggugaccuuccuucugcucugugggagauccugcacaaccucucuguauaaaggagucuacgaacugcagacacucgagcugaacauggaaacccuuaauaugacaaugccucugagcuguaccaagaacaauucccaucacuauauuauggugggcaacgagacggggcucgagcugacccuuacaaauaccucuaucaucaaccauaaauuuugcaaucugagcgacgcccacaagaaagaucucuacgaccaugcgcugauguccauuaucucuacauuccaccugagcauuccgaacuuuaaucaguaugaagcuauguccugugauuucaacggaggcaagaucagcguucaguacaaucucucucacuccuaugccguggacgccgcuaaccauugcggcaccgucgccaauggggugcugcaaacguuuaugcggauggcuuggggaggcagcuacauugcccuugauucugggcgcggaggcugggacuguaucaugacauccuaccaguaucugauuauccagaacaccacaugggaggaucacugccaguucagcagacccucuccuaucggguaccucggacugcuuucccaacggacccgcgacauuuauaucagcagacggcugcucggcaccuuuacauggacgcuguccgauucugaaggcaacgacacccccgggggauacugucugacacgcuggaugcucauugaggcggagcugaagugcuucggcaauaccgccguggcuaaauguaacgaaaagcaugaugaggaauuuugcgacaugcuuagacuguucgauuuuaauaaacaggccauccagcggcucaaggcugaggcccagaugagcauucaacugaucaacaaagcggucaaugcccuuaucaacgaccagcugauuaugaagaaucaccuccgcgacaucauggggauuccuuauugcaacuacuccaaguauugguaccugaaucacacaaccacgggaaaaacaagccugcccaaguguuggcucguuucuaacggcuccuaccugaaugaaacccauuucagcgaugacaucgagcagcaagcugauaacaugauuaccgagaugcuucagaaagaauauauggagagacaggggaagacaccucugggacucguggaccuguucguguuuucuaccagcuucuaccugaucuccaucuuucuucaccucgucaaaauuccgacacaucggcacaucgugggcaagcccugcccuaaaccccaucgccugaaucacaugggcauuuguucuugcgggcuguauaagcagccuggaguucccgugaaguggaaaagauga

SEQ ID NO: 1728 - RNA, 1476 nt, Artificial Sequence
  derived and/or modified protein sequence (opt5) from LASV(G2615-SLE-2012;Clade IV)__AIT17318__GPC
augggccagaucgugaccuucuuucaagaggucccccacguuauugaagaggugaugaacaucgugcugauugcccucagccugcuugcuguccugaaggggcucuacaauguggccacaugcggacugaucggccuuguuacguuccugcuccugugugggagauccugcaccacaaaccuguauaaaggaguguacgaacuccagacccuggagcuuaauauggaaacacugaacaugaccaugccucucucuuguacaaagaauaacagccaucacuauauuauggucggcaaugagaccgggcuggagcuuacgcugaccaacacauccaucaucaaucauaaauuuugcaaccucucugacgcgcacaagaaaaaucuguacgaucaugcucugaugagcauuaucuccaccuuccaccucucuauuccgaacuuuaaucaguaugaagccaugagcugugacuucaacggaggcaagaucuccgugcaguacaaucugagccacucuuaugccguugaugcugccaaccauugcggcacaguggcuaacgggguccuucaaaccuuuaugcggauggccuggggaggcuccuacauugcgcuggacagcgggcgcggaaauugggauuguaucaugacgucuuaccaguaucucauuauccagaacaucacaugggaggaccacugccaguucuccagacccagcccuauuggcuaccuggggcuucugucucaacggacccgcgauaucuauauuuccagacggcuccugggaacauuuaccuggacccugagcgacuccgaaggcaaugauacacccggcggguacugucucacgcgcuggaugcugaucgaggccgagcuuaagugcuucggaaacaccgcuguggccaaauguaaugaaaagcaugacgaggaauuuugcgauaugcugagacucuucgacuuuaacaaacaggcuauucagcggcugaaggccgaggcgcagaugucuauccaacuuaucaauaaagccgugaacgcucugauuaaugaucagcucaucaugaagaaccaucugcgcgacauuaugggcaucccuuauugcaauuacagcaaguauugguaccugaaccacacaaccacagggaaaaccucccuccccaaguguuggcuggucagcaauggaucuuaccuuaacgaaacgcacuucuccgacgauauugagcagcaagccgacaauaugaucacagagaugcugcagaaagaauauauggagagacagggcaagaccccucucgggcugguugaucuguucguguuuagcaccucuuucuaccuuaucagcauuuuucuccaccuggugaaaaucccgacacaucggcacauugucggaaagcccugcccuaaaccccaucgccugaaccacaugggcaucuguuccugcggccucuauaagcagccuggggugcccguuagauggaagcgguga

SEQ ID NO: 1729 - RNA, 1476 nt, Artificial Sequence
  derived and/or modified protein sequence (opt5) from LASV(G2723-SLE-2012;Clade IV)__AIT17322__GPC
augggccagaucgugaccuucuuucaagaggucccccacguuauugaagaggugaugaacaucgugcugauugcccucagccugcuugcuguccugaaggggcucuacaauguggccacaugcggacugaucggccuuguuacguuccugcuccugugugggagauccugcaccacaaaccuguauaaaggagcguacgaacuccagacccuggagcuuaauauggaaacacugaacaugaccaugccucucucuuguacaaagaauaacagccaucacuauauuauggugggcaaugagaccgggcuggagcuuacgcugaccaacacauccaucaucaaucauaaauuuugcaaccucucugacgcucacaagaaaaaucuguacgaucauacccugaugagcauuaucuccacauuccaccucucuauuccgaacuuuaaucaguaugaagccaugagcugugacuucaacggaggcaagaucuccguccaguacaaucugagccacucuuaugccguggaugcugccaaccauugcggcaccguugcuaacggggugcuucaaacguuuaugcggauggccuggggaggcuccuacauugcgcuggacagcgggcgcggaaauugggauuguaucaugacaucuuaccaguaucucauuauccagaacaccacaugggaggaccacugccaguucuccagacccagcccuaucggcuaccuggggcuucugucucaacggacccgcgauauuuauaucuccagacggcuccugggaaccuuuacauggacgcugagcgacuccgaaggcaaugauacccccggcggguacugucucacacgcuggaugcugauugaggccgagcuuaagugcuucggaaacaccgcugucgccaaauguaaugaaaagcaugacgaggaauuuugcgauaugcugagacucuucgacuuuaacaaacaggcuauccagcggcugaaggccgaggcgcagaugucuauucaacuuaucaauaaagccgugaacgcucugaucaaugaucagcucauuaugaagaaccaucugcgcgacaucaugggcauuccuuauugcaauuacagcaaguauugguaccugaaccacacaaccacggggaaaacaucccuccccaaguguuggcuggugagcaauggaucuuaccuuaacgaaacccacuucuccgacgauaucgagcagcaagccgacaauaugauuaccgagaugcugcagaaagaauauauggagagacagggcaagacaccucucgggcuggucgaucuguucguuuuuagcaccucuuucuaccuuaucagcaucuuucuccaccuggugaaaauuccgacacaucggcacaucgugggaaagcccugcccuaaaccccaucgccugaaccacaugggcauuuguuccugcggccucuauaagcagccugggguccccgugagauggaagcgguga

SEQ ID NO: 1730 - RNA, 1476 nt, Artificial Sequence
  derived and/or modified protein sequence (opt5) from LASV(G2868-SLE-2012;Clade IV)__AIT17328__GPC
augggccagaucgugaccuucuuucaagaggucccccacguuauugaagaggugaugaacaucgugcugauuacacucagcauccuggccguccuuaaggggcuguacaauauugcuacgugcggacucgugggccugguuaccuuccuucugcucugugggaaauccugcacaaccucucuguauaagggaguguacgaacugcagacacucgagcugaacauggaaacccuuaauaugacaaugccucugagcuguaccaaaaacaauucccaucacuauaucagagucggcaacgagacggggcucgagcugacccuuacaaauaccucuaucauuaaccauaaguuuugcaaucugagcgacgcccacaaaaagaaccucuacgaucaugcgcugauguccaucauuucuacauuccaccugagcaucccgaauuuuaaccaguaugaagcuauguccugugacuucaauggaggcaagauuagcgugcaguacaaccucucucacuccuaugccguugaugccgcuaaucauugcggcaccguggccaacgggguccugcaaacguuuaugcggauggcuuggggaggcagcuacaucgcccuugacucugggcacggaaacugggauuguauuaugacauccuaccaguaucugaucauccagaauaccacaugggaggaccauugccaguucagccgccccucuccuauuggcuaccucgggcugcuuucccaaagaacccgggauaucuauauuagccgcagacugcucggaaccuuuacauggacgcuguccgacucugaaggcaacgaugcgcccggcggguacugucugacccgguggaugcucaucgaggccgagcugaaaugcuucggaaauacagcuguggccaaguguaacgaaaaacacgacgaggaauuuugcgauaugcuucgccuguucgacuuuaauaagcaggcuauucagagacucaaagccgaggcgcagaugagcauccaacugaucaacaaggccgugaaugcucuuauuaacgaucagcugaucaugaagaaucaccuccgggacauuaugggcaucccuuauugcaacuacuccaaauauugguaccugaaucauaccacaaccgggaagacgagccugcccaaauguuggcucgucucuaacggauccuaccugaaugaaacacacuucagcgacgauauugagcagcaagccgacaacaugaucaccgagaugcuucagaaggaauauauggagcgccagggcaaaaccccucuggggcucguugaucuguucguguuuucuaccagcuucuaccugaucuccauuuuucuucaucucgugaagaucccgacacacagacaugucgugggaaaaucuugccccaagccucaccggcugaaucacaugggcauuuguagcugcggccuguauaagcagcccgggguuccugugaaauggaagcgcuga

SEQ ID NO: 1731 - RNA, 1476 nt, Artificial Sequence
  derived and/or modified protein sequence (opt5) from LASV(G2903-SLE-2012;Clade IV)__AIT17332__GPC
augggccagaucgugaccuucuuucaagaggucccccacguuauugaagaggugaugaacaucgugcugauugcccucagcauccuggcuguccuuaaggggcuguacaaucucgccacaugcggacuggugggccuuguuacguuccugcuccugugugggagauccugcaccacaucucuguauaaaggaguguacgaacuccagacccuggagcuuaacauggaaacacugaauaugaccaugccucucagcuguacaaagaacaauucccaucacuauauucgggucggcaacgagaccgggcuggagcuuacgcugaccaauacaucuaucaucaaccauaaauuuugcaaucucagcgacgcgcacaagaaaaaccuguacgaucaugcucugauguccauuaucucuaccuuccaccucagcauuccgaauuuuaaccaguaugaagccauguccugugacuucaauggaggcaagaucagcgugcaguacaaccugucucacuccuaugccguugaugcugccaaucauugcggcacaguggcuaacgggguccuucaaaccuuuaugcgcauggccuggggaggcagcuacauugcgcuggacucugggcacggaagaugggauuguaucaugacguccuaccaguaucucauuauccagaacacaaccugggaggaccauugccuguucagccggcccucuccuaucggcuaccuugggcugcucucccagcgcacaagagauauuuauaucagccggcgccugcugggaaccuuuaccuggacacucuccgacucugaaggcagagauacgcccggcggguacugucugacccgguggaugcuuauugaggccgagcugaagugcuucggaaauacagcuguggccaaauguaacgaaaagcacgacgaggaauuuugcgauaugcuccgccuguucgacuuuaauaaacaagcuauccagagacuuaaggccgaggcgcagaugagcauucagcugaucaacaaagccgugaaugcucucaucaacgaucaacugauuaugaagaaucaucugcgggacaucaugggcauuccuuauugcaacuacuccaaguauugguaccucaaucacaccacaaccgggcgcacgagccugcccagauguuggcuugucucuaacggauccuaccugaaugaaacacacuucagcgacgauaucgagcagcaggccgacaacaugauuaccgagaugcuccaaaaagaauauauggagcggcagggcaagaccccucuggggcugguugaucuuuucguguuuucuaccagcuucuaccucaucuccaucuuucugcaucuggugaaaauuccgacacaccgccauaucgucggaaagucuugccccaaaccucacagacucaaucacaugggcauuuguagcugcggccuguauaagcagcccggggugccuguuaaauggaagcgguga

SEQ ID NO: 1732 - RNA, 1476 nt, Artificial Sequence
  derived and/or modified protein sequence (opt5) from LASV(G2944-SLE-2012;Clade IV)__AIT17340__GPC
augggccagaucgugaccuucuuucaagaggucccccacguuauugaagaggugaugaacaucgugcugauugcccucagcauccuggcuguccuuaaggggcuguacaauuucgccacaugcggacucgugggccugguuacguuucuucugcucugugggagauccugcaccacaucucuguauaaaggaguguacgaacugcagacccucgagcugaacauggaaacacuuaauaugaccaugccucugagcuguacaaagaacaauucccaucacuauauuauggucggcaacgagaccgggcucgagcugacgcuuaccaauaucucuaucauuaaccauaaauucugcaaucugagcgacgcgcacaagaaaaaccucuacgaucaugcucugauguccaucauuucuacauuucaccugagcaucccgaauuucaaccaguaugaagccauguccugugacuuuaauggaggcaagauuagcgugcaguacaaccucucucacuccuaugccggcgaugcugccaaucauugcgggaccguugcuaacggagugcugcaaacauucaugcggauggccuggggcgggagcuacaucgcgcuugacucuggacgcggcgagugggauuguauuaugaccuccuaccaguaucugaucauccagaacacgacaugggaagaccacugccaguuuagcagacccucuccuauuggguaccucggacugcuuucccaacggacccgcgauaucuauauuagcagacggcugcucggcacauucaccuggacccuguccgacucugagggcaaggauacacccgggggauacugucugacgcgcuggaugcucaucgaggccgaacugaaaugcuuuggcaauaccgcugucgccaaguguaacgagaaacaugacgaagaguucugcgauaugcuuagacuguuugacuucaauaagcaggcuauucagcggcucaaagccgaagcgcagaugagcauccaacugaucaacaaggccgugaaugcucuuauuaacgaucagcugaucaugaagaaucaccuccgcgacauuauggggaucccuuauugcaacuacuccaaauauugguaccugaaucacacaaccacaggaaagaccagccugcccaaauguuggcucgugucuaacggcuccuaccugaaugagacgcauuucagcgacgauauugagcagcaagccgacaacaugaucacagaaaugcuucagaaggaguauauggaaagacaggggaaaaccccucugggacucgucgaucuguuuguuuucucuaccagcuuuuaccugaucuccauuuuccuucaccucgugaagaucccgacacaucggcacauugugggcaaacccugcccucgcccccauagacugaaucacaugggcaucuguucuugcgggcuguauaagcagccuggaguccccgugaaguggaaacgguga

SEQ ID NO: 1733 - RNA, 1476 nt, Artificial Sequence
  derived and/or modified protein sequence (opt5) from LASV(G3010-SLE-2013;Clade IV)__AIT17344__GPC
augggccagaucgugaccuucuuucaagaggucccccacguuauugaagaggugaugaacaucgugcugauugcccucagcauccuggcuguccuuaaggggcuguacaauuucgccacaugcggacucgugggccugguuacguuucuucugcucugugggagauccugcaccacaucucuguauaaaggaguguacgaacugcagacccucgagcugaacauggaaacacuuaauaugaccaugccucugagcuguacaaagaacaauucccaucacuauauuauggucggcaacgagaccgggcucgagcugacgcuuaccaauacaucuaucaucaaccauaaauucugcaaucugagcgacgcgcacaagaaaaaccucuacaaucaugcucugauguccauuaucucuaccuuucaccugagcauuccgaacuucaaucaguaugaagccauguccugugauuuuaacggaggcaagaucagcgugcaguacaaucucucucacuccuaugccggcgacgcugccagccauugcgggacaguugcuaacggagugcugcaaaccuucaugcggauggccuggggcgggucuuacauugcgcuugauuccggauacggcaagugggacuguaucaugacgagcuaucaguaccugauuauccagaacacaaccugggaggaucacugccaguuuucucgccccuccccuaucggguaucucggacugcuuagccaaagaacacgggacauuuacaucucccgcagacugcucggcaccuucaccuggacacugucugauagcgaaggcaaagacacgcccgggggauauugucugacccgguggaugcucauugaggccgagcugaagugcuuuggcaauacagcugucgccaaauguaacgaaaagcaugaugaggaguucugcgacaugcuucgccuguuugauuucaauaaacaggcuauccagagacucaagaccgaagcccagauguccauucaacugaucaacaaggcggugaaugcccuuaucaacgaccagcugauuaugaaaaaucaccuccgggauaucauggggauuccuuacugcaacuauagcaaguacugguaccugaaucacacaaccacgggaaaaacaucucugcccaaguguuggcucguguccaacggcagcuaucugaaugaaacccauuucucugacgacaucgagcagcaagcugauaacaugauuaccgagaugcuucagaaagaauacauggagcgccaggggaagacaccucugggacucgucgaccuguuuguuuucagcaccuccuuuuaucugaucucuaucuuccuucaccucgugaaaauuccgacacauagacacaucgugggcaagagcugccccaagccucaucggcugaaucacaugggcauuuguuccugcgggcuguacaaacagcccggagucccugugcgcuggaagagauga

SEQ ID NO: 1734 - RNA, 1476 nt, Artificial Sequence
  derived and/or modified protein sequence (opt5) from LASV(G3016-SLE-2013;Clade IV)__AIT17348__GPC
augggccagaucgugaccuucuuucaagaggucccccacguuauugaagaggugaugaacaucgugcugauugcccucagcauccuggcuguccuuaaggggcuguacaauauugccacaugcggacucaucggccuggugacguuccuucugcucugugggagauccugcaccacaucucuguauaaaggaguuuacgaacugcagacccucgagcugaacauggaaacacuuaauaugaccaugccucugagcuguacaaagaacaauucccaucacuauaucauggugggcaacgagaccgggcucgagcugacgcuuaccaauacaucuauuaucaaccauaaauuuugcaaucugagcgacgcgcacaagaaaaaccucuacgaucaugcucugauguccauuaucucuaccuuccaccugagcauuccgaauuuuaaccaguaugaagccauguccugugacuucaauggaggcaagaucagcguccaguacaaccucucucacuccuaugccggcgaugcugccaaucauugcgggacaguggcuaacggaguucugcaaaccuuuaugcggauggccuggggcgggagcuacauugcgcuugacucuggacgcggcagaugggauuguaucaugacguccuaccaguaucugaucauucagaacacaaccugggaggaccacugccaguucagccggcccucuccuaucggguaccucggacugcuuucccaacgcacaagagauauuuauaucagccggcgccugcucggcaccuuuaccuggacacuguccgacucugaaggcaaugauacgcccgggggauacugucugaccagauggaugcucauugaggccgagcugaagugcuucggcaacacagcuguggccaaauguaaugaaaagcaugacgaggaauuuugcgauaugcuucggcuguucgacuuuaacaaacaggcuauccagcgccucaaggccgaggcgcagaugagcauccaacugauuaauaaagccgucaacgcucuuaucaaugaucagcugauuaugaagaaccaccucagagacaucauggggauuccuuauugcaauuacuccaaguauugguaccugaaccacaccacaaccggaaaaacgagccugcccaaguguuggcucgugucuaauggcuccuaccugaacgaaacacauuucagcgacgauaucgagcagcaagccgacaauaugaucaccgagaugcuucagaaagaauauauggagcggcaggggaagaccccucugggacucguggaucuguucgucuuuucuaccagcuucuaccugauuuccaucuuucuucaccucguuaaaauuccgacacaucgccacaucgugggcaagcccugcccuaaaccccauagacugaaccacaugggcauuuguucuugcgggcuguauaagcagccuggagugcccgucaaguggaaacgguga

SEQ ID NO: 1735 - RNA, 1476 nt, Artificial Sequence
  derived and/or modified protein sequence (opt5) from LASV(G3034-SLE-2013;Clade IV)__AIT17350__GPC
augggccagaucgugaccuucuuucaagaggucccccacguuauugaagaggugaugaacaucgugcugauugcccucagcauccuggcuguccuuaaggggcuguacaauguggccacaugcggacucauuggccugguuacguuccuucugcucugugggagauccugcaccacaacccuguauaaaggaguguacgaacugcaggcgcucgagcugaacauggaaacacuuaauaugaccaugccucugucuuguacaaagaacaauagccaucacuauaucauggucggcaacgagaccgggcucgagcugacgcuuaccaauacauccaucauugaccauaaauuuugcaaccugucugaugcucacaagaaaaaucucuacgaccaugcccugaugagcaucauuuccaccuuccaccugucuaucccgaacuuuaaucaguaugaagccaugagcugugauuucaacggaggcaagauuuccgugcaguacaaucucagccacucuuaugcuggcgacgccgcuaagcauugcgggacaguugccaacggagugcugcaaaccuuuaugcggauggcguggggcggguccuacaucgcccuugauagcggacgcaauggcugggacugugucaugacgucuuaccaguaucugauuauccagaacacaaccugggaggaucacugccaguucuccagacccagcccuaucggguaccucggacugcuuucucaacggacacgcgacauuuauaucuccagacggcugcucggcaccuuuaccuggacacugagcgauuccgaaggcaaagacacgcccgggggauacugucugacccgcuggaugcucauugaggcugagcugaagugcuucggcaacacagccguggcuaaauguaaugaaaagcaugaugaggaauuuugcgacaugcuuagacuguucgauuuuaacaaacaggccauccagcggcucaagaccgaggcgcagaugucuauucaacugaucaauaaggccgugaacgcucuuaucaaugaccagcugauuaugaaaaaccaccuccgcgacaucauggggauuccuuauugcaauuacagcaaguauugguaccugaaccacacagucaccggaaaaacgucccugcccagauguuggcucguuagcaauggcucuuaccugaacgaaacacauuucuccgaugacaucgagcagcaagccgauaauaugauuaccgagaugcuucagaaggaauauaucgagcggcaggggaaaaccccucugggacucguggaccuguucguguuuagcacaucuuucuaccugaucagcauuuuucuucaccucgucaagaucccgacccaucgccacauuaucggcaaacccugcccuaagccccauagacugaaccacaugggcauuuguuccugcgggcuguauaagcagccuggagugcccguucgguggaaacgcuga

SEQ ID NO: 1736 - RNA, 1476 nt, Artificial Sequence
  derived and/or modified protein sequence (opt5) from LASV(G3101-SLE-2013;Clade IV)__AIT17354__GPC
augggccagaucgugaccuucuuucaagaggucccccacguuauugaagaggugaugaacaucgugcugauugcccucagcauccuggcuguccuuaaggggcuguacaauuucgccacaugcggacucgugggccugguuacguuucuucugcucugugggagauccugcaccacaucucuguauaaaggaguguacgaacugcagacccucgagcugaacauggaaacacuuaauaugaccaugccucugagcuguacaaagaacaauucccaucacuauauuauggucggcaacgagaccgggcucgagcugacgcuuaccaauaucucuaucauuaaccauaaauucugcaaucugagcgacgcgcacaagaaaaaccucuacgaucaugcucugauguccaucauuucuacauuucaccugagcaucccgaauuucaaccaguaugaagccauguccugugacuuuaauggaggcaagauuagcgugcaguacaaccucucucacuccuaugccggcgaugcugccaaucauugcgggaccguugcuaacggagugcugcaaacauucaugcggauggccuggggcgggagcuacaucgcgcuugacucuggacacggcgggugggauuguauuaugaccuccuaccaguaucugaucauccagaacacgacaugggaggaccauugccaguuuagccgccccucuccuauuggauaccucggccugcuuucccaaagaacccgggauaucuauauuagccgcagacugcucggcacauucaccuggacccuguccgacucugaagggaaggauacacccggaggcuacugucugacgcgguggaugcucaucgaggccgagcugaaaugcuuugggaauaccgcugucgccaaguguaacgaaaaacacgacgaggaguucugcgauaugcuucgccuguuugacuucaauaagcaggcuauucagagacucaaagccgaagcgcagaugagcauccaacugaucaacaaggccgugaaugcucuuauuaacgaucagcugaucaugaagaaucaccuccgggacauuaugggaaucccuuauugcaacuacuccaaauauugguaccugaaucauacaaccacaggcaagaccagccugcccaaauguuggcucgugucuaacggguccuaccugaaugaaacgcacuucagcgacgauauugagcagcaagccgacaacaugaucacagagaugcuucagaaggaauauauggagcgccagggaaaaaccccucugggccucgucgaucuguuuguuuucucuaccagcuuuuaccugaucuccauuuuccuucaucucgugaagaucccgacacacagacauauugugggcaaacccugcccucggccccaccgccugaaucacauggggaucuguucuugcggacuguauaagcagccuggcguccccgugaaguggaaaagauga

SEQ ID NO: 1737 - RNA, 1476 nt, Artificial Sequence
  derived and/or modified protein sequence (opt5) from LASV(G3110-SLE-2013;Clade IV)__AIT17360__GPC
augggccagaucgugaccuucuuucaagaggucccccacguuauugaagaggugaugaacaucgugcugauugcccucagcauccuggcuguccuuaaggggcuguacaauuucgccacaugcggacucgugggccugguuacguuucuucugcucugugggagauccugcaccacaucucuguauaaaggaguguacgaacugcagacccucgagcugaacauggaaacacuuaauaugaccaugccucugagcuguacaaagaacaauucccaucacuauauucgggucggcaacgagaccgggcucgagcugacgcuuaccaauacaucuaucaucaaccaucgcuucugcaaucugagcgacgcgcacaaaaagaaccucuacgaucaugcucugauguccauuaucucuaccuuucaccugagcauuccgaauuucaaccaguaugaagccauguccugugacuuuaauggaggcaaaaucagcgugcaguacaaccucucucacuccuaugccggcgaugcugccaaucauugcgggacaguugcuaacggagugcugcaaaccuucaugagaauggccuggggcgggagcuacauugcgcuugacucuggacacggcaagugggauuguaucaugacguccuaccaguaucugauuauccagaacacaaccugggacgaucauugccaguuuagccggcccucuccuaucggguaccucggacugcuuucccaacgcacaagagacauuuauaucagccggcgccugcucggcaccuucaccuggacacuguccgauucugagggcaaggacacgcccgggggauacugucugaccagauggaugcucauugaagccgagcugaaaugcuuuggcaauacagcugucgccaaguguaacgagaaacacgaugaagaguucugcgacaugcuucggcuguuugauuucaauaagcaggcuauccgcagacucaaagccgaagcgcagaugagcauucagcugaucaacaaggccgugaaugcucuuaucaacgaccaacugauuaugaagaaucaccuccgggacaucauggggauuccuuauugcaacuacuccaaauauugguaccugaaucauaccacaaccggaaagacgagccugccccgcuguuggcucgugucuaacggcuccuaccugaaugagacacacuucagcgaugacaucgaacagcaggccgauaacaugauuaccgagaugcuucaaaaagaguauauggaaagacaggggaagaccccucugggacucgucgaccuguuuguuuucucuaccagcuuuuaccugaucuccaucuuccuucaucucgugaaaauuccgacacaccggcauaucgugggcaagucuugccccaaaccucaccgccugaaucacaugggcauuuguagcugcggguuuuauaagcagcccggagucccugugaaguggaaaagauga

SEQ ID NO: 1738 - RNA, 1476 nt, Artificial Sequence
  derived and/or modified protein sequence (opt5) from LASV(G3148-SLE-2013;Clade IV)__AIT17364__GPC
augggccagaucgugaccuucuuucaagaggucccccacguuauugaagaggugaugaacaucgugcugauugcccucagcauccuggcuguccuuaaggggcuguacaauuucgccacaugcggacucgugggccugguuacguuucuucugcucugugggagauccugcaccacaucucuguauaaaggaguguacgaacugcagacccucgagcugaacauggaaacacuuaauaugaccaugccucugagcuguacaaagaacaauucccaucacuauauuauggucggcaacgagaccgggcucgagcugacgcuuaccaauacaucuaucaucaaccauaaauucugcaaucugagcgacgcgcacaagaaaaaccucuacgaucaugcucugauguccauuaucucuaccuuucaccugagcauuccgaauuucaaccaguaugaagccauguccugugacuuuaauggaggcaagaucagcgugcaguacaaccucucucacuccuaugccggcgaugcugccaaucauugcgggacaguugcuaacggagugcugcaaaccuucaugcggauggccuggggcgggagcuacauugcgcuugacucuggacgcgauagaugggacuguaucaugacguccuaccaguaucugauuauccagaacacaaccugggaggaucacugccaguuuagccggcccucuccuaucggcuaccucgggcugcuuucccaacgcacaagagacauuuauaucagccggcgccugcucggaaccuucaccuggacacuguccgauucugaaggcaaggacacgcccggcggguacugucugaccagauggaugcucauugaggccgagcugaaaugcuuuggaaauacagcugucgccaaguguaacgaaaaacaugaugaggaguucugcgacaugcuucggcuguuugauuucaauaagcaggcuauccagcgccucaaagccgaagcgcagaugagcauucaacugaucaacaaggccgugaaugcucuuaucaacgaccagcugauuaugaagaaucaccucagagacaucaugggcauuccuuauugcaacuacuccaaauauugguaccugaaucacaccacaaccgggaagacgagccugcccaaauguuggcucgugucuaacggauccuaccugaaugaaacacauuucagcgaugacaucgagcagcaagccgauaacaugauuaccgagaugcuucagaaggaauauaucgagcggcagggcaaaaccccucuggggcucgucgaccuguuuguuuucucuaccagcuuuuaccugaucuccauuuuccuucaccucgugaagaucccgacacaucgccacauugugggaaaacccugcccuaagccccauagacugaaucacaugggcaucuguucuugcggccuguauaagcagccuggggucagcgugaaauggaagcgguga

SEQ ID NO: 1739 - RNA, 1476 nt, Artificial Sequence
  derived and/or modified protein sequence (opt5) from LASV(G3151-SLE-2013;Clade IV)__AIT17368__GPC
augggccagaucgugaccuucuuucaagaggucccccacguuauugaagaggugaugaacaucgugcugauugcccucagcauccuggcuguccuuaaggggcuguacaauuucgccacaugcggacucgugggccugguuacguuucuucugcucugugggagauccugcaccacaucucuguauaaaggaguguacgaacugcagacccucgagcugaacauggaaacacuuaauaugaccaugccucugagcuguacaaagaacaauucccaucacuauauuauggucggcaacgagaccgggcucgagcugacgcuuaccaauacaucuaucaucaaccauaaauucugcaaucugagcgacgcgcacaagaaaaaccucuacgaucaugcucugauguccauuaucucuaccuuucaccugagcauuccgaauuucaaccaguuugaagccauguccugugacuucaauggaggcaagaucagcgugcaguauaaccucucucacuccuacgccggcgaugcugccaaucauugcgggacaguugcuaacggagugcugcaaaccuuuaugcggauggccuggggcgggagcuauauugcgcuugacucuggacacuccaagugggauuguaucaugacgagcuaccaguaccugauuauccagaacacaaccugggacgaucauugccaguucucucgccccuccccuaucggcuaucucgggcugcuuagccaaagaacacgggacauuuacaucucccgcagacugcucggaaccuuuaccuggacacugucugauagcgagggcaaagacacgcccggcggguauugucugacccgguggaugcucauugaagccgagcugaagugcuucggaaauacagcugucgccaaauguaacgagaagcacgaugaagaguuuugcgacaugcuucgccuguucgauuucaauaaacaggcuauccagagacucaaggccgaagcgcagauguccauucaacugaucaacaaggccgugaaugcucuuaucaacgaccagcugauuaugaaaaaucaccuccgggacaucaugggcauuccuuacugcaacuauagcaaguacugguaucugaaucauaccacaaccgggaaaacgucucugcccaaguguuggcucguguccaacggaagcuaccugaaugagacacacuuuucugaugacaucgaacagcaagccgauaacaugauuaccgagaugcuucagaaagaguacauggaacgccagggcaagaccccucuggggcucgucgaccuguucguuuuuagcacauccuucuaucugaucucuaucuuucuucaucucgugaaaauuccgacccacagacauaucgugggaaagagcugccccaagccucaccggcugaauuacaugggcauuuguuccugcggcuucuauaaacagcccggggucccugugaaguggaaacgcuga

SEQ ID NO: 1740 - RNA, 1476 nt, Artificial Sequence
  derived and/or modified protein sequence (opt5) from LASV(G3157-SLE-2013;Clade IV)__AIT17370__GPC
augggccagaucgugaccuucuuucaagaggucccccacguuauugaagaggugaugaacaucgugcugauugcccucagcauccuggcuguccuuaaggggcuguacaauuucgccacaugcggacucgugggccugguuacguuucuucugcucugugggagauccugcaccacaucucuguauaaaggaguguacgaacugcagacccucgagcugaacauggaaacacuuaauaugaccaugccucugagcuguacaaagaacaauucccaucacuauauuauggucggcaacgagaccgggcucgagcugacgcuuaccaauacaucuaucaucaaccauaaauucugcaaucugagcgacgcgcacaagaaaaaccucuacgaucaugcucugauguccauuaucucuaccuuucaccugagcauuccgaauuucaaccaguaugaagccauguccugugacuuuaauggaggcaagaucagcgugcaguacaaccucucucacuccuaugccggcgaugcugccaaucauugcgggacaguugcuaacggagugcugcaaaccuucaugcggauggccuggggcgggagcuacauugcgcuugacucuggacgcgauagaugggacuguaucaugacguccuaccaguaucugauuauccagaacacaaccugggaggaucacugccaguuuagccggcccucuccuaucggcuaccucgggcugcuuucccaacgcacaagagacauuuauaucagccggcgccugcucggaaccuucaccuggacacuguccgauucugaaggcaaggacacgcccggcggguacugucugaccagauggaugcucauugaggccgagcugaaaugcuuuggaaauacagcugucgccaaguguaacgaaaaacaugaugaggaguucugcgacaugcuucggcuguuugauuucaauaagcaggcuauccagcgccucaaagccgaagcgcagaugagcauucaacugaucaacaaggccgugaaugcucuuaucaacgaccagcugauuaugaagaaucaccucagagacaucaugggcauuccuuauugcaacuacuccaaauauugguaccugaaucacaccacaaccgggaagacgagccugcccaaauguuggcucgugucuaacggauccuaccugaaugaaacacauuucagcgaugacaucgagcagcaagccgauaacaugauuaccgagaugcuucagaaggaauauauggagcggcagggcaaaaccccucuggggcucgucgaccuguuuguuuucucuaccagcuuuuaccugaucuccaucuuccuucaccucgugaagauuccgacacaucgccacaucgugggaaaacccugcccuaagccccauagacugaaucacaugggcauuuguucuugcggccuguauaagcagccuggggucagcgugaaauggaagcgguga

SEQ ID NO: 1741 - RNA, 1476 nt, Artificial Sequence
  derived and/or modified protein sequence (opt5) from LASV(G3206-SLE-2013;Clade IV)__AIT17378__GPC
augggccagaucgugaccuucuuucaagaggucccccacguuauugaagaggugaugaacaucgugcugauugcccucagcauccuggcuguccuuaaggggcuguacaaucucgccacaugcggacuggugggccuuguuacguuccugcuccugugugggagauccugcaccacaucucuguauaaaggaguguacgaacuccagacccuggagcuuaacauggaaacacugaauaugaccaugccucucagcuguacaaagaacaauucccaucacuauauuauggucggcaacgagaccgggcuggagcuuacgcugaccaauacaucuaucaucaaccauaaauuuugcaaucucagcgacgcgcacaagaaaaaccuguacgaucauacccugauguccauuaucucuacauuccaccucagcauuccgaauuuuaaccaguaugaagcuauguccugugacuucaauggaggcaagaucagcgugcaguacaaccugucucacuccuaugccguugaugccgcuaaucauugcggcaccguggccaacgggguccuucaaacguuuaugcggauggcuuggggaggcagcuacauugcccuggacucugggcgcuccggaugggauuguaucaugacaagcuaccaguaucucgugauucagaacaccacaugggaggaccacugccaguucucuagacccuccccuaucggcuaccuggggcuucugagccaacggacccgcgauaucuauauuuccagacggcuccugggaaccuuuacauggacgcugucugacagcgaaggcaagaauacccccggcggguacugucucacacgcuggaugcugaucgaggcggagcuuaaaugcuucggaaacaccgccguggcuaaguguaaugaaaaacaugaugaggaauuuugcgacaugcugagacucuucgauuuuaacaagcaggccauucagcggcugaaagcugaggcccagauguccauccaacuuauuaauaaggcggucaacgcccugaucaaugaccagcucaucaugaagaaccaucugcgcgauauuaugggcaucccuuauugcaauuacagcaaauauugguaccugaaccacacaaccacggggagaacaucucucccccgguguuggcugguuuccaauggaagcuaccuuaacgaaacccacuucucugacgacauugagcagcaagcugauaauaugaucaccgagaugcugcagaaggaauauauggagcgccagggcaaaacaccucucgggcugguggaccuguucguguuuagcaccuccuucuaccuuauuucuaucuuucuccaccuggucaagaucccgacacauagacacauugugggaaaaagcugccccaagccucaucggcugaaccacaugggcaucuguuccugcggcuucuauaaacagcccgggguuccugugaaguggaagcgcuga

SEQ ID NO: 1742 - RNA, 1476 nt, Artificial Sequence
  derived and/or modified protein sequence (opt5) from LASV(G3234-SLE-2013;Clade IV)__AIT17388__GPC
augggccagaucgugaccuucuuucaagaggucccccacguuauugaagaggugaugaacaucgugcugauugcccucagcauccuggcuguccuuaaggggcuguacaauguggccacaugcggacucauuggccugguuacguuccuucugcucugugggagauccugcaccacaacccuguauaaaggaguguacgaacugcaggcgcucgagcugaacauggaaacacuuaauaugaccaugccucugucuuguacaaagaacaauagccaucacuauauccgggucggcaacgagaccgggcucgagcugacgcuuaccaauacauccaucauuaaccauaaauuuugcaaucugucugacgcucacaagaaaaaccucuacgaucaugcccugaugagcaucauuuccaccuuccaccugucuaucccgaauuuuaaccaguaugaagccaugagcugugacuucaauggaggcauuaucuccgugcaguacaaccucagccacucuuaugcuggcgaugccgcuaaucauugcgggacaguugccaacggagugcugcaaaccuuuaugcgcauggcguggggcggguccuacauugcccuugacagcggaagaaacggcugggauuguaucaugacgucuuaccaguaucugaucauucagaauacaaccugggacgaucacugccaguucucccggcccagcccuaucggguaccucggacugcuuucucaacgcacaagagacauuuauaucucccggcgccugcucggcaccuuuaccuggacacugagcgauuccgagggcaaggacacgcccgggggauacugucugaccagauggaugcucauugaagcugagcugaagugcuucggcaacacagccgucgcuaaauguaaugagaagcaugaugaagaguuuugcgacaugcuucggcuguucgauuuuaacaaacaggccauccagcgccucaagaccgaagcgcagaugaauauccaacugauuaacaaagccgugaaugcucuuaucaacgaccagcugauuaugaagaaucaccucagagacaucauggggauuccuuauugcaacuacucuaaguauugguaccugaauaacacagccaccggaaaaacgagccugccccgguguuggcucguguccaauggcagcuaccugaacgagacacacuucucugaugacaucgaacagcaagcugauaauaugaucaccgagaugcuucagaaggaguauauggaacgccaggggaaaaccccucugggacucgucgaccuguucguuuuuagcacauccuucuaccugauuucuaucuuucuucaucucgugaagauuccgacccacagacauaucgugggcaaacccugcccuaagccccaccggcugaaccauauuggcaucuguagcugcgggcuguauaaacagccuggaguccccgugaaguggaagcgcuga

SEQ ID NO: 1743 - RNA, 1476 nt, Artificial Sequence
  derived and/or modified protein sequence (opt5) from LASV(G502-SLE-2009;Clade IV)__AIT17126__GPC
augggccagaucgugaccuucuuucaagaggucccccacguuauugaagaggugaugaacaucgugcugauugcccucagcauccuggcuguccuuaaggggcuguacaauuucgccacaugcggacucgugggccugcuuacguuucugcuccugugugggagauccugcaccacaggacuguauaaaggcguuuacgaacuccagacccuggagcuuaacauggaaacacugaauaugaccaugccucucucuuguacaaagaacaauagccaucacuauauuaugguggggaacgagaccggacuggagcuuacgcugaccaauacauccaucaucaaccauaaauucugcaaucucucugacgcgcacaagaaaaaccuguacgaucaugcucugaugagcauuaucuccaccuuucaccucucuauuccgaauuucaaccaguaugaagccaugagcugugacuuuaauggcggcaagaucuccguccaguacaaccugagccacucuuaugccggggaugcugccgaccauugcggaacaguggcuaauggcguucuucaaaccuucaugcggauggccuggggaggguccuacauugcgcuggauagcggccgcgggagaugggacuguaucaugacgucuuaccaguaucucauuauccagaacacaaccugggaggaucacugccaguuuucccggcccagcccuaucggauaccugggccuucugucucaacgcacaagagacauuuauaucucccggcgccuccugggcaccuucaccuggacacugagcgauuccgaagggaaggacacgcccggaggcuacugucucaccagauggaugcugauugaggccgagcuuaaaugcuuugggaacacagcuguggccaaguguaaugaaaaacaugaugaggaguucugcgacaugcugcggcucuuugauuucaacaagcaggcuauccagcgccugaaagccgaagcgcagaugucuauucaacuuaucaauaaggccgucaacgcucugaucaaugaccagcucgugaugaagaaccaccugagagacauuaugggaaucccuuauugcaauuacagccgguauugguaccugaaccacaccacaaccggccgcacgucccuccccaaauguuggcuggugagcaaugggucuuaccuuaacgaaacacauuucuccgaugacauugagcagcaagccgauaauaugaucaccgagaugcugcagaaggaauauauggagagacagggaaaaaccccucucggccuggucgaccuguuuguuuucagcacaucuuuuuaccuuauuagcaucuuccuccaccuggugaagaucccgacccaucggcacauugugggcaaauccugccccaagccucaucgccugaaccacauggggaucuguucuugcggacucuauaaacagcccggcgucccugugaaguggaagagauga

SEQ ID NO: 1744 - RNA, 1476 nt, Artificial Sequence
  derived and/or modified protein sequence (opt5) from LASV(G503-SLE-2009;Clade IV)__AIT17130__GPC
augggccagaucgugaccuucuuucaagaggucccccacguuauugaagaggugaugaacaucgugcugauugcccucagcauccuggcuguccuuaaggggcuguacaauuucgccacaugcggauuugugggccucguuacguuccugcuucugugugggagauccugcaccacaucucucuauaaaggaguguacgaacugcagacccuggagcucaacauggaaacacugaauaugaccaugccucuuagcuguacaaagaacaauucccaucacuauauucgggucggcaacgacaccgggcuggagcucacgcugaccaauacaucuaucaucaaccauaaauuuugcaaucuuagcgaugcgcacaagaaaaaccuguacgaccaugcucucauguccauuaucucuaccuuccaccugagcauuccgaauuuuaaccaguaugaggccauguccugugauuucaauggaggcaagaucagcgugcaguacaaccugucucacuccuaugccguugacgcugccagccauugcggcacaauugcuaauggggugcuccaaaccuuuaugcgcauggccuggggaggcucuuacaucgcgcuggauuccgggagagaccggugggauuguauuaugacgagcuaccaguaucuuaucauccagaacacaaccugggaagaccacugccaguucucucgccccuccccuauuggauaccugggccuccugagccaaagaacacgggauaucuauauuucccgcagacuucuggggaccuuuaccuggacacucucugacagcgagggaaaggauacgcccggcggcuacugucugacccgguggaugcugaucgaagccgagcucaaaugcuucgggaacacagcugucgccaaguguaaugagaaacaugacgaagaguuuugcgauaugcugcgccuuuucgacuucaacaagcaggcuauucagagacugaaagccgaagcgcagauguccauccaacucaucaauaaggccgugaacgcucugauuaaugaccagcuuaucaugaagaaccaucugcgggauauuaugggaaucccuuauugcaauuacagcaaauauugguaccucaaccacaccacaaccggcaagacgucucugcccaaauguuggcugguguccaaugggagcuaccucaacgagacacacuuuucugacgauauugaacagcaagccgacaauaugaucaccgagaugcugcagaaggaguauauggaacgccagggaaaaaccccucuuggccuggucgaucucuucguuuuuagcacauccuucuaccugaucucuauuuuucugcaccuugugaagaucccgacccauagacacauuguggggaaaagcugccccaagccucaucggcucaaccacaugggaaucuguuccugcggccuguauaagcagcccggcgucccugugaaauggaagcgcuga

SEQ ID NO: 1745 - RNA, 1476 nt, Artificial Sequence
  derived and/or modified protein sequence (opt5) from LASV(G610-SLE-2009;Clade IV)__AIT17134__GPC
augggccagaucgugaccuucuuucaagaggucccccacguuauugaagaggugaugaacaucgugcugauugcccucagcauccuggcuguccuuaaggggcuguacaauuucgccacaugcggacucgugggccugguuacguuucuucugcucugugggagauccugcaccacaucucuguauaaaggaguguacgaacugcagacccucgagcugaacauggaaacacuuaauaugaccaugccucugagcuguacaaagaacaauucccaucacuauauuauggucggcaacgagaccgggcucgagcugacgcuuaccaauacaucuaucaucaaccauaaauucugcaaucugagcgacgcgcacaagaaaaaccucuacgaucaugcucugauguccauuaucucuaccuuucaccugagcauuccgaauuucaaccaguaugaagccauguccugugacuuuaauggaggcaagaucagcgugcaguacaaccucucucacuccuaugccggcgaugcugccaaucauugcgggacaguugcuaacggagugcugcaaaccuucaugcggauggccuggggcgggagcuacauugcgcuugacucuggacgcggcagaugggauuguaucaugacguccuaccaguaucugauuauccagaacacaaccugggaggaccacugccaguuuagccggcccucuccuaucggguaccucggacugcuuucccaacgcacaagagauauuuauaucagccggcgccugcucggcaccuucaccuggacacuguccgacucugaaggcaaggauacgcccgggggauacugucugaccagauggaugcucauugaggccgagcugaaaugcuuuggcaauacagcugucgccaaguguaacgaaaaacaugacgaggaguucugcgauaugcuucggcuguuugacuucaauaagcaggcuauccagcgccucaaagccgaagcgcagaugagcauucaacugaucaacaaggccgugaaugcucuuaucaacgaucagcugauuaugaagaaucaccucagagacaucauggggauuccuuauugcaacuacuccaaauauugguaccugaaucacaccacaaccggaaagacgagccugcccaaauguuggcucgugucuaacggcuccuaccugaaugaaacacauuucagcgacgauaucgagcagcaagccgacaacaugauuaccgagaugcuucagaaggaauauauggagcggcaggggaaaaccccucugggacucgucgaucuguuuguuuucucuaccagcuuuuaccugaucuccaucuuccuucaccucgugaagauuccgacacaucgccacaucgugggcaaaucuugccccaagccucauagacugaaucacaugggcauuuguagcugcgggcuguauaagcagcccggagucccugugaaauggaagcgguga

SEQ ID NO: 1746 - RNA, 1476 nt, Artificial Sequence
  derived and/or modified protein sequence (opt5) from LASV(G636-SLE-2009;Clade IV)__AIT17138__GPC
augggccagaucgugaccuucuuucaagaggucccccacguuauugaagaggugaugaacaucgugcugauugcccucagcauccuggcuguccuuaaggggcuguacaaucucgccacaugcggacuggugggccuuguuacguuccugcuccugugugggagauccugcaccacaucucuguauaaaggaguguacgaacuccagacccuggagcuuaacauggaaacacugaauaugaccaugccucucagcuguacaaagaacaauucccaucacuauauuauggucggcaacgagaccgggcuggagcuuacgcugaccaauacaucucucaucaaccauaaauuuugcaaucugagcgacgcgcacaagaaaaaccuguacgaucaugcucucauguccaucauuucuaccuuccaccugagcaucccgaauuuuaaccaguaugaagccauguccugugacuucaauggaggcaagauuagcgugcaguacaaccuuucucacuccuaugccguugaugcugccagccauugcggcacaguggcuaaugggguccugcaaaccuuuaugcggauggccuggggaggcucuuacaucgcgcucgacuccgggcgcggaggcugggauuguauuaugacgagcuaccaguaucugaucauucagaacacaaccugggaggaccacugccaguucucuagacccuccccuaucggguaccuuggacugcucagccaacggacacgcgauaucuauauuuccagacggcugcugggcaccuuuaccuggacacucucugacagcgaaggcaaggauacgcccgggggauacugucugacccgcuggaugcuuaucgaggccgagcugaaaugcuucggcaacacagcuguggccaaguguaaugaaaaacaugacgaggaauuuugcgauaugcucagacuguucgacuuuaacaagcaggcuauucagcggcuuaaagccgaggcgcagauguccauccaacugauuaauaaggccgugaacgcucucaucaaugaucagcugaucaugaagaaccaucugcgcgacauuauggggaucccuuauugcaauuacagcaaauauugguaccucaaccacaccacaaccggaagaacgucucugccccgguguuggcuugucuccaauggcagcuaccugaacgaaacacacuucucugacgauauugagcagcaagccgacaauaugaucaccgagaugcuccagaaggaauauauggagcgccaggggaaaaccccucugggacugguugaucuuuucguguuuagcacauccuucuaccucauuucuaucuuucugcaccuggugaagaucccgacccauagacacauugucggcaaaagcugccccaagccucaucggcucaaccacaugggcaucuguuccugcgggcuguauaaacagcccggagugccuguuaaguggaagcgcuga

SEQ ID NO: 1747 - RNA, 1476 nt, Artificial Sequence
  derived and/or modified protein sequence (opt5) from LASV(G692-SLE-2009;Clade IV)__AIT17146__GPC
augggccagaucgugaccuucuuucaagaggucccccacguuauugaagaggugaugaacaucgugcugauugcccucagcauccuggcuguccuuaaggggcuguacaaucucgccacaugcggacuggugggccuuguuacguuccugcuccugugugggagauccugcaccacaucucuguauaaaggaguguacgaacuccagacccuggagcuuaacauggaaacacugaauaugaccaugccucucagcuguacaaagaacaauucccaucacuauauuauggucggcaacgagaccgggcuggagcuuacgcugaccaauacaucuaucaucaaccauaaauuuugcaaucucagcgacgcgcacaagaaaaaccuguacgaucaugcucugauguccauuaucucuaccuuccaccucagcauuccgaauuuuaaccaguaugaagccauguccugugacuucaauggaggcaagaucagcgugcaguacaaccugucucacuccuaugccggcgaugcugccaaucauugcgggacaguugcuaacggagugcuucaaaccuuuaugcggauggccuggggcgggagcuacauugcgcuggacucuggacgcggcagaugggauuguaucaugacguccuaccaguaucucauuauccagaacacaaccugggaggaccacugcagcuucucucggcccuccccuaucggguaccugggacuucugagccagcgcacaagagauauuuauaucucccggcgccuccugggcaccuuuaccuggacacugucugacagcgaaggcaaggauacgcccgggggauacugucucaccagauggaugcugauugaggccgagcuuaaaugcuucggcaauacagcugucgccaaguguaacgaaaaacaugacgaggaauuuugcgauaugcugcgccucuucgacuuuaauaagcaagcuauccagcggcugaaagccgaggcgcagauguccauucagcuuaucaacaaggccgugaaugcucugaucaacgaucaacucauuaugaagaaucaccugagagacaucauggggauuccuuauugcaacuacagcaaauauugguaccugaaucacaccacaaccggaaagacgucucuccccaaauguuggcugguguccaacggcagcuaccuuaaugaaacacauuucucugacgauaucgagcagcaggccgacaacaugauuaccgagaugcugcaaaaggaauauauggagcggcaggggaaaaccccucucggacuggucgaucuguucguuuuuagcacauccuucuaccuuaucucuaucuuucuccaccuggugaagauuccgacccaucgccacaucgugggcaaaagcugccccaagccucauagacugaaucacaugggcauuuguuccugcggguucuauaagcagcccggagucccugugaaauggaagcgguga

SEQ ID NO: 1748 - RNA, 1476 nt, Artificial Sequence
  derived and/or modified protein sequence (opt5) from LASV(G733-SLE-2010;Clade IV)__AIT17154__GPC
augggccagaucgugaccuucuuucaagaggucccccacguuauugaagaggugaugaacaucgugcugauugcccucagcauccuggcuguccuuaaggggcuguacaauuucgccacaugcggaauugugggccucguuuccuuucugcuucugugugggagaucuugcacgaccagccucuauaaaggaguguacgaacugcagacacuggagcucaacauggaaacccugaauaugacaaugccucuuuccuguaccaagaacaauucucaucacuauaucauggucggcaacgagacagggcuggagcucacccugacgaauaccagcaucauuaaccauaaauucugcaaucuuuccgacgcgcacaagaaaaaccuguacgaucaugcucucaugucuaucauuagcacauuucaccuguccaucccgaauuucaaccaguaugaagccaugagcugugacuuuaauggaggcaagauuucugugcaguacaaccugucccacagcuaugccggcgaugcugccaaucauugcgggaccaucgcuaacggaguucuccaaacauucaugcggauggccuggggcgggucuuacauugcgcuggacuccggacgcgauagaugggacuguaucaugaccagcuaccaguaucuuaucauucagaacacgacaugggaggaucacugccaguuuucucggcccuccccuaucggcuaccuggggcuccugagccaacgcaccagagacauuuauaucucccggcgccuucugggaacauucaccuggacccucucugauagcgaaggcaaggacacacccggcggguacugucugacgagauggaugcugauugaggccgagcucaaaugcuuuggaaauaccgcuguggccaaguguaacgaaaaacaugaugaggaguucugcgacaugcugcggcuuuuugauuucaauaagcaggcuauccagcgccugaaagccgaagcgcagauguccauccaacucauuaacaaggccgucaaugcucugaucaacgaccagcuuauuaugaagaaucaccugagagacaucaugggcauuccuuauugcaacuacagcaaauauugguaccucaaucacacaaccacagggaagaccucucugcccaaauguuggcugguguccaacggaagcuaccucaaugaaacgcauuucucugaugacaucgagcagcaagccgauaacaugaucacagagaugcugcagaaggaauauauggagcggcagggcaaaaccccucuugggcugguggaccucuuugucuucagcaccuccuuuuaccugauuucuaucuuccugcaccuuguuaagauuccgacacaucgccacguggugggaaaaagcugccccaagccucauagacucaaucacaugggcaucuguuccugcggccuguaugggcagcccggagucccugugaaguggaaacgguga

SEQ ID NO: 1749 - RNA, 1476 nt, Artificial Sequence
  derived and/or modified protein sequence (opt5) from LASV(G771-SLE-2010;Clade IV)__AIT17158__GPC
augggccagaucgugaccuucuuucaagaggucccccacguuauugaagaggugaugaacaucgugcugauugcccucagcauccuggcuguccuuaaggggcuguacaauuucgccacaugcggacucgugggccugguuacguuucuucugcucugugggagauccugcaccacaucucuguauaaaggaguguacgaacugcagacccucgagcugaacauggaaacacuuaauaugaccaugccucugagcuguacaaagaacaauucccaucacuauauuauggucggcaacgagaccgggcucgagcugacgcuuaccaauacaucuaucaucaaccauaaauucugcaaucugagcgacgcgcacaagaaaaaccucuacgaucaugcucugauguccauuaucucuaccuuucaccugagcauuccgaauuucaaccaguaugaagccauguccugugacuuuaauggaggcaagaucagcgugcaguacaaccucucucacuccuaugccggcgaugcugccaaucauugcgggacaguugcuaacggagugcugcaaaccuucaugcggauggccuggggcgggagcuacauugcgcuugacucuggacgcgauagaugggacuguaucaugacguccuaccaguaucugauuauccagaacacaaccugggaggaucacugccaguuuagccggcccucuccuaucggcuaccucgggcugcuuucccaacgcacaagagacauuuauaucagccggcgccugcucggaaccuucaccuggacacuguccgauucugaaggcaaggacacgcccggcggguacugucugaccagauggaugcucauugaggccgagcugaaaugcuuuggaaauacagcugucgccaaguguaacgaaaaacaugaugaggaguucugcgacaugcuucggcuguuugauuucaauaagcaggcuauccagcgccucaaagccgaagcgcagaugagcauucaacugaucaacaaggccgugaaugcucuuaucaacgaccagcugauuaugaagaaucaccucagagacaucaugggcauuccuuauugcaacuacuccaaauauugguaccugaaucacaccacaaccgggaagacgagccugcccaaauguuggcucgugucuaacggauccuaccugaaugaaacacauuucagcgaugacaucgagcagcaagccgauaacaugauuaccgagaugcuucagaaggaauauauggagcggcagggcaaaaccccucuggggcucgucgaccuguuuguuuucucuaccagcuuuuaccugaucuccaucuuccuucaccucgugaagauuccgacacaucgccacaucgugggaaaaucuugccccaagccucauagacugaaucacaugggcauuuguagcugcggccuguauaagcagcccggggucccugugaaauggaagcgguga

SEQ ID NO: 1750 - RNA, 1476 nt, Artificial Sequence
  derived and/or modified protein sequence (opt5) from LASV(G808-SLE-2010;Clade IV)__AIT17164__GPC
augggccagaucgugaccuucuuucaagaggucccccacguuauugaagaggugaugaacaucgugcugauugcccucagcauccuggcuguccuuaaggggcuguacaauuucgccacaugcggacucgugggccugguuacguuucuucugcucugugggagauccugcaccucuagccuguauaaaggaguguacgaacugcagacacucgagcugaacauggaaacccuuaauaugacaaugccucuguccuguaccaagaacaauucucaucacuauauucgggucggcaacgagacagggcucgagcugacccuuacgaauaccagcaucaucgaccauaaauucugcaaccuguccgaugcgcacaagaaaaaucucuacgaccaugcucugaugucuauuaucagcacauuucaccuguccauuccgaacuucaaucaguaugaagccaugagcugugauuuuaacggaggcaagaucucugugcaguacaaucucucccacagcuaugccggcgacgcugccaagcauugcgggaccguugcuaacggagugcugcaaacauucaugcgcauggccuggggcgggucuuacauugcgcuugauuccggacacggcaauugggacuguaucaugaccagcuaccaguaucugauuauccagaacacgacaugggaggaucauugccaguuuucuagacccuccccuaucggguaccucggacugcuuagccaacggacccgcgacauuuauaucuccagacggcugcucggcacauucaccuggacccugucugauagcgaaggcaacgacgcccccgggggauacugucugacacgcuggaugcucauucaggcugagcugaaaugcuuuggcaauacggccgucgcuaaguguaacgagaaacacgaugaagaguucugcgacaugcuuagacuguuugauuucaauaagcaggccauccagcggcucaaagcggaagcccaaauguccauucagcugaucaacaaggcugugaaugcccuuaucaacgaccagcugauuaugaagaaucaccuccgcgacaucauggggauuccuuauugcaacuacagcaaauauugguaccugaaucauaccacaaccggaagaacaucucugccccgguguuggcucguguccaacggcagcuaccugaaugagacccacuucucugaugacaucgaacaacaggcugauaacaugauuacggagaugcuucagaaggaguauauggaacgccaggggaaaacaccucugggacucgucgaccuguuuguuuucagcaccuccuuuuaccugaucucuaucuuccuucaucucgugaagauuccgacccacagacauaucgugggcaaaagcugccccaagccucaccggcugaaucacaugggcauuuguuccugcgggcuguuuaaacaacccggagucccugugaaguggaagcgcuga

SEQ ID NO: 1751 - RNA, 1476 nt, Artificial Sequence
  derived and/or modified protein sequence (opt5) from LASV(Guinea Faranah;Clade IV)__AMZ00381__GPC
augggccagaucgugaccuucuuucaagaggucccccacguuauugaagaggugaugaacaucgugcugauugcccucagcauccuggcuguccuuaaggggcuguacaauguggccacaugcggacucauuggccugaucgcguuccuucugcucugugggagauccugcacgucuacccuguauaaaggaguuuacgaacugcaggcucucgagcugaacauggaaacacuuaauaugaccaugccucugagcuguacaaagaacaauucccaucacuauaucauggugggcaacgagaccgggcucgagcugacacuuaccaauacgucuauuaucaaccauaaauuuugcaaucugagcgacgcccacaagaaaaaccucuacaaucaugcccugauguccauuaucucuaccuuccaccugagcauuccgaacuuuaaucaguaugaagcuauguccugugauuucaacggaggcaagaucagcguccaguacaaucucucucacuccuaugccguggacgcugccaaccauugcggcacaguugcgaacgggauucugcaaaccuuuaugcggauggccuggggaggcagcuacaucgcucuugauucugggcacggaggcugggacuguaucauguccagcuaccaguaucuggugauucagaauacaaccugggaggaucauugccaguucucucgccccuccccuaucggguaccucggacugcuuagccaaagaacgcgggacauuuauaucucccgcagacugcucggcacauuuaccuggacacugucugauagcgaaggcaaggacacccccgggggauacugucugacccgguggaugcucauugaggccgagcugaaaugcuucggcaacacagcugucgccaaguguaaugaaaaacacgaugaggaauuuugcgacaugcuucgccuguucgauuuuaacaagcaggcgauccagagacucaaagccgaggcucagauguccauccaacugauuaauaaggccgugaacgcucuuaucaaugaccagcugauuaugaagaaccaccuccgggauaucauggggauuccuuauugcaauuacagcaaauauugguaccugaaccauacgaucaccggacgcacaucucugcccaaguguuggcucguguccaauggcagcuaccugaacgaaacccacuucucugacgacaucgagcagcaagccgauaauaugauuacagagaugcuucagaaagaauaucuggagagacaggggaagaccccucucggacuggucgaccuguucguuuuuagcacguccuucuaccuuaucucuauuuuucuccaucugaucaaaauuccgacacaccggcauaucgugggcaagagcugccccaaaccucaccgccugaaccacaugggcguguguuccugcgggcucuauaagcagcccggagucccugugagauggaagcgguga

SEQ ID NO: 1752 - RNA, 1476 nt, Artificial Sequence
  derived and/or modified protein sequence (opt5) from LASV(GUINEA Z-185a;Clade IV)__AMZ00377__GPC
augggccagaucgugaccuucuuucaagaggucccccacguuauugaagaggugaugaacaucgugcugauugcccucagcauccuggcuguccuuaaggggcuguacaauguggccacaugcggacucauuggccugguuacguuccuuuuucugugugggagauccugcucuaccagccucuauaaaggaguguacgaacugcagacacuggagcucaacauggaaacccugaauaugacaaugccucuuuccuguaccaagaacaauucucaucacuauaucauggucggcaacgagacagggcuggagcucacccugacgaauaccagcaucauuaaccauaaauucugcaaucuuuccgacgcgcacaagaaaaaccuguacgaucauacacucaugucuaucauuagcaccuuucaccuguccaucccgaauuucaaccaguaugaagcuaugagcugugacuuuaauggaggcaagauuucugugcaguacaaccugucccacagcuaugccguugaugccgcuaaucauugcggcacaguggccaacgggguccuccaaaccuucaugcggauggcuuggggaggcucuuacaucgcccuggacuccgggcgcggaaacugggauuguauuaugacgagcuaccaguaucuugugauccagaauacaaccugggaggaccacugccaguuuucuagacccuccccuaucggcuaccuggggcuccugagccaacggacacgcgauauuuauaucuccagacggcuucugggaaccuucaccuggacacucucugacagcgaaggcaaggauacgcccggcggguacugucugacccgcuggaugcugauugaggcggagcucaaaugcuuuggaaacacagccguggcuaaguguaaugaaaaacaugacgaggaguucugcgauaugcugagacuuuuugacuucaacaagcaggccauccagcggcugaaagcugaagcccagauguccauucaacucaucaauaaggcggucaacgcccugaucaaugaucagcuuauuaugaagaaccaucugcgcgacaucaugggcauuccuuauugcaauuacagcaaauauugguaccucaaccacaccguuacagggaagaccucucugcccaaauguuggcugguguccaauggaagcuaccucaacgaaacgcacuucucugacgauaucgagcagcaagcugacaaucugauuacagagaugcuucagaaggaauauauggagagacagggcaaaaccccucuggggcucguggaucuguuugucuucagcaccuccuuuuaccugaucucuaucuuccuucaccucgugaagauuccgacacaucggcacaucguuggaaaacccugcccuaagccccaucgccugaaccacaugggcauuuguagcugcggcguguauaagcagccugggguccccgugagauggaaacgguga

SEQ ID NO: 1753 - RNA, 1476 nt, Artificial Sequence
  derived and/or modified protein sequence (opt5) from MOPV/LASV reassortant(IGS-1;Clade IV)__AFY05576__GPC
augggccagaucgugaccuucuuucaagaggucccccacguuauugaagaggugaugaacaucgugcugauugcccucagcguccuggcugugcuuaaggggcuguacaauuucgccacaugcggacucguuggccuggugacguuucuucugcucugugggagauccugcaccacaucucuguauaaaggagucuacgaacugcagacccucgagcugaacauggaaacacuuaauaugaccaugccucugagcuguacaaagaacaauucccaucacuauaucauggugggcaacgagaccgggcucgagcugacgcuuaccaauacaucuauuaucaaccauaaauucugcaaucugagcgacgcgcacaagaaaaaccucuacgaucaugcucugauguccaucauuucuaccuuucaccugagcaucccgaauuucaaccaguaugaagccauguccugugacuuuaauggaggcaagauuagcguucaguacaaccucucucacuccuaugccggcgaugcugccaaucauugcgggacaguggcuaacggaguccugcaaaccuucaugcggauggccuggggcgggagcuacaucgcgcuugacucuggacgcggcaacugggauuguauuaugacguccuaccaguaucugaucauucagaauacaaccugggaggaccacugccaguuuagcagacccucuccuaucggguaccucggacugcuuucccaacggacacgcgauaucuauauuagcagacggcugcucggcaccuucaccuggacacuguccgacucugaaggcgaggauacgcccgggggauacugucugacccgcuggaugcucaucgaggccgaacugaagugcuuuggcaacacagcuguggccaaauguaaugagaagcaugacgaagaguucugcgauaugcuuagacuguuugacuucaacaaacaggcuauucagcggcucaaggccgaagcgcagaugagcauccaacugauuaauaaagccgugaacgcucuuaucaaugaucagcugaucaugaagaaccaccuccgcgacauuauggggaucccuuauugcaauuacuccaaguauugguaccugaaccacaccacaaccggaagaacgagccugcccaaauguuggcucgucucuaauggcuccuaccugaacgagacacauuucagcgacgauauugagcagcaagccgacaauaugaucaccgaaaugcuucagaaggaguauauggaacggcaggggaaaaccccucugggacucguugaucuguuuguguucucuaccagcuuuuaccugauuuccaucuuccuucaccucgugaagaucccgacacaucgccacauugucggcaaaucuugccccaagccucauagacugaaccacaugggcaucuguagcugcgggcuguauaaacagcccggagugccuguuaaguggaagcgguga

SEQ ID NO: 1754 - RNA, 1476 nt, Artificial Sequence
  derived and/or modified protein sequence (opt5) from MOPV/LASV reassortant(IGS-11;Clade IV)__AFY05588__GPC
augggccagaucgugaccuucuuucaagaggucccccacguuauugaagaggugaugaacaucgugcugauugcccucagcguccuggcugugcuuaaggggcuguacaauuucgccacaugcggacucguuggccuggugacguuucuucugcucugugggagauccugcaccacaucucuguauaaaggagucuacgaacugcagacccucgagcugaacauggaaacacuuaauaugaccaugccucugagcuguacaaagaacaauucccaucacuauaucauggugggcaacgagaccgggcucgagcugacgcuuaccaauacaucuauuaucaaccauaaauucugcaaucugagcgacgcgcacaagaaaaaccucuacgaucaugcucugauguccaucauuucuaccuuucaccugagcaucccgaauuucaaccaguaugaagccauguccugugacuuuaauggaggcaagauuagcguucaguacaaccucucucacuccuaugccggcgaugcugccaaucauugcgggacaguggcuaacggaguccugcaaaccuucaugcggauggccuggggcgggagcuacaucgcgcuugacucuggacgcggcaacugggauuguauuaugacguccuaccaguaucugaucauucagaauacaaccugggaggaccacugccaguuuagcagacccucuccuaucggguaccucggacugcuuucccaacggacacgcgaucuguauaucagcagacggcuccugggcaccuucaccuggacacuguccgacucugaaggcgaggauacgcccgggggauacugucucacccgcuggaugcugauugaggccgaacuuaagugcuuuggcaacacagcuguggccaaauguaaugagaagcaugacgaagaguucugcgauaugcugagacucuuugacuucaacaaacaggcuauccagcggcugaaggccgaagcgcagaugagcauucaacuuaucaauaaagccgugaacgcucugauuaaugaucagcucaucaugaagaaccaucugcgcgacaucauggggauuccuuauugcaauuacuccaaguauugguaccugaaccacaccacaaccggaagaacgagccuccccaaauguuggcuggucucuaauggcuccuaccuuaacgagacacacuucagcgacgauaucgagcagcaagccgacaauaugauuaccgaaaugcugcagaaggaguauauggaacggcaggggaaaaccccucucggacugguugaucuguuuguguucucuaccagcuuuuaccuuaucuccauuuuccuccaccuggugaagaucccgacacaucgccacaucgucggcaaaucuugccccaagccucauagacugaaccacaugggcauuuguagcugcgggcucuauaaacagcccggagugccuguuaaguggaagcgguga

SEQ ID NO: 1755 - RNA, 1476 nt, Artificial Sequence
  derived and/or modified protein sequence (opt5) from MOPV/LASV reassortant(IGS-12;Clade IV)__AFY05590__GPC
augggccagaucgugaccuucuuucaagaggucccccacguuauugaagaggugaugaacaucgugcugauugcccucagcguccuggcugugcuuaaggggcuguacaauuucgccacaugcggacucguuggccuggugacguuucuucugcucugugggagauccugcaccacaucucuguauaaaggagucuacgaacugcagacccucgagcugaacauggaaacacuuaauaugaccaugccucugagcuguacaaagaacaauucccaucacuauaucauggugggcaacgagaccgggcucgagcugacgcuuaccaauacaucuauuaucaaccauaaauucugcaaucugagcgacgcgcacaagaaaaaccucuacgaucaugcucugauguccaucauuucuaccuuucaccugagcaucccgaauuucaaccaguaugaagccauguccugugacuuuaauggaggcaagauuagcguucaguacaaccucucucacuccuaugccggcgaugcugccaaucauugcgggacaguggcuaacggaguccugcaaaccuucaugcggauggccuggggcgggagcuacaucgcgcuugacucuggacgcggcaacugggauuguauuaugacguccuaccaguaucugaucauucagaauacaaccugggaggaccacugccaguuuagcagacccucuccuaucggguaccucggacugcuuucccaacggacacgcgauauguauaucagcagacggcugcucggcaccuucaccuggacacuguccgacucugaaggcgaggauacgcccgggggauacugucugacccgcuggaugcucauugaggccgaacugaagugcuuuggcaacacagcuguggccaaauguaaugagaagcaugacgaagaguucugcgauaugcuuagacuguuugacuucaacaaacaggcuauccagcggcucaaggccgaagcgcagaugagcauucaacugaucaauaaagccgugaacgcucuuauuaaugaucagcugaucaugaagaaccaccuccgcgacaucauggggauuccuuauugcaauuacuccaaguauugguaccugaaccacaccacaaccggaagaacgagccugcccaaauguuggcucgucucuaauggcuccuaccugaacgagacacauuucagcgacgauaucgagcagcaagccgacaauaugauuaccgaaaugcuucagaaggaguauauggaacggcaggggaaaaccccucugggacucguugaucuguuuguguucucuaccagcuuuuaccugaucuccauuuuccuucaccucgugaagaucccgacacaucgccacaucgucggcaaaucuugccccaagccucauagacugaaccacaugggcauuuguagcugcgggcuguauaaacagcccggagugccuguuaaguggaagcgguga

SEQ ID NO: 1756 - RNA, 1476 nt, Artificial Sequence
  derived and/or modified protein sequence (opt5) from LASV(LM032-SLE-2010;Clade IV)__AIT17802__GPC
augggccagaucgugaccuucuuucaagaggucccccacguuauugaagaggugaugaacaucgugcugauugcccucagcauccuggcuguccuuaaggggcuguacaaucucgccacaugcggacuggugggccuuguuacguuccugcuccugugugggagauccugcaccacaucucuguauaaaggaguguacgaacuccagacccuggagcuuaacauggaaacacugaauaugaccaugccucucagcuguacaaagaacaauucccaucacuauauuauggucggcaacgagaccgggcuggagcuuacgcugaccaauacaucuaucaucaaccauaaauuuugcaaucucagcgacgcgcacaagaaaaaccuguacaaucaugcucugauguccauuaucucuaccuuccaccucagcauuccgaacuuuaaucaguaugaagccauguccugugauuucaacggaggcaagaucagcgugcaguacaaucugucucacuccuaugccggcgacgcugccaaccauugcgggacaguugcuaacggagugcuucaaaccuuuaugcggauggccuggggcgggagcuacauugcgcuggauucuggacgcgacagaugggauuguaucaugacguccuaccaguaucucauuauccagaauacaaccugggaggaccacugccaguucagccggcccucuccuaucggcuaccuggggcuucugucccaacgcacaagagauauuuauaucagccggcgccuccugggaaccuuuaccuggacacuguccgacucugaaggcaaggauacgcccggcggguacugucucaccagauggaugcugauugaggccgagcuuaaaugcuucggaaacacagcugucgccaaguguaaugaaaaacaugacgaggaauuuugcgauaugcugcgccucuucgacuuuaacaagcaggcuauccagcggcugaaagccgaggcgcagaugagcauucaacuuaucaauaaggccgugaacgcucugaucaaugaucagcucauuaugaagaaccaccugagagacaucaugggcauuccuuauugcaauuacuccaaauauugguaccugaaccacaccacaaccgggaagacgagccuccccaaauguuggcuggugucuaauggauccuaccuuaacgaaacacauuucagcgacgauaucgagcagcaagccgacaauaugauuaccgagaugcugcagaaggaauauauggagcggcucggcaaaaccccucuggggcuggucgaucuuuucguuuuuagcacaucuuucuaccucaucuccaucuuucugcaccuggugaagauuccgacccaucgccacaucgugggaagaucuugccccaaaccucaucggcucaaccacaugggcauuuguagcugcggccuguauaagcagcccggggucccugugaaguggaaacgcuga

SEQ ID NO: 1757 - RNA, 1476 nt, Artificial Sequence
  derived and/or modified protein sequence (opt5) from LASV(LM222-SLE-2010;Clade IV)__AIT17806__GPC
augggccagaucgugaccuucuuucaagaggucccccacguuauugaagaggugaugaacaucgugcugauugcccucagcauccuggcuguccuuaaggggcuguacaauuucgccacaugcggacucauuggccuggugacguuucuucugcucugugggagauccugcaccacaucucuguauaaaggaguuuacgaacugcagacccucgagcugaacauggaaacacuuaauaugaccaugccucugagcuguacaaagaacaauucccaucacuauaucauggugggcaacgagaccgggcucgagcugacgcuuaccaauacaucuaucauuaaccauaaauucugcaaucugagcgacgcgcacaagaaaaaccucuacgaucaugcucugauguccaucauuucuaccuuucaccugagcaucccgaauuucaaccaguaugaagccauguccugugacuuuaauggaggcaagauuagcguccaguacaaccucucucacuccuaugccggcgaugcugccaaucauugcgggacaguggcuaacggaguucugcaaaccuucaugcggauggccuggggcgggagcuacaucgcgcuugacucuggacgcggcaagugggauuguauuaugacguccuaccaguaucugaucauccagaacacaaccugggaggaccacugccaguuuagcagacccucuccuauuggguaccucggacugcuuucccaacggacacgcgauaucuauauuagcagacggcugcucggcaccuucaccuggacacuguccgacucugaaggcaaagauacgcccgggggauacugucugacccgcuggaugcucaucgaggccgagcugaagugcuuuggcaauacagcuguggccaaauguaacgaaaagcaugacgaggaguucugcgauaugcuuagacuguuugacuucaauaaacaggcuauucagcggcucaaggccgaagcgcagaugagcauccaacugaucaacaaggccgucaaugcucuuauuaacgaucagcugaucaugaaaaaucaccuccgcgacauuauggggaucccuuauugcaacuacuccaaguauugguaccugaaucacaccacaaccggaaaaacgagccugcccaaguguuggcucgugucuaacggcuccuaccugaaugaaacacauuucagcgacgauauugagcagcaagccgacaacaugaucaccgagaugcuucagaaagaauauauggagagacaggggaagaccccucugggacucguggaucuguuugucuucucuaccagcuuuuaccugaucuccauuuuccuucaccucguuaaaaucccgacacaucggcacauugugggcaagucuugccccaagccucaucgccugaaucacaugggcaucuguagcugcgggcuguauaaacagcccggagugccugucaaguggaaaagauga

SEQ ID NO: 1758 - RNA, 1476 nt, Artificial Sequence
  derived and/or modified protein sequence (opt5) from LASV(LM395-SLE-2009;Clade IV)__AIT17810__GPC
augggccagaucgugaccuucuuucaagaggucccccacguuauugaagaggugaugaacaucgugcugauugcccucagcauccuggcuguccuuaaggggcuguacaaucucgccacaugcggacuggugggccuuguuacguuccugcuccugugugggagauccugcaccacaucucuguauaaaggaguguacgaacuccagacccuggagcuuaacauggaaacacugaauaugaccaugccucucagcuguacaaaggacaacucccaucacuauauucgggucggcaaugagaccgggcuggagcuuacgcugaccaacacaucuauccucaaucauaaauuuugcaaccugagcgaugcgcacaagaaaaaucuguacgaccaugcucucauguccaucauuucuaccuuccaccugagcaucccgaacuuuaaucaguaugaagccauguccugugauuucaacggaggccgcauuagcgugcaguacaaucuuucucacuccuaugccggcgacgcugccaaccauugcgggacaguugcuaauggagugcugcaaaccuuuaugagaauggccuggggcgggagcuacaucgcgcucgauucuggacggggccgcugggacuguauuaugacguccuaccaguaucugaucauucagaacacaaccugggaggaucacugccaguucagcagacccucuccuaucggguaccuuggacugcucucccaacggacacgcgacaucuauauuagcagacggcugcugggcaccuuuaccuggacacucuccgauucugaaggcaaggacacgcccgggggauacugucugacccgcuggaugcuuaucgaggccgagcugaagugcuucggcaacacagcugucgccaaauguaaugaaaagcaugaugaggaauuuugcgacaugcucagacuguucgauuuuaacaaacaggcuauucagcggcuuaaggccgaggcgcagaugagcauccaacugauuaauaaagccgugaacgcucucaucaaugaccagcugaucaugaagaaccaucugcgcgacauuauggggaucccuuauugcaauuacuccaaguauugguaccucaaccacaccacaaccggaaaaacgagccugcccagauguuggcuugugucuaauggcuccuaccugaacgaaacacacuucagcgaugacauugagcagcaagccgauaauaugaucaccgagaugcuccagaaggaauauauggagcggcaggggaaaaccccucugggacuggucgaccuuuucguuuuuagcacaucuuucuaccucauuuccaucuuucugcaccuggugaagaucccgacccaucgccacguggucggcaaacccugcccuaagccccauagacucaaccacaugggcauuuguucuugcgggcuguauaaacagccuggagugcccguuaaguggaagcgguga

SEQ ID NO: 1759 - RNA, 1476 nt, Artificial Sequence
  derived and/or modified protein sequence (opt5) from LASV(LM765-SLE-2012;Clade IV)__AIT17814__GPC
augggccagaucgugaccuucuuucaagaggucccccacguuauugaagaggugaugaacaucgugcugauugcccucagcauccuggcuguccuuaaggggcuguacaauuucgccacaugcggacucgugggccugguuacguuucuucugcucugugggagauccugcaccacaucucuguauaaaggaguguacgaacugcagacccucgagcugaacauggaaacacuuaauaugaccaugccucugagcuguacaaagaacaauucccaucacuauauuauggucggcaacgagaccgggcucgagcugacgcuuaccaauacaucuaucaucgaccauaaauucugcaaccugagcgaugcgcaccggaagaaucucuacgaccaugcucugauguccauuaucucuaccuuucaccugagcauuccgaacuucaaucaguaugaagccauguccugugauuuuaacggaggcaaaaucagcgugcaguacaaucucucucacuccuaugccaaggacgcugccgaucauugcggcacaguugcuaacggggugcugcaaaccuucaugcgcauggccuggggaggcagcuacauugcgcuugacucugggagaggacggugggauuguaucaugacguccuaccaguaucugauuauccagaauacaaccugggaggaccacugccaguuuagccgccccucuccuaucggcuaccucgggcugcuuucccaaagaacacgggauauuuauaucagccgcagacugcucggaaccuucaccuggacacuguccgacucugaaggcaaggauacgcccggcggguacugucugacccgguggaugcucauugaggccgagcugaaaugcuuuggaaacacagcugucgccaaguguaacgaaaaacaugacgaggaguucugcgauaugcuucgccuguuugacuucaauaagcaggcuauccagagacucaaagccgaagcgcagaugagcauucaacugaucaacaaggccgugaaugcucuuaucaacgaccagcugauuaugaagaaucaccuccgggauaucaugggcauuccuuauugcaacuacuccaaauauugguaccugaaucacaccacaaccgggaagacgagccugcccaaauguuggcucgugucuaacggauccuaccugaaugaaacacauuucagcgacgauaucgagcagcaagccgacaacaugauuaccgagaugcuucagaaggaauauauggagcgccagggcaaaaccccucuggggcucgucgaucuguuuguuuucucuaccagcuuuuaccugaucuccaucuuccuucaccucgugaagauuccgacacauagacacaucgugggaaaacccugcccuaagccccaucggcugaaucacaugggcauuuguucuugcggccuguauaagcagccugggguccccgugaaauggaagcgcuga

SEQ ID NO: 1760 - RNA, 1476 nt, Artificial Sequence
  derived and/or modified protein sequence (opt5) from LASV(LM774-SLE-2012;Clade IV)__AIT17820__GPC
augggccagaucgugaccuucuuucaagaggucccccacguuauugaagaggugaugaacaucgugcugauugcccucagcauccuggcuguccuuaaggggcuguacaauuucgccacaugcggacucgugggccugguuacguuucuucugcucugugggagauccugcaccacaucucuguauaaaggaguguacgaacugcagacccucgagcugaacauggaaacacuuaauaugaccaugccucugagcuguacaaagaacaauucccaucacuauauuauggucggcaacgagaccgggcucgagcugacgcuuaccaauacaucuaucaucaaccauaaauucugcaaucugagcgacgcgcacaagaaaaaccucuacgaucaugcucugauguccauuaucucuaccuuucaccugagcauuccgaauuucaaccaguaugaagccauguccugugacuuuaauggaggcaagaucagcgugcaguacaaccucucucacuccuaugccgaggaugcugccaaucauugcggcacaguugcuaacggggugcugcaaaccuucaugcggauggccuggggaggcagcuacauugcgcuugacucugggcgcggaaacugggauuguaucaugacguccuaccaguaucugauuauccagaauacaaccugggaagaccacugccaguuuagcagacccucuccuaucggcuaccucgggcugcuuucccaacggacacgcgauauuuauaucagcagacggcugcucggaaccuucaccuggacacuguccgacucugagggcaaggauacgcccggcggguacugucugacccgcuggaugcucauugaggccgaacugaaaugcuuuggaaacacagcugucgccaaguguaaugagaaacaugacgaagaguucugcgauaugcuuagacuguuugacuucaacaagcaggcuauccagcggcucaaagccgaagcgcagaugagcauucaacugaucaauaaggccgugaacgcucuuaucaaugaucagcugauuaugaagaaccaccuccgcgacaucaugggcauuccuuauugcaauuacuccaaauauugguaccugaaccacaccacaaccgggaagacgagccugcccaaauguuggcucgugucuaauggauccuaccugaacgagacacauuucagcgacgauaucgagcagcaagccgacaauaugauuaccgaaaugcuucagaaggaguauauggaaagacagggcaaaaccccucuggggcucgucgaucuguuuguuuucucuaccagcuuuuaccugaucuccaucuuccuucaccucgugaagauuccgacacaucggcacaucgugggaaaaucuugccccaagccucaucgccugaaccacaugggcauuuguagcugcggccuguauaagcagcccggggucccugugaaauggaagagauga

SEQ ID NO: 1761 - RNA, 1476 nt, Artificial Sequence
  derived and/or modified protein sequence (opt5) from LASV(LM776-SLE-2012;Clade IV)__AIT17824__GPC
augggccagaucgugaccuucuuucaagaggucccccacguuauugaagaggugaugaacaucgugcugauugcccucagcauccuggcuguccuuaaggggcuguacaauuucgccacaugcggacucgugggccugguuacguuucuucugcucugugggagauccugcaccacaucuguguauaaaggagucuacgaacugcagacccuggagcucaacauggaaacacugaauaugaccaugccucuuagcuguacaaagaacaauucccaucacuauauuauggugggcaacgagaccgggcuggagcucacgcugaccaauacaucuaucaucaaccauaaauucugcaaucuuagcgacgcgcacaagaaaaaccuguacgaucaugcucucauguccauuaucucuaccuuucaccugagcauuccgaauuucaaccaguaugaagccauguccugugacuuuaauggaggcaagaucagcguucaguacaaccugucucacuccuaugccggcgaugcugccaaucauugcgggacaguggcuaacggaguccuccaaaccuucaugcggauggccuggggcgggagcuacauugcgcuggacucuggacacggcaagugggauuguaucaugacguccuaccaguaucuuauuauccagaacacaaccugggaggaccauugccaguuuagccgccccucuccuaucggguaccugggacuccugucccaaagaacacgggauauuuauaucagccgcagacuucugggcaccuucaccuggacacucuccgacucugaaggcaaagauacgcccgggggauacugucugacccgguggaugcugauugaggccgagcucaagugcuuuggcaauacagcuguggccaaauguaacgaaaagcacgacgaggaguucugcgauaugcugcgccuuuuugacuucaauaaacaggcuauccagagacugaaggccgaagcgcagaugagcauucaacucaucaacaaggccgugaaugcucugaucaacgaucagcuuauuaugaaaaaucaucugcgggacaucauggggauuccuuauugcaacuacuccaaguauugguaccucaaucacaccacaaccggaaaaacgagccugcccaaguguuggcuggucucuaacggcuccuaccucaaugaaacacacuucagcgacgauaucgagcagcaagccgacaacaugauuaccgagaugcugcagaaagaauauauggagcgccaggggaagaccccucuuggacugguugaucucuuuguguucucuaccagcuuuuaccugaucuccaucuuccugcaucuugugaaaauuccgacacacagacauaucgucggcaagucuugccccaagccucaccggcucaaucacaugggcauuuguagcugcgggcuguauaaacagcccggagugccuguucgcuggaagagauga

SEQ ID NO: 1762 - RNA, 1476 nt, Artificial Sequence
  derived and/or modified protein sequence (opt5) from LASV(LM778-SLE-2012;Clade IV)__AIT17828__GPC
augggccagaucgugaccuucuuucaagaggucccccacguuauugaagaggugaugaacaucgugcugauugcccucagcauccuggcuguccuuaaggggcuguacaauuucgccacaugcggacucgugggccugguuacguuucuucugcucugugggagauccugcaccacaucucuguauaaaggagacuacgaacugcagacccucgagcugaacauggaaacacuuaauaugaccaugccucugagcuguacaaagaacaauucccaucacuauauuauggugggcaacgagaccgggcucgagcugacgcuuaccaauacaucuaucaucaaccauaaauucugcaaucugagcgaugcgcacaagaaaaaccucuacgaccaugcucugauguccauuaucucuaccuuucaccugagcauuccgaauuucaaccaguaugaagccauguccugugauuuuaauggaggcaagaucagcguccaguacaaccucucucacuccuaugccggcgacgcugccaaucauugcgggacaguggcuaacggaguucugcaaaccuucaugcggauggccuggggcgggagcuacauugcgcuugauucuggacgcggcaacugggacuguaucaugacguccuaccaguaucugauuauccagaauacaaccugggaggaucacugccaguuuagcagacccucuccuaucggguaccucggacugcuuucccaacggacacgcgacauuuauaucagcagacggcugcucggcaccuucaccuggacacuguccgauucugaaggcaaggacacgcccgggggauacugucugacccgcuggaugcucauugaggccgagcugaaaugcuuuggcaacacagcuguggccaaguguaaugaaaaacaugaugaggaguucugcgacaugcuuagacuguuugauuucaacaagcaggcuauccagcggcucaaagccgaagcgcagaugagcauucaacugaucaauaaggccgucaacgcucuuaucaaugaccagcugauuaugaagaaccaccuccgcgacaucauggggauuccuuauugcaauuacuccaaauauugguaccugaaccacaccacaaccggaaagacgagccugcccaaauguuggcucgugucuaauggcuccuaccugaacgaaacacauuucagcgaugacaucgagcagcaagccgauaauaugauuaccgagaugcuucagaaggaauauauggagagacaggggaaaaccccucugggacucguggaccuguuugucuucucuaccagcuuuuaccugaucuccaucuuccuucaccucguuaagauuccgacacaucggcacaucgugggcaaaucuugccccaagccucaucgccugaaccacaugggcauuuguagcugcgggcuguauaagcagcccggagugccugucaaauggaagagauga

SEQ ID NO: 1763 - RNA, 1476 nt, Artificial Sequence
  derived and/or modified protein sequence (opt5) from LASV(Mad39;Clade IV)__ANH09722__GPC
augggccagaucgugaccuucuuucaagaggucccccacguuauugaagaggugaugaacaucgugcugauugcccucagcauccuggcuguccuuaaggggcuguacaauguggccacaugcggacucauuggccugguuacguuccuucugcucugugggagauccugcaccacaacccuguauaaaggaguguacgaacugcaggcgcucgagcugaacauggaaacacuuaauaugaccaugccucugucuuguacaaagaacaauagccaucacuauauccgggucggcaacgagaccgggcucgagcugacgcuuaccaauacaucccugaucaaccauaaauuuugcaaucucucugacgcucacaagaaaaaccuguacgaucaugcccugaugagcauuaucuccaccuuccaccucucuauuccgaauuuuaaccaguaugaagccaugagcugugacuucaaugauggaaagaucuccgugcaguacaaccugagccacacauaugcuggcgacaccgccaaucauugcggcacgguugcuaacggggugcuucaaacauuuaugcgcauggccuggggaggcucuuacauugcgcuggauuccgggagaggaggcugggacuguaucaugaccagcuaccaguaucucauuauccagaacacaaccugggaggaucacugccaguucucucggcccuccccuaucggguaccugggacuucugagccaacgcaccagagacauuuauaucucucggcgccuccugggcacauuuacguggacccuguccgauagcgaaggcaaggacacacccgggggauacugucucaccagauggaugcugauugaggccgagcuuaaaugcuucggcaauacagcugucgccaaguguaacgaaaaacaugaugaggaauuuugcgacaugcugcgccucuucgauuuuaauaagcaggcuauccagcggcugaaagccgaggcgcagauguccauucaacuuaucaacaaggccgugaaugcucugaucaacgaccagcucauuaugaagaaucaccugagagacaucauggggauuccuuauugcaacuacucuaaauauugguaccugaaucacaccgugacgggaaagacaagccuccccaaauguuggcuggucuccaacggcagcuaccuuaaugaaacccauuucucugaugacaucgagcagcaagccgauaacaugauuaccgagaugcugcagaaggaauauauggagcggcaggggaaaacaccucucggacugguugaccuguucguguuuuccaccagcuucuaccuuaucucuaucuuucuccaccuggugaagauuccgacacaucgccacgucgugggcaaacccugcccuaagccccauagacugaaucacaugggcaucuguagcugcggguucuauaagcagccuggaguucccgugcgguggaaacgcuga

SEQ ID NO: 1764 - RNA, 1476 nt, Artificial Sequence
  derived and/or modified protein sequence (opt5) from LASV(Mad41;Clade IV)__ANH09724__GPC
augggccagaucgugaccuucuuucaagaggucccccacguuauugaagaggugaugaacaucgugcugauugcccucagcauccuggcuguccuuaaggggcuguacaauguggccacaugcggacucauuggccugguuacguuccuucugcucugugggagauccugcaccacaacccuguauaaaggaguguacgaacugcaggcgcucgagcugaacauggaaacacuuaauaugaccaugccucugucuuguacaaagaacgacagccaucacuauaucauggucggcaaugagaccgggcucgagcugacgcuuaccaacacauccaucauuucucauaaauuuugcaaucugagcgaugcucacaagcagaaccucuacgaccaugcccugauguccaucauuucuaccuuccaccugagcaucccgaauuuuaaccaguaugaagccauguccugugauuucaauggaggcaaaauuagcgugcaauacaaccucucucacacauaugcuggcgacgccgcuaaucauugcgggaccguugccaacggagugcugcagacguuuaugcggauggcguggggcggguccuacaucgcccuugauagcggacgcggcgggugggacuguauuaugacaucuuaccaguaucugaucauccagaauaccacaugggaggaucacugccaauucuccagacccagcccuauuggauaccucggccugcuuucucagcggacccgcgacaucuauauuuccagacggcugcucggcaccuuuacauggacgcugagcgauuccgaagggaaggacacccccggaggcuacugucugacacgcuggaugcucaucgaggcugagcugaagugcuucgggaacaccgccgucgcuaaauguaacgaaaagcaugaugaggaauuuugcgacaugcuuagacuguucgauuuuaauaaacaggccauucagcggcucaaggcggaggcccaaaugucuauccagcugaucaacaaagcugugaaugcccuuauuaacgaccagcugaucaugaagaaucaccuccgcgacauuaugggaaucccuuauugcaacuacagcaaguauugguaccugaaucacacagugaccggcaaaacgucccugcccaaguguuggcucgucagcaacgggucuuaccugaaugaaacacauuucuccgaugacauugagcaacaggcugauaacaugaucaccgagaugcuucagaaagaauauauggagagacagggaaagaccccucugggccucguugaccuguucguguuuagcacaucuuucuaccugaucagcauuuuucuucaccucgugaaaaucccgacccaucggcacgucgugggcaagcccugcccuaaaccccaucgccugaaucacauggggauuuguuccugcggauucuauggccaaccugggguucccgugagauggaagcgguga

SEQ ID NO: 1765 - RNA, 1476 nt, Artificial Sequence
  derived and/or modified protein sequence (opt5) from LASV(Mad63;Clade IV)__ANH09728__GPC
augggccagaucgugaccuucuuucaagaggucccccacguuauugaagaggugaugaacaucgugcugauugcccucagcguccuggcugugcuuaaggggcuguacaauguugccacaugcggacucaucggccuggugacguuccuucugcucugugggagauccugcaccacaacccuguauaaaggagucuacgaacugcaggcgcucgagcugaacaugggcacacuuaauaugaccaugccucugucuuguacaaagaacaauagccaucacuauauuaugguggggaacgaaaccggacucgagcugacgcuuaccaauacauccaucaucaaccauaaauuuugcaaucugucugacgcucacaagaaagaucucuacgaccaugcccugaugagcauuaucuccaccuuccaccugucuguuccgaacuuuaaucaguaugaggccaugagcugugauuucaacggcggcaagauuuccgugcaguacaaucucagccacgcuuaugccggggacacagcuaaccauugcggaaccgucgccaauggcgugcugcaaacguuuaugcggauggcguggggagggucuuacaucgcccuugauuccggccgcgggggaugggacuguauuaugacaagcuaccaguaucugaucauucagaacaccacaugggaagaucacugccaguucucuagacccuccccuaucggcuaccucggccugcuuagccaacggacccgcgacaucuauauuucuagacggcugcucgggaccuuuacauggacgcuguccgauagcgagggagaauacacccccggcggguauugucugacacgcuggaugcucaucgaggcugagcugaagugcuucggaaacaccgccguggcuaaauguaaugaaaagcaugacgaggaauuuugcgauaugcuuagacuguucgacuuuaacaaacaggccauucagcggcucaaggcggaggcccagauguccauccaacugauuaauaaagcugucaacgcccuuaucaaugaucagcugaucaugaagaaccaccuccgcgacauuaugggcaucccuuacugcaauuauucuaaguacugguaccugaaccacacaguuaccgggaaaacgagccugcccaaguguuggcucguguccaauggaagcuaucugaacgaaacacauuucucugacgauauugagcagcaagcugacaauaugaucaccgagaugcuucagaaagaauacauggagagacagggcaagaccccucugggccucguggaucuguucgucuuuuccaccagcuucuaucugauuucuaucuuucuucaccucgugaaaaucccgacacaucggcacguuguggggaagcccugcccuaaaccccaucgccugaaccacaugggaauuuguagcugcggcuucuacaagcagccugggguccccgugagauggaagcgguga

SEQ ID NO: 1766 - RNA, 1476 nt, Artificial Sequence
  derived and/or modified protein sequence (opt5) from LASV(Mad69;Clade IV)__ANH09730__GPC
augggccagaucgugaccuucuuucaagaggucccccacguuauugaagaggugaugaacaucgugcugauugcccucagcguccuggcugugcuuaaggggcuguacaauguugccacaugcggacucaucggccuggugacguuccuucugcucugugggagauccugcaccacaacccuguauaaaggagucuacgaacugcaggcgcucgagcugaacauggaaacacuuaauaugaccaugccucugucuuguacaaagaacaauagccaucacuauauuauggugggcaacgagaccgggcucgagcugacgcuuaccaauacauccaucaucaaccauaaauuuugcaaucugucugacgcucacaagaaaaaccucuacgaucaugcccugaugagcauuaucuccaccuuccaccugucuauuccgaauuuuaaccaguaugaagccaugagcugugacuucaaucagggaaagaucuccguucaauacaaccucagccacgcuuaugccggcgaugcugccaaucauugcggcacaguggcgaacgggguccugcagaccuuuaugcggauggccuggggaggcucuuacauugcucuugacuccgggcgcggaggcugggauuguaucaugacgagcuaccaguaucugauuauccagaacacaaccugggagaaucacugccaauucucuagacccuccccuaucggguaccucggacugcuuagccagcggacacgcgacauuuauaucucuagacggcugcucggcaccuuuaccuggacacuguccgauagcgaaggcaaggggacgcccggaggcuacugucugacccgcuggaugcucauugaggccgagcugaaaugcuucgggaacacagcuguggccaaguguaaugaaaaacaugacgaggaauuuugcgauaugcuuagacuguucgacuuuaacaagcaggcgauccagcgguucaaagccgaggcucaaauguccauucagcucaucaauaaggccgugaacgcucugaucaaugaucagcuuauuaugaagaaccaucugcgcgacaucaugggcauuccuuauugcaauuacucuaaauauugguaccucaaccacaccgucacaggaaagaccagccugcccaaauguuggcugguuuccaaugggagcuaccucaacgaaacgcacuucucugaugacaucgagcaacaggccgacaauaugauuacagagaugcugcagaaggaauauauggagagacagggacggaccccucuuggccugguggaucucuuuguguucuccaccagcuuuuaccugaucucuaucuuccugcaccuugucaaaauuccgacacaucgccacgugguuggcaagcccugcccuaaaccccauagacucaaccacauggggaucuguagcugcggauuuuauaagcaaccuggcgugcccguccgguggaagcgcuga

SEQ ID NO: 1767 - RNA, 1476 nt, Artificial Sequence
  derived and/or modified protein sequence (opt5) from LASV(Mad83;Clade IV)__ANH09732__GPC
augggccagaucgugaccuucuuucaagaggucccccacguuauugaagaggugaugaacaucgugcugauugcccucagcauccuggcuguccuuaaggggguguacaauguugccacaugcggacugauuggccucgugacguuccugcuucuguccgggagaucuuguaccacaaccaucuauaaaggagucuacgaacuccaggcgcuggagcugaacauggaaacacucaauaugaccaugccucugagcugcacaaagaacaauucccaucacuauaucauggugggcaacgagaccgggcuugagcugacgcucaccaauacaucuauuaucaaccauaaauuuuguaaucugagcgacgcucacaagaaaaaccuuuacgaucaugcccugauguccauuaucucuaccuuccaccucagcauuccgaauuuuaaccaguaugaagccauguccugcgacuucaauggaggcaagaucagcguucaguacaaccugucucacacauaugcuggcgaugccgcuaaucauugugggaccguggccaacggaguccugcaaacguuuaugcggauggcguggggcggguccuacauugcccucgacagcggacacggcgggugggauugcaucaugacaucuuaccaguaucugaucauucagaacaccacaugggagaaucauugucaguucucccgccccagcccuaucggauaccuuggccugcucucucaaagaacccgggacauuuauaucucccgcagacugcuuggcaccuuuacauggacgcugagcgauuccgaagggaaggacacccccggaggcuacugccucacacgguggaugcugauugaggcugagcugaaauguuucgggaacaccgccguggcuaagugcaaugaaaaacacgaugaggaauuuugugacaugcuccgccuguucgauuuuaacaagcaggccauccagagacuuaaagcggaggcccagaugucuauccaacugauuaauaaggcugugaacgcccucaucaaugaccagcugauuaugaagaaccaccuucgggauaucaugggcauuccuuauugcaauuacagcaaauauugguaccugaaccauacagucaccggaaagacgucccuccccaaaugcuggcugguuagcaaugggucuuaccugaacgaaacacacuucuccgacgacaucgagcagcaagcugauaauaugaucaccgagaugcuccagaaggaauauauggagcgccagggaaaaaccccucugggccuuguggaccuguucguguuuagcacaucuuucuaccucauuagcaucuuucugcaucuggucaagauuccgacccacagacauaucgugggcaaacccuguccuaagccccaccggcuuaaccacauggggauuugcuccuguggauucuauaagcagccuggcguucccgugcgcuggaaaagauga

SEQ ID NO: 1768 - RNA, 1476 nt, Artificial Sequence
  derived and/or modified protein sequence (opt5) from LASV(NL;Clade IV)__AAO59512__GPC
augggccagaucgugaccuucuuucaagaggucccccacguuauugaagaggugaugaacaucgugcugauugcccucagcauccuggcuguccuuaaggggcuguacaauuucgccacaugcggacucgugggccugguugcguuucuucugcucugugggagauccugcacgucuagccuguauaaaggaguguacgaacugcagacccucgagcugaacauggaaacacuuaauaugaccaugccucuguccuguacaaagaacaauucucaucacuauauucgggucggcaacgagaccgggcucgagcugacacuuaccaauacgagcaucaucaaccauaaauucugcaaucuguccgacgcucacaagaaaaaccucuacgaucaugcccugaugucuauuaucagcaccuuucaccuguccauuccgaauuucaaccaguaugaagccaugagcugugacuuuaauggaggcaagaucucugugcaguacaaccucucccacagcuaugcuguugaugccgcuaagcauugcggcacaguggccaaugggguccugcaaaccuucaugcgcauggcguggggaggcucuuacauugcccuugacuccgggcacggaagaugggauuguaucaugacaagcuaccaguaucugauuauccagaacaccacgugggaggaccauugccaguuuucucggcccuccccuaucggcuaccucgggcugcuuagccaacgcacaagagauauuuauaucucccggcgccugcucggaaccuucacauggacccugucugacagcgaaggcaaagauacccccggcggguacugucugacaagauggaugcucauugaggcugagcugaagugcuuuggaaacacggccguggcuaaauguaaugaaaagcacgacgaggaguucugcgauaugcuucggcuguuugacuucaacaaacaggccauccagcgccucaagaccgaagcgcagauguccauucaacugaucaauaaggccgugaacgcucuuaucaaugaucagcugauuaugaaaaaccaccucagagacaucaugggcauuccuuauugcaauuacagccgguauugguaccugaaccauacaaccacagggaagaccucucugcccaaauguuggcucgucuccaauggaagcuaccugaacgaaacgcgcuucucugacgauaucgagcagcaagccgacaauaugauuacagagaugcuucagaaggaauauauggagagacagggcaaaaccccucuggggcucguugaucuguuuguguucagcaccuccuuuuaccugaucucuaucuuccuucaccucgugaagauuccgacacaucggcacaucgucggaaaaagcugccccaagccucaucgccugaaccacaugggcauuuguuccugcggccuguauaagcagcccggggugccuguuaaauggaagagauga

SEQ ID NO: 1769 - RNA, 1476 nt, Artificial Sequence
  derived and/or modified protein sequence (opt5) from LASV(Z0947-SLE-2011;Clade IV)__AIT17840__GPC
augggccagaucgugaccuucuuucaagaggucccccacguuauugaagaggugaugaacaucgugcugauugcccucagcauccuggcuguccuuaaggggcuguacaauuucgccacaugcggacucgugggccugguuacguuucuucugcucugugggagauccugcaccauuucucuguauaaaggaguguacgaacugcagacacucgagcugaacauggaaacccuuaauaugacaaugccucugagcuguaccaagaacaauucccaucacuauaucauggucggcaacgagacagggcucgagcugacccuuacgaauaccucuaucauuaaccauaaauucugcaaucugagcgacgcgcacaagaaaaaccucuacgaucaugcucugauguccaucauuucuacauuucaccugagcaucccgaauuucaaccaguaugaagccauguccugugacuuuaauggaggcaagauuagcgugcaguacaaccucucucacuccuaugccggcgaugcugccaaucauugcgggaccguugcuaacggagugcugcaaacauucaugcggauggccuggggcgggagcuacaucgcgcuugacucuggacgcgauagaugggacuguauuaugaccuccuaccaguaucugaucauccagaacacgacaugggaggaucacugccaguuuagccggcccucuccuauuggcuaccucgggcugcuuucccaacgcaccagagacaucuauauuagccggcgccugcucggaacauucaccuggacccuguccgauucugaaggcaaggacacacccggcggguacugucugacgagauggaugcucaucgaggccgagcugaaaugcuuuggaaauaccgcugucgccaaguguaacgaaaaacaugaugaggaguucugcgacaugcuucggcuguuugauuucaauaagcaggcuauucagcgccucaaagccgaagcgcagaugagcauccaacugaucaacaaggccgugaaugcucuuauuaacgaccagcugaucaugaagaaucaccucagagacauuaugggcaucccuuauugcaacuacuccaaauauugguaccugaaucacacaaccacagggaagaccagccugcccaaauguuggcucgugucuaacggauccuaccugaaugaaacgcauuucagcgaugacauugagcagcaagccgauaacaugaucacagagaugcuucagaaggaauauauggagcggcagggcaaaaccccucuggggcucgucgaccuguuuguuuucucuaccagcuuuuaccugaucuccauuuuccuucaccucgugaagaucccgacacaucgccacauugugggaaaacccugcccuaagccccauagacugaaucacaugggcaucuguucuugcggccuguauaagcagccugggguccccgugaaauggaagcgguga

SEQ ID NO: 1770 - RNA, 1476 nt, Artificial Sequence
  derived and/or modified protein sequence (opt5) from LASV(Z0948-SLE-2011;Clade IV)__AIT17844__GPC
augggccagaucgugaccuucuuucaagaggucccccacguuauugaagaggugaugaacaucgugcugauugcccucagcauccuggcuguccuuaaggggcuguacaauuucgccacaugcggacucgugggccugguuacguuucuucugcucugugggagauccugcaccauuucucuguauaaaggaguguacgaacugcagacacucgagcugaacauggaaacccuuaauaugacaaugccucugagcuguaccaagaacaauucccaucacuauaucauggucggcaacgagacagggcucgagcugacccuuacgaauaccucuaucauuaaccauaaauucugcaaucugagcgacgcgcacaagaaaaaccucuacgaucaugcucugauguccaucauuucuacauuucaccugagcaucccgaauuucaaccaguaugaagccauguccugugacuuuaauggaggcaagauuagcgugcaguacaaccucucucacuccuaugccggcgaugcugccaaucauugcgggaccguugcuaacggagugcugcaaacauucaugcggauggccuggggcgggagcuacaucgcgcuugacucuggacgcgauagaugggacuguauuaugaccuccuaccaguaucugaucauccagaacacgacaugggaggaucacugccaguuuagccggcccucuccuauuggcuaccucgggcugcuuucccaacgcaccagagacaucuauauuagccggcgccugcucggaacauucaccuggacccuguccgauucugaaggcaaggacacacccggcggguacugucugacgagauggaugcucaucgaggccgagcugaaaugcuuuggaaauaccgcugucgccaaguguaacgaaaaacaugaugaggaguucugcgacaugcuucggcuguuugauuucaauaagcaggcuauucagcgccucaaagccgaagcgcagaugagcauccaacugaucaacagagccgugaaugcucuuauuaacgaccagcugaucaugaagaaucaccuccgggacauuaugggcaucccuuauugcaacuacuccaaguauugguaccugaaucacacaaccacagggaaaaccagccugcccaaguguuggcucgugucuaacggauccuaccugaaugaaacgcauuucagcgaugacauugagcagcaagccgauaacaugaucacagagaugcuucagaaagaauauauggagcgccagggcaagaccccucuggggcucgucgaccuguuuguuuucucuaccagcuuuuaccugaucuccauuuuccuucaccucgugaaaaucccgacacauagacacauugugggaaagcccugcccuaaaccccaucggcugaaucacaugggcaucuguucuugcggccuguauaagcagccugggguccccgugaaguggaaacgcuga

SEQ ID NO: 1771 - RNA, 1476 nt, Artificial Sequence
  derived and/or modified protein sequence (opt5) from LASV(Z148;Clade IV)__AAT49008__GPC
augggccagaucgugaccuucuuucaagaggucccccacguuauugaagaggugaugaacaucgugcugauugcccucagcauccuggcuguccuuaaggggcuguacaauguggccacaugcggacucauuggccugguuacguuccuuuuucugugugggagauccugcucuaccacacucuauaaaggaguguacgaacugcagacccuggagcucaacauggaaacacugaauaugaccaugccucuuagcuguacaaagaacaauucccaucacuauaucauggucggcaacgagaccgggcuggagcucacgcugaccaauacaucuaucauuaaccauaaauucugcaaucuuagcgacgcgcacaagaaaaaccuguacgaucauacccucauguccaucauuucuacauuucaccugagcaucccgaauuucaaccaguaugaagcuauguccugugacuuuaauggaggcaagauuagcgugcaguacaaccugucucacuccuaugccguugaugccgcuaaucauugcggcaccguggccaacgggguccuccaaacguucaugcggauggcuuggggaggcagcuacaucgcccuggacucugggcgcggaaacugggauuguauuaugacauccuaccaguaucuuaucauccagaauaccacaugggaggaccacugccaguuuagcagacccucuccuauuggcuaccuggggcuccugucccaacggacccgcgauaucuauauuagcagacggcuucugggaaccuucacauggacgcucuccgacucugaaggcaaggauacccccggcggguacugucugacacgcuggaugcugaucgaggcggagcucaaaugcuuuggaaacaccgccguggcuaaguguaaugaaaaacaugacgaggaguucugcgauaugcugagacuuuuugacuucaacaagcaggccauucagcggcugaaagcugaagcccagaugagcauccaacucaucaauaaggcggugaacgcccugauuaaugaucagcuuaucaugaagaaccaucugcgcgacauuaugggcaucccuuauugcaauuacuccagauauugguaccucaaccacacagucaccgggaaaacgagccugcccaaguguuggcugguuucuaauggauccuaccucaacgaaacacacuucagcgacgauauugagcagcaagcugacaaucugaucaccgagaugcuucagaaagaauauauggagcggcagggcaagaccccucuggggcucguggaucuguuuguguucucuaccagcuuuuaccugaucuccauuuuccuucaccucgucaaaaucccgacacaucgccacauugugggaaagcccugcccuaaaccccauagacugaaccacaugggcaucuguucuugcggcguuuauaagcagccuggggugcccguccgguggaagcgcuga

SEQ ID NO: 1772 - RNA, 1476 nt, Artificial Sequence
  derived and/or modified protein sequence (opt5) from LASV(Bamba-R114;Clade V)__AHC95555__GPC
augggccagaucgugaccuucuuucaagaggucccccacguuauugaagaggugaugaacaucgugcugauugcccucagcauccuggcuguccuuaaggggcuguacaauauugccacaugcggacucaucggccuggugacguuccuucugcucugugggagauccugcucuagcaaccuguauaaaggaguuuacgaacugcagucccucgaccugaauauggagacccuuaacaugacaaugccucugucuuguaccaagaauaacagccaucacuauauccgggcgggcaaugaaacagggcucgagcugacccuuacaaacaccucccugauuaaucauaaauuuugcaaccucucugaugcucacaagaaaaaucuguacgaccauacgcugaugagcaucauuuccaccuuccaccucagcaucccgaacuuuaaucaguaugaggccaugucuugugauuucaacggaggcaagauuuccgugcaguacaaucugagccacgccuaugcuaucgacgccgcugaacauugcggcacagucgccaacggggugcuucaaaccuuuaugcgcauggcguggggaggcucuuacauugcccuggauuccgggagaggaaacugggacuguaucaugacaagcuaccaguaucucaucauucagaauaccacgugggaggaucacugccaguucucucggcccuccccuaucggcuaccuggggcuucugagccaacgcacaagagacauuuauaucucccggcgccuccugggaaccuuuacauggacccugucugauagcgaaggcaacgcuacccccggcggguacugucucacaagauggaugcugauugaggccgagcuuaagugcuucggaaauacggcuguugccaaauguaacgaaaagcaugacgaggaauuuugcgauaugcugcggcuguucgacuuuaauaaacaggcgaucucccgccucaagagcgaggcccagaugucuauccagcuuauuaacaaagcugugaaugcccugaucaacgaucaacucauuaugaagaaucaccugagagacaucaugggcauuccuuauugcaacuacuccaaguauugguaccugaaucacaccaucacagggcggaccagccuccccaaauguuggcuggucucuaacggaagcuaccuuaaugaaacacauuucuccgacgauaucgagcagcaggcugacaacaugauuaccgagaugcugcaaaaggaauauauggagcgccagggcaaaacgccucucgggcugguggaucuguucguguuuucuaccagcuucuaccuuaucuccauuuuucuccaccuggucaagaucccgacacauagacacauuguuggaaaacccugcccuaagccccaucggcugaaucacaugggcaucuguagcugcggccucuauaaacagccuggggugccccugaaguggaagcgcuga

SEQ ID NO: 1773 - RNA, 1476 nt, Artificial Sequence
  derived and/or modified protein sequence (opt5) from LASV(Komina-R16;Clade V)__AHC95557__GPC
augggccagaucgugaccuucuuucaagaggucccccacguuauugaagaggugaugaacaucgugcugauugcccucagcauccuggcuguccuuaaggggcuguacaauauugccacaugcggacucaucggccuggugacguucuuucuucugugugggagauccugcucuagcaaccucuauaaaggaguuuacgaacugcagucccuggaccucaauauggagacccugaacaugacaaugccucuuucuuguaccaagaauaacagccaucacuauauccgggugggcaaugaaacagggcuggagcucacccugacaaacaccucccuucugaaucauaaauucugcaaccucucugaugcgcacaagcgcaaucuguacgaccaugcucugaugagcauuaucuccacguuucaccucagcauuccgaacuucaaucaguaugaggccaugucuugugauuuuaacggaggcaaaaucaccguccaguacaaucugucccacagcuaugccggcgacacagcuaagcauugcgggaccauugccaacggagugcuucaaacauucaugagaauggcuuggggcgggucuuacaucgcccuggauuccggacacggcaacugggacuguauuaugaccagcuaccaguaucucaucauccagaauacgacaugggaagaucauugccaguuuucucggcccuccccuauuggguaccugggacuucugagccaacgcaccagagacaucuauauuucccggcgccuccugggcacauucaccuggacccugucugauagcgagggcaacgcgacacccgggggauacugucucacgagauggaugcugaucgaagccgagcuuaagugcuuuggcaauaccgcuguugccaaauguaacgagaagcacgacgaagaguucugcgauaugcugcggcucuuugacuucaauaaacaggcuauuucccgccugagaagcgaagcccagaugucuauccagcuuaucaacaaggcggugaaugcccugauuaacgaucaacucaucaugaaaaaucaucugcgggacauuauggggaucccuuauugcaacuacuccaaguauugguaccugaaucacacagucaccggacgcacaagccuccccaaguguuggcuggugucuaacggcagcuaccuuaaugagacccacuucuccgacgauauugaacagcaggcugacaacaugaucacggagaugcugcaaaaagaguauauggauagacaggggaagacaccucucggacugguggaccuguuugucuucucuaccagcuuuuaccuuaucuccauuuuccuccaucugguuaaaaucccgacccaccggcauauugugggcaagcccugcccuaaaccccaccgccugaauagaaugggcaucuguagcugcgggcucuauaagcagccuggagugcccgucaaauggaagcgguga

SEQ ID NO: 1774 - RNA, 1476 nt, Artificial Sequence
  derived and/or modified protein sequence (opt5) from LASV(Ouoma-R123;Clade V)__AHC95559__GPC
augggccagaucauuaccuucuuucaagaggugccccacgucaucgaagagguuaugaacauugugcugaucgcccucagcauucuggcugugcuuaaggggcuguacaauaucgccacaugcggacucaucggccuggucacguuccuucugcucugugggagauccugcucuagcucccuguauaaaggaguguacgaacugcagucucucgaccugaacauggagacccuuaauaugacaaugccucugagcuguaccaagaacaauucccaucacuauauucggguuggcaacgaaacagggcucgagcugacccuuacaaauaccucucugaucaaccauaaauuuugcaaucucagcgaugcgcacaagaaaaaccuguacgaccaugcucugauguccauuaucagcacguuccaccucucuauuccgaauuuuaaccaguaugaggccauguccugugauuucaauggaggcaagaucagcgugcaguacaaccugucucacgccuaugcuauugacgccgcuucccauugcggcaccgucgccaauggggugcuucaaacauuuaugcgcauggcguggggaggcagcuacaucgcccuggauucugggcacggaaacugggacuguaucaugaccuccuaccaguaucucauuauccagaacacaaccugggaagaucauugccaguucagcagacccuccccuauuggcuaccuggggcuucugucucaacggacgcgcgacaucuauauuagcagacggcuccugggaacauuuaccuggacacuguccgauagcgagggcaaugcuacccccggcggguacugucucacccgcuggaugcugaucgaagccgagcuuaagugcuucggaaacacagcuguugccaaauguaaugagaagcacgacgaagaguuuugcgauaugcugagacucuucgacuuuaacaaacaggcgaucucucggcugaaguccgaagcccagaugagcauucagcuuaucaauaaagcugugaacgcccugauuaaugaucaacucaucaugaagaaccaucugcgcgacauuaugggcaucccuuauugcaauuacucuaaguauugguaccugaaccacacggucaccgggaaaacaagccuccccaaguguuggcugguguccaauggaucuuaccuuaacgagacccacuucagcgacgauaucgaacagcaggcugacaauaugauuacagagaugcugcaaaaagaguauauggaaagacagggcaagaccccucucgggcugguggaucuguucgucuuuuccacgagcuucuaccuuaucucuauuuuucuccaucugguuaaaaucccgacacaccggcauauugugggaaagcccugcccuaaaccccaccgccugaaccacaugggcaucuguuccugcggccucuauaagcagccuggggugcccgucaaguggaaaagauga

SEQ ID NO: 1775 - RNA, 1476 nt, Artificial Sequence
  derived and/or modified protein sequence (opt5) from LASV(Soromba-R;Clade V)__AHC95553__GPC
augggccagaucgugaccuucuuucaagaggucccccacguuauugaagaggugaugaacaucgugcugauugcccucagcauccuggcuguccuuaaggggcuguacaauauugccacaugcggacucaucggccuggugacguucuuucuucugugugggagauccugcucuagcaaccucuauaaaggaguuuacgaacugcagucccuggaccucaauauggagacccugaacaugacaaugccucuuucuuguaccaagaauaacagccaucacuauauccgggugggcaaugaaacagggcuggagcucacccugacaaacaccucccuucuggaucauaaauucugcaaucucucugacgcgcacaagaaaaaccuguacgaucaugcucugaugagcauuaucuccacguuucaccucagcauuccgaauuucaaccaguaugaggccaugucuugugacuuuaauggaggcaagaucaccguccaguacaaccugucccacagcuaugccggcgaugcugcccgccauugcgggacaauugcuaauggagugcuucaaaccuucaugagaauggccuggggcgggucuuacaucgcgcuggacuccggacacggcaacugggauuguauuaugacaagcuaccaguaucucaucauccagaacaccacgugggaagaccauugccaguuuucucggcccuccccuauuggguaccugagccuucugucccaacgcacaagagauaucuauauuucucggcgccuccugggaaccuucacauggacccugagcgacuccgagggcaaugccacccccggcggguacugucucacaagauggaugcugaucgaagcugagcuuaagugcuuuggaaacacggccguugcuaaauguaaugagaagcacgaugaagaguucugcgacaugcugcggcucuuugauuucaacaaacaggccauuagccgccugagaucugaagcgcagauguccauccagcuuaucaauaaggccgugaacgcucugauuaaugaccaacucaucaugaaaaaccaucugcgggacauuaugggcaucccuuauugcaauuacagcaaguauugguaccugaaccacaccgucacagggcgcaccucucuccccaaguguuggcuggugagcaauggauccuaccuuaacgagacacacuucucugaugacauugaacagcaggccgauaauaugaucaccgagaugcugcaaaaagaguauauggacagacagggcaagacgccucucgggcugguggaucuguuugucuucagcacauccuuuuaccuuaucagcauuuuccuccaucugguuaaaaucccgacccaccggcauauugugggaaagcccugcccuaaaccccaccgccugaacagaaugggcaucuguucuugcggccucuauaagcagccuggggugcccgucaaauggaagcgguga

SEQ ID NO: 1776 - RNA, 1473 nt, Artificial Sequence; identical to SEQ ID NO: 1530
  derived and/or modified protein sequence (opt5) from LASV(Alzey;Clade VI)__SCA79105__GPC

SEQ ID NO: 1777 - RNA, 1473 nt, Artificial Sequence
  derived and/or modified protein sequence (opt5) from LASV(Lassa/H.sapiens-wt/TGO/2016/201600568;Clade VI)__AVN98153__GPC
augggccagaucauuaccuucuuucaagaggugccccacgucaucgaagagguuaugaacauugugcugaucgcccucagccugcuugcuauucugaaggggguguacaaugucgccacaugcggaaucaucggccucgugacguuccuguuucuuugugggagauccugcucucugauuuauaaaggaagcuacgaacuccagacccuggagcugaacauggaaacacucaauaugaccaugccucuguccuguacaaagaacucuagccaucacuauauccggguuggcaaugagaccgggcuugagcugacacucaccaacacguccauuaucaaucauaaauucugcaaccugucugacgcgcacaagcgcaaucuuuacgaucaugcucugaugagcauucucuccaccuuucaccugagcaucccgaacuucaaucaguaugaagccaugucuugugacuuuaacggaggcaaaauuuccgugcaguacaaucugagccacgccuaugcugucgaugccgcugagcauugcggcacaguggccaacgggguucuccaaaccuucaugagaauggcguggggaggcucuuacaucgcccuggacuccgggcggggaaauugggauuguaucaugacaagcuaccaguaucuuauuauccagaacaccacgugggaagaccacugccaguuuucucgccccuccccuauuggcuaccuggggcuccugagccaaagaacacgggauaucuauauuucccgcagacuucugggaaccuucacauggacccucucugacagcgagggcaacgagacccccggcggguacugucugacacgguggaugcugaucgaagcugagcucaagugcuuuggaaauacggccguggcuaaguguaacgaaaaacaugaugaggaguucugcgacaugcugcgccuuuuugauuucaauaagcaggccauccagagacugaaauccgaagcgcagaugagcauucaacucaucaacaaggccgucaaugcucugauuaacgaccagcuuaucaugaaaaaucaucugcgggauaugaugggcauuccuuauugcaacuacucuaaguauugguaccucaaucacaccuccagcgggcgcgccucucugcccaaguguuggcuggugagcaacggauccuaccucaaugagacacacuucucugacgacaucgaacagcaagcugauaacaugaucaccgagaugcugcagaaagaauauauugacagacagggcaagacaccucuugggcugguggaucucuuugucuucagcaccuccuuuuaccugaucagcauuuuccugcaccuuaucaaaauuccgacgcaucggcacaucguuggaaagcccugcccuaaaccccaucgccucaaucacaugggcauuuguucuugcggccuguauaagcagccuggggugcccacaagauggaaacgguga

SEQ ID NO: 1778 - RNA, 1473 nt, Artificial Sequence
  derived and/or modified protein sequence (opt5) from LASV(NIGERIA IKEJI;Clade II)__AMZ00373__GPC
augggccagaucauuaccuucuuucaagaggugccccacgucaucgaagagguuaugaacauugugcugaucgcccucagccugcuugcuauucugaaggggaucuacaauguggccacaugcggacucuucggccugaucuccuuucuuuuccugugugggagaucuugcagcacgauguauaaaggagucuacgaacuccagacccuggagcuggacauggcgaaccucaauaugacaaugccucuguccuguaccaagaacaauucucaucacuauauuauggugggcaacgaaacagggcuugagcugacccucacaaaucagagcaucauuaaccauaaauuuugcaaucuguccgaugcucacaagaaaaaccuuuacgaccauacccugaugucuaucauuagcacguuccaccucuccaucccgaauuuuaaccaguaugaggccaugagcugugauuucaauggaggcaagauuucuguucaauacaaccugucccacagcuaugccguggacgcugccaaucauugcggcaccgucgcuaacggggugcugcagacauuuaugcggauggccuggggaggcucuuacaucgcgcucgauuccgggaagggaaacugggacuguaucaugaccagcuaccaguaucugauuauccagaauacaaccugggaagaucacugccaauucucucgccccuccccuauuggcuaccuugggcugcucagccagagaacgcgggacaucuauauuucccgcagacugcuuggaacauuuaccuggacacugucugauagcgagggcaacgacgcccccggcggguacugucucacccgguggaugcugaucgaagcugagcugaaaugcuucggaaauaccgccaucgcuaaguguaacgagaaacaugaugaagaguuuugcgacaugcuccgccuguucgauuucaauaagcaggccauuaaaagacuuaaggcggaagcccagauguccauccaacugauuaacaaggcuguuaaugcccucaucaacgaccagcugauuaugaaaaaucaccuucgggacaucaugggcaucccuuauugcaacuacagcaaguauugguaccugaauaacacagugacggggaaaucuucccuccccaaguguuggcuggucagcaauggaucuuaccugaacgagacccacuuuagcgaugacauugaacagcaagcugauaauaugaucacagagaugcuccagaaagaguauauggaccgccagggcaagaccccucuggggcuuguggaucuguucguguuuuccacaucuuucuaccucauuagcaucuuucugcaucuggucaaaauuccgacccacagacauaucacgggaaagcccugcccuaagccccaccggcuuaaccauaugggcauuuguuccugcggccucuauaaacagccugggguucccgugaaguggaaacgcuga

SEQ ID NO: 1779 - RNA, 1476 nt, Artificial Sequence
  derived and/or modified protein sequence (opt6) from LASV(Josiah;Clade IV)__NP_694870__GPC
augggccaaauaguaaccuucuuucaagaaguaccacacguaauagaagaaguaaugaauauaguacuaauagcucuaagcguucucgccgucuuaaaaggacuauacaacuucgcaacauguggccuaguaggauuaguaacauuucuacuccuaugcggacgaucaugcacaacaucacuauauaaaggaguauacgaacugcaaacacuagaacuaaacauggaaacacuaaauaugacaaugcccuuaaguugcacuaaaaacaacucccaccacuauauaauggucggaaacgaaacaggccucgaauuaacauuaacaaacacaaguauaauaaaucacaaauuuuguaaucuaagcgaugcacacaaaaagaauuuauaugaccacgcacuaaugucaauaauaaguaccuuucauuuaucaaucccuaacuuuaaccaauaugaagcaaugucuugcgauuucaacggaggaaaaauaucaguacaauauaacuuaucacacaguuacgcaggagaugcagccaaccacugcggcacuguagcaaacggaguacuccaaaccuucaugagaauggcauggggcggauccuauauugcacucgacaguggaagagguaacugggauugcaucaugaccucauaccaauauuuaauaauacagaauacaacaugggaagaccauugccaauuuucuagaccaucaccuauagguuacuuaggcuuauuaucacaaagaacacgagauauauacauauccagaagauuacuaggaacauuuacauggacacuaagugauagcgaaggcaaagacaccccaggagguuacugcuuaaccagauggauguuaauagaagcagaauuaaaauguuuuggcaauacagcaguagcaaaaugcaacgaaaaacacgaugaagaauuuugcgauaugcucagacuuuucgacuucaacaaacaagcaauccaaagauuaaaagcugaagcacaaaugagcauacaacuaaucaauaaagcaguuaaugccuuaauaaacgaccaacuaauaaugaaaaaccacuuaagagacauaaugggaauaccauacugcaacuauaguaaauacugguaucuaaaucacacaacuacaggccguacuucacugccaaaauguuggcuaguaagcaacggaucauauuuaaacgaaacacauuuuucagacgauauagaacaacaagcugauaacaugauaaccgaaaugcuucaaaaagaauacauggaaagacaaggcaaaacaccccucggucuaguagaccuauuugucuucagcacaaguuuuuacuuaauaucaauauucuuacaccuuguaaaaauaccaacacauagacacauaguaggaaaaucauguccaaaaccacauagacuaaaccacaugggaauauguagcugcggucuauauaaacaaccaggagucccaguaaaauggaaacgauaa

SEQ ID NO: 1780 - RNA, 1473 nt, Artificial Sequence
  derived and/or modified protein sequence (opt6) from LASV(LP;Clade I)__AAF86701__GPC
augggacaaauuauaacauucuuucaagaaguaccccauguaauagaagaagucaugaacauaguucuaauagcacuaucuuuauuagcaauucuaaaaggcuuauauaacauagcaaccugcggcauaaucggccuagucgcuuuccuauucuuaugcggaaaaaguugcucauuaacacuaaaaggaggauaugaacuacaaacucucgaauuaaacauggaaacauuaaacaugacaaugccuuuaucuugcacaaaaaauucaucacaucacuacauaagagucggaaaugaaacaggacuagaacuuacacuaacaaacacaucaauaauuaaccacaaauuuugcaaccucucugacgcacauaaaaaaaaccuauacgaccaugcacuaaugucaauaauaucgacauuccaccuaucaauaccaaacuuuaaccaauaugaagccaugucaugcgacuucaacggugguaaaauauccguccaauacaaucuaucccauuccuacgcaggagacgccgcagaacauugcggaacugucgcaaacggaguacuacaaacuuucaugagaauggcauggggaggaagauauauugcccuagauucaggaaaaggaaacugggacugcaucaugaccucauaccaauaccuuauaauacaaaauacuacaugggaagaccacugccaauucucacgaccaucuccuaucggauaucuaggacuacuaucacaacgaacucgagacauauacauaagcagacgauuauuaggcacauuuacuuggacuuuaucagacucagaaggcaaugaaacaccaggaggauacuguuuaacacgauggaugcucauagaagcagaauuaaaauguuucggaaauacagcaguagcaaaaugcaacgaaaaacacgacgaagaauucugcgacauguuaagauuauucgacuucaauaaacaagcaauacguagacuaaaagcagaagcucaaaugucaauacaacuuauaaacaaagccguaaacgcacuaaucaacgaccaauuaaucaugaaaaaucauuuacgagacauuauggguauaccauacugcaacuacucuaaauacugguaucuaaaucacacaucuucaggacgaacaucauuaccaaaaugcuggcuuauaaguaacggaucauacuuaaaugaaacacaauucucagacgacauagaacaacaagcagauaacaugauaacugaaaugcuacaaaaagaauacauagaacgucaaggaaaaacacccuuaggacuaguagacauauucauauuuuccacaucauuuuacuuaauuucaaucuuccuacaccucauaaaaaucccuacccacagacacauaguaggaaaaccaugcccaaaaccacauagacuaaaccauaugggaguaugcucaugcggcuuauacaaacauccaggaguaccaacaaaauggaaacgauaa

SEQ ID NO: 1781 - RNA, 1473 nt, Artificial Sequence
  derived and/or modified protein sequence (opt6) from LASV(803213;Clade II)__AAF86703__GPC
augggacaaauaauaaccuucuuccaagaaguaccacacguaauagaagaagucaugaacauagucuuaauagcauuaucauuauuagcaauauuaaaaggaauauacaacguagcaacaugcggauuauucggacuaauauccuuucuauuauuaugcggacgcagcugcucugucacauacaaaggagucuaugaacuacaaacauuagaacuaaacauggcaaacuuaaacaugacaaugccacuauccugcacaaaaaacaauucccaccacuacauaaugguuggcaacgaaacaggacucgaacuaacccuuacaaacacuucuauaauuaaccauaaauucugcaaccuaucagaugcacacaaaaaaaaccucuaugaccacgcacuaaugucuauaauaucaacauuucaccuaucuauaccaaacuuuaaccaauaugaagcaauguccugugauuuuaaugguggcaaaauaucuguacaauacaacuuaucacauucauucgcaguagacgcagcaaaccacugcggaacaauagcaaacggaguucuccaaacauuuaugagaauggccuggggaggaucauacaucgcacuagacucaggaaaaggaaauugggacuguauaaugaccucauaccaauaccuaaucauacaaaacacaacaugggaagaucauugccaauucucacgucccucuccaauaggauaucuaggccuccuaucacaaagaacaagagauaucuacauaucaagacgacuacucggaacauucacauggacacuaagcgacuccgaaggaaacgaagccccaggaggauacugccuuacacgauggaugcuaaucgaagccgaacuaaaaugcuuuggaaacacagcagucgcaaaauguaaugaaaaacaugaugaagaauuuugcgauaugcuaagacuauuugacuucaacaaacaagcaauaaaaagacucaaaacagaagcccaaaugucuauucaacucauaaauaaagcaguaaaugcauuaauuaacgaccaacuaaucaugaaaaaccaucuuagagauauuaugggaauaccauacuguaacuacucaagauacugguaccuaaaccacacaguaacuggaaaaacaucucuaccacgaugcuggcucguaucuaacgguucauaccuaaaugaaacacacuuuucugacgacaucgaacaacaagcagacaacaugauaacagaaaugcuacaaaaagaauacauggacagacaaggaaaaacaccacuaggucuaguagauuuauucguauucaguacaucuuucuaccuaauaucaauauuccuacaccucguaaaaauacccacacaccgccacauaguaggaaaaccauguccaaaaccacaccgacuaaaccacaugggcaucugcucaugcggacuauauaaacaccccggaguaccagucaaauggaaaagauaa

SEQ ID NO: 1782 - RNA, 1473 nt, Artificial Sequence
  derived and/or modified protein sequence (opt6) from LASV(GA391;Clade III)__CAA36645__GPC
augggacaaauaguaacauucuuccaagaaguaccacauguaauugaagaaguaaugaacauaguacuaauagcacuaucaauccuagcaauauuaaaaggauuauauaaugucgcuacuuguggacuaauaggacucguaacauuucuacuauuaucagguagaucaugcagccuuauauacaaaggaacauacgaauuacaaacauuagaacuaaacauggaaacccuaaacaugaccaugccacuauccuguaccaaaaacaacucacaccauuacauuagaguaggaaacgaaacaggucuugaacuaacauugacaaacacaagcauacuaaaccauaaauucugcaaccuaucagaugcacacaaaagaaaccuauaugaccauucacuuaugucuauaaucucaacauuucauuuauccauaccuaacuucaaucaauaugaagcaaugucuugcgauuucaacggcggaaaaauaacaguacaauacaaccucucccauuccuucgcaguagacgcagcaggccacugcgguacauuagcaaacggcguacuacaaacauuuaugagaauggcauggggcggaucauacauagcuuuagacucagguagaggaaacugggauugcaucaugacaaguuaucaauaccuaauaauucaaaacacaacaugggacgaccacugccaauucucaagaccuucaccaauaggauauuuaggucuacucucccaaagaacacgcgacauauauauaucaagaagacuacuagguacauucacauggacacuaucagauucagaaggaaacgaaacaccaggaggauacuguuuaacacgcuggaugcucauagaagcugaacuaaaaugcuuuggcaacacagcaguagcaaaauguaacgaaaaacacgacgaagaauuuugcgacauguuacgacuauucgacuuuaacaaacaagcaauaagaagacuaaaaacagaagcacaaaugucaauccaacucauuaacaaagcaguaaacgcuuuaauaaacgaccaauuaauaaugaaaaaccaccuacgagacauaaugggaauacccuauuguaacuacucacgauauugguaucuaaaccauaccucaacaggaaaaaccucccuacccagaugcuggcuaaucucaaacggaucauaccuaaacgaaacaaaauucucugacgacauagaacaacaagcugacaacaugauaaccgaaauguuacaaaaagaauacauagauagacaaggcaaaacaccacuaggauuaguagacuuauucguauucucaacaucauucuacuuaauaaguaucuuccuacaccuagugaaaauaccaacccacagacacaucgucgguaaaccauguccaaaaccacacagacuaaaucacauggguauaugcucaugcggcuuauauaaacaaccaggaguaccaguuagauggaaaagauaa

SEQ ID NO: 1783 - RNA, 1476 nt, Artificial Sequence
  derived and/or modified protein sequence (opt6) from LASV(AV;Clade V)__CCA30314__GPC
augggacaaauaguuaccuucuuccaagaaguaccacacguaauagaagaaguaaugaacauaguacucaucgcauuaagcauacuagcuguauuaaaaggucuauauaauauagcuaccuguggacuaaucggacucaucacauuuuuacuuuuaugcggucgaucauguucuucaaaccucuacaaaggaguauaugaauuacaaucauuagaccuaaauauggaaacauuaaacaugacaaugccacuaucaugcacaaaaaacaacucccaccacuacaucagaguaggaaaugauaccggacuagaacuaacucuaacaaacacaucaauacucaaccacaaauucugcaaccuaucugaugcacacaaaaaagaucuauacgaccaugcauuaauguccauaauaaguacuuuucacuuauccauaccaaacuucaaccaauacgaagcuaugucaugcgacuucaacggaggaaaaauauccguacaauauaaucuaucucacuccuacgcaauagacgcagcaaaucacugcggaaccguagcaaacgguaucuuacaaacuuucaugcgaauggccuggggaggaucauacauagccuuagacucaggaagaggaaacugggacuguauaaugacauccuaccaauaccuaaucauacaaaacacaaccugggaaaaccacugccaauucucuagaccaucacccaucggcuacuuaggauuacuaucacaacgaacuagagauauauacauaucaagaagacuacuaggaacuuuuacauggacauuauccgacucagaaggcaacgcaacaccaggaggauacugccuaacaagauggaugcuaauugaagcagaacuaaaaugcuucggcaauacagcaguagcaaaaugcaacgaaaaacacgacgaagaauuuugcgauaugcuaagauuauucgacuuuaauaaacaagcaauauccagacuaaaaucagaagcacaaaugucaauacaauuaauaaacaaagcuguuaaugcucuaauaaaugaucaacuuauaaugaaaaaccacuuacgagacauaaugggaauaccauauugcaacuacucaaaauacugguacuuaaaccauacaauaacaggaaaaacaucacuuccaaaauguuggcuagucuccaacggaucauaucuaaacgaaacccacuuuucagacgacauagaacaacaagcagacaacaugauaacagaaaugcuacaaaaagaauacauggaaagacagggaaaaacaccauuaggacuaguagaccucuucguauuuucuacaaguuucuaucuaauaucgauauuccuacgacuaguaaaaauacccacccacagacauaucgucggaaaaccaugcccaaaaccacauagacuaaaccauaugggaauaugcucauguggacuauacaaacaaccaggcguaccugucagauggaaaagauaa

SEQ ID NO: 1784 - RNA, 1473 nt, Artificial Sequence
  derived and/or modified protein sequence (opt6) from LASV(Togo/2016/7082;Clade VI)__AMR44577__GPC
augggacaaauaauaacauuuuuccaagaaguaccacacgucauugaagaaguaaugaacauaguacuaauagcacuaucauuacuagcaauacuaaaaggaguuuacaacguagcuacaugcggcauuauaggucucguaacauuccuauucuuauguggaagauccugcucacucaucuauaaaggaucauaugaacuacaaacucuagaacucaacauggaaacauuaaacaugacaaugccacucucuugcacuaaaaauucaagccaccacuacauaagaguuggaaacgaaacaggacucgaacuaaccuuaacaaauaccuccauaauaaaccacaaauucuguaauuuaucagacgcacauaaaagaaaucuauacgaccaugcauuaaugucaauacuauccacauuucaccuaucaauccccaacuucaaccaauacgaagcuaugucaugcgacuucaauggcggaaaaauaucaguccaauauaacuuaucccacgcauacgcuguagacgcagcagaacauugcggcacagucgcaaacggaguacuacaaacauucaugagaauggcauggggaggaucauacauagcacuugauucaggcagaggaaacugggauugcauaaugacaucauaccaauacuuaauaauucaaaacacaacaugggaagaucacugccaauuuucgagaccaucacccauaggauaccuaggccuacuaucacaaagaacacgcgacauauacaucucucguagacuacuaggaacauucaccuggacacuaagcgacuccgaaggcaacgaaacacccggaggauauugccuaaccagauggauguuaauagaagcugaacuaaaauguuucggaaacacugcuguagcuaaauguaaugaaaaacacgaugaggaguucugcgacaugcuaagacuauucgacuucaauaaacaagcaauccaaagauuaaaaucagaagcacaaaugucuauacaacuaauaaacaaagccguaaacgcacuaauaaaugaucaacuaaucaugaaaaaucaccucagagauaugauggguauaccauauugcaauuacucaaaauacugguaucuaaaccacacgaguucuggaagaacaucccuaccaaaaugcuggcuaguaagcaauggcagcuaccuaaacgaaacacacuucucagacgacauagaacaacaggcagacaacaugauaacagaaauguuacaaaaagaauacaucgaccgacaaggaaaaacuccacuaggccuaguugaccuauucguauuuucaacaucauuuuacuuaauaucaauauuccuacaucuaauaaaaauaccaacacauagacacauaguaggaaaaccuugccccaagccacacagauuaaaccauaugggaauaugcuccuguggacuauacaaacaaccaggaguaccaacaagauggaaaagauaa

SEQ ID NO: 1785 - RNA, 1473 nt, Artificial Sequence
  derived and/or modified protein sequence (opt6) from LASV(KAK-428;Clade n.d. (VII))__ANH09740__GPC
augggacaaauaguaacauucuuccaagaaguaccacacgucaucgaagaaguaaugaacauaguacuaauagcccucucauuauuagcaauauuaaaaggacuauacaacuucgcaacuuguggaguaauaggccuuauaacauuccuucuacuaugcggcagaucaugcuccgcaacauacaaaggacaauacgaauuacaaacauuagaacuaaauauggaaagcuuaaacaugaccaugccacucucaugcacaaaaaacaacucccaccacuauauacgcgccggaaacaacacaggacuugaauuaacccuaaccaacaccucuaucauaucacacaaauuuugcaaucuaucagacgcucacaaaaaaaaucuuuacgaccacacccuaauguccauaauaacaacauuccacuuaucuauaccaaacuucaaccaauacgaagcaaugucaugugauuucaacggaggaaagauuuccauacaauacaacuuaucucacucuuacgccggagacgccgcacaacacugcggaacaguagcaaacggaguacuucaaacauucaugagaauggcauggggaggauccuaccucgcauuagauucaggaagacgaggaugggacuguauaauauccucauaucaauaccuaaucauacaaaacacaacaugggacgaucauugccaauucucaagaccuucaccaauuggauaccuuggauucguuucacaaaaaacacgagauauuuacaucucacgcagauuauuaggaacauucaccuggacacucagcgacucagaaggccacgauaugccaggcgguuacugccuaacaagauggauguuaauagaagcagaccuaaaaugcuucggaaacacugccguagcaaaauguaacgaaaaacacgacgaagaauucugcgacauguggcgccuauucgacuucaacaaacaagcaauccaaagauuaaaagcugaagcacaaaugaauauacaacuaauaaauaaagccguaaacgcacucauaaacgaccaacuaaugaugaaaaaccaucuaagagacauaaugggaaucccauacugcaacuacuccaaauucugguaucucaauaacacaaccacaggaagaaccucuuuaccaagaugcuggcuaauaucaaacggaagcuacuuaaacgaaacacacuucucagacgacauagaacaacaagcugauaacaugauuacagaaaugcuacaaaaagaauacauggauagacaaggaaaaaccccacuaggacuuguugaccuauuuguauuuucaacaaguuucuaccuaauaacaaucuuccuacaucucguaaaaauaccuacacacagacacauaguaggaaaaccaugccccaaaccacacagacuaaaccacauggguauaugcucauguggacucuacaaacaaccaggcguuccaguccgauggaaacgauaa

SEQ ID NO: 1786 - RNA, 1473 nt, Artificial Sequence
  derived and/or modified protein sequence (opt6) from LASV(Acar 3080;Clade I)__AAT49014__GPC
augggucaaauuaucacauucuuccaagaaguaccacacgucauagaagaaguaaugaacauaguauuaauagcccuaucauuacuugcaauacuaaaaggauuauacaacauagccaccugcgguauaaucggauuaguagcauuccuauuccuaugcggaaaauccugcagccuaacauuaaaaggaggauacgaacuacaaacacuagaacuaaauauggaaacccucaacaugacaaugccacuaucaugcacaaaaaauucuucacaccacuacauaagaguaggaaaugaaacagguuuagaacuaacauuaacaaacacaucuauaauaaaccacaaauucugcaaccuaucagaugcacacaaaaaaaacuuauaugaccacgccuuaaugucaauaaucucaaccuuccaccuaucaaucccaaacuucaaccaauaugaagcaaugucaugcgacuucaacggcggaaaaauauccguacaauacaauuuaucacacagcuacgcaggagacgcagcugaacacugcggaacuguugcaaauggaguauuacaaaccuuuaugcgcauggcauggggaggaagauauauagcacuagacucaggaaaagguaacugggacugcauaaugacaucauaccaauaccuaauuauccaaaauacuaccugggaagaccacugccaauucucacgaccauccccaauaggauaccuaggacuauuaucacaaagaacaagagacauauacauaucuagacgauuacuuggaacauuuacauggacccuaagugauucagaaggaaacgaaacaccaggcggauacugucuaacacgauggauguuaauagaagccgaauuaaaaugcuuuggcaacaccgcaguagccaaaugcaaugaaaaacacgacgaagaauucugcgacaugcuacgauuauucgacuucaauaaacaagcaauccgaagacuaaaagcagaagcucaaaugucaauacaacuaauaaacaaagcaguaaacgcccuaauuaacgaccaacucauaaugaaaaaccaccuacgagauauaaugggcauccccuacugcaacuacucaaaauauugguaucuaaaccacacaaguuccggcagaacaagccuaccuaaaugcugguuaauaucuaacggaucauaucuaaacgaaacccaauucuccgacgacaucgaacaacaagccgaucacaugauaacagaaaugcuacaaaaagaauauauagaacgacaaggcaaaacaccacuaggacuaguagacaucuucauauuuucaacuaguuuuuaccuaauaucaaucuucuuacauuuaauuaaaauucccacccacagacauaucgucggaaaaccaugccccaaaccccauagacuaaaccacaugggaguuugcucaugcggucucuauaaacauccaggaguaccaacuaaauggaaacgcuaa

SEQ ID NO: 1787 - RNA, 1473 nt, Artificial Sequence
  derived and/or modified protein sequence (opt6) from LASV(Pinneo-NIG-1969;Clade I)__AIT17836__GPC
augggacaaauaaucacauucuuucaagaagucccccacguuauagaagaaguaaugaauauaguacuaauagcacucucauuacucgcaauacuaaaaggacuauauaacauagccacaugcggaauuauaggauuaguagcauuccuuuucuuaugcggaaaauccugcucacuaacacuaaaaggcggauacgaacuacaaacacuagaauuaaacauggaaacacuaaauaugacaaugccccuaucauguaccaaaaacuccucacaccauuacaucagaguaggaaaugaaacaggacuagaauuaaccuuaacaaacacaucuauaauuaaccacaaauuuugcaaccuauccgacgcacacaaaaaaaacuuauaugaucacgcacuaaugucaauuauaucaacuuuccaccuaucaaucccaaauuuuaaucaauacgaagcaaugucaugcgacuucaacggaggaaaaauauccguacaauauaaccucucucacucauacgcaggagacgcagcagaacacuguggaacaguagcaaacgguguucuacaaacauucaugagaauggcauggggaggacgauacauagcauuagacuccggaaaaggaaauugggauugcauuaugacaucauaucaauaucuuaucauacaaaacacaacaugggaagaccacugccaauuuucacgaccaagccccauagguuacuuagguuuacucucccaaagaacaagagauauauacauuucuagaagauuauuaggaacuuucacuuggaccuuaucugacucugaaggaaacgaaacaccaggaggauauugcuuaacuagauggaugcuaauugaagccgaauuaaaaugcuucggaaacacagcagucgccaaaugcaacgaaaaacaugacgaagaauuuugugacaugcuaagacuuuucgacuucaacaaacaagcuauaagaagauuaaaagcagaagcacaaaugucaauacaauuaauaaacaaagcuguaaacgcauuaauaaacgaccaauuaauaaugaaaaaccaccuaagagacauuaugggaauacccuacuguaauuacucaaaauacugguacuuaaaccauaccucauccgggcgaaccucucuacccaaaugcuggcucauaagcaacggauccuacuuaaacgaaacacaauuuucagacgacauagaacaacaagcagauaauaugauaacagaaaugcuacaaaaagaauauauagaaagacaaggaaaaaccccacuaggauuaguugacauauuuauauucucaaccucauuuuaccucauaucaauauuuuuacaucuaauaaaaauaccaacucacagacauauaguaggaaaaccaugcccaaaaccacauagauuaaaccacaugggaguauguuccugcggacuauacaaacauccaggaguacccacaaaauggaaacgauaa

SEQ ID NO: 1788 - RNA, 1473 nt, Artificial Sequence
  derived and/or modified protein sequence (opt6) from LASV(ISTH0009-NIG-2011;Clade II)__AIT17404__GPC
augggacaaaucauaacauucuuucaagaagucccacacguaauagaagaaguaaugaauaucguauuaauagcacuauccuuacuagcaauauuaaaaggaauauacaauguagccacauguggacuauucgguuuaguaucauucuuacuucuaugcggaagaucuugcucaaccacuuacaaaggaguauacgaacuucaaacacucgaacuagauauggcaagucuaaacaugaccaugccacuaucaugcacaaaaaacaauucccaccauuacauaauggucggaaaugaaacaggauuagaauuaacauuaacaaacacaucuauuauaaaccacaaauucugcaaucuaucagacgcucacaaaaaaaaccuauacgaccacgcacucauguccauaauauccacuuuucaccuaucaauaccaaacuucaaccaauacgaagcaaugucaugugacuucaauggaggaaaaauaucaguacaauacaaccuaucccaugcauaugcaguagacgcagccaaucacuguggaacuauagcaaacgguguucuacaaacauuuaugcgaauggccugggguggauccuacauagcacuagacucuggaaaaggaucaugggauugcauaaugacuucauaccaauaccuaauaauacaaaacacaacaugggaagaccacugucaauucucaagacccucuccaauaggauaccuagguuuacuaucucaaagaacaagagauauauacaucagcagacgacuacuuggaacauucacauggacccuauccgacucagaaggaaaugaaacaccuggcggcuacugccuuaccagauggauguuaauagaagcugaauuaaaaugcuucggaaacacagccguagcaaaaugcaacgaaaaacaugacgaagaauuuugugacaugcuuagauuauucgacuuuaacaaacaagcuauacgcagauuaaaaacagaagcacaaaugaguauacaacuaauaaauaaagcaguaaacgcauuaauaaacgaccaacuaaucaugaaaaaccacuuaagagacauaaugggaauaccauacugcaacuacucaaaauacugguacuuaaaccacacugucacuggaaaaaccucauuaccacgcugcuggcuaguaucaaacggaaguuauuuaaaugaaacacauuucucagaugacauagaacaacaagcagacaauaugauaaccgaacucuuacaaaaagaauacauggacagacaaggaaaaacaccauuaggacuaguagaccucuucguuuucucaacaucauucuacuuaauaagcauuuuccuacacuuaauaaaaauaccaacacaccgccacauaaccggaaaaccaugcccaaaaccacacagauuaaaccauaugggaaucugcaguuguggucuauauaaacauccaggagucccaguaaaauggaaaagauaa

SEQ ID NO: 1789 - RNA, 1473 nt, Artificial Sequence
  derived and/or modified protein sequence (opt6) from LASV(ISTH0012-NIG-2011;Clade II)__AIT17408__GPC
augggacaaauaauaacuuucuuccaagaagucccacacguaauugaagaaguaaugaauauaguccucauagcacuaucacuuuuagccauauuaaaaggcauauacaacguagcaacaugcggucuuuucggccuaguaucauucuuauuacuauguggaagaucauguucaacaacauacaaaggcguauacgaacuacaaacacucgaacuagauauggcaucacuaaauaugacuaugccacuaucuugcacuaaaaacaacucacaccacuacauaaugguuggaaacgaaacaggauuagaacuuacacuaacuaauaccucaauaauaaaccacaaauuuugcaaccuaucugaugcacauaagaaaaaucuauacgaucaugcauuaauguccauaauaucuacauuucaucuaucaauaccaaauuucaaccaauaugaagcaaugucaugcgacuucaacggcggcaaaauaucaguacaauauaacuuaucucacacauacgcaguugacgcagcaaaccauugcggaacagucgcaaauggaguccuacaaacauuuaugcguauggcuuggggaggaucauauauagcacuagacaguggaaaaggcuccugggauugcaucaugacaucauaccaauaccucauaauacaaaauacaacaugggaagaucacugccaauucucacgaccaucaccaauaggauacuuaggacuacuaucccaaagaacaagagacauauacauauccagaagacuauuaggaacauucacuuggacacuaucagauucugaaggcaacgaaacacccggaggauacugucuaacaagauggaugcuaauagaagccgaacuaaaaugcuucggaaacacagccgucgcaaaaugcaacgaaaaacacgacgaagaauuuugcgauaugcuaagauuauucgauuucaauaaacaagcaauacgaagauuaaaaacagaagcacaaauguccauacaauuaaucaacaaggcaguaaacgcacuaauaaacgaucaacuuauaaugaaaaaucacuuaagagauauaaugggaauaccauacugcaacuacucaaaauacugguaucuaaaccauacaguaaccggaaaaacaucacuaccaagaugcugguuagucucaaacggcucauacuuaaacgaaacucacuucucugacgacauagaacaacaagcagacaauaugaucacagaacuccuucaaaaagaauacauggaucgccaaggaaaaacacccuuaggucuaguagaucucuucguauucagcacauccuucuaucucauuuccauauucuuacacuuaguaaaaauaccaacacaccgccauguuauaggaaaaccauguccaaaaccacauagacuaaaucacaugggcauaugcucauguggccuuuacaaacauccaggaguuccaguaaaauggaaacgauaa

SEQ ID NO: 1790 - RNA, 1473 nt, Artificial Sequence
  derived and/or modified protein sequence (opt6) from LASV(ISTH0047-NIG-2011;Clade II)__AIT17412__GPC
augggccaaauaauaacuuucuuucaagaaguuccacacguaaucgaagaaguaaugaacauaguacuaauugcacucucacuacuagccauccuaaaaggaauauauaacguagcaacaugcggacuauucggacuaguaucuuuccuacuacuuugcggaagaucaugcuccacaacuuacaaaggaguauacgaauuacaaacacuagaacuagacauggcaucuuuaaauaugaccaugccacucucauguaccaaaaacaacucacaucacuacauaaugguaggaaaugaaaccggacuagaauuaacacuaaccaacacauccauaauaaaccauaaauucugcaaccuaucagacgcccauaaaaaaaaccuauaugaccacgcacucauguccauaauaucaacuuuccacuuaagcauaccaaauuuuaaccaauacgaagcaaugucaugcgacuucaauggaggaaaaauuucaguacaauacaaucuaucccacgccuacgcuguagacgccgcaaaccauugcggaacuauagcaaacggaguuuuacaaacauuuaugagaauggcauggggcggaucauacauagcccucgacucaggaaaaggcuccugggauugcauaaugacuucauaccaauaccuaaucauacaaaauacuucuugggaagaucauugccaauucucaagaccaucaccaauaggauaccucgguuuacucucacaacguaccagagauauauauauaucaagacgacuauuaggcacauuuacauggacuuuauccgacuccgaaggcaacgaaacaccaggaggauacugucuuaccagauggauguuaauagaagcagaauuaaaauguuuuggaaacacagcaguagcuaaaugcaacgaaaaacacgacgaagaauuuugugauauguuacgacuauucgacuucaacaaacaagcuauaagaagacucaaaacugaagcacaaaugucaauacaacucaucaacaaagccgucaaugcacuaauaaacgaucaacuaauaaugaaaaaccaccucagagacauaaugggaauaccauauugcaacuacucaaaauacugguauuuaaaucauacaguaaccggaaaaacaucauuaccacgaugcuggcuaguaucaaacggaucauaccuaaacgaaacucacuuuucagaugacauagaacaacaagcagacaacaugauaacagaacuccuccaaaaagaauacauagacagacaaggaaaaacaccuuuaggacuaguagacuuauuuguauucuccacaucuuucuaccuaauauccaucuuccuccaccuagucaaaauaccaacacacagacacguaaucgguaaaccuugcccaaaaccacaucgauuaaaucacaugggcauaugcucaugcggauuauacaaacacccuggcgucccaguaaaauggaaaagauaa

SEQ ID NO: 1791 - RNA, 1473 nt, Artificial Sequence
  derived and/or modified protein sequence (opt6) from LASV(ISTH0073-NIG-2011;Clade II)__AIT17416__GPC
augggacaaauaauaacuuucuuccaagaaguaccucacguuauagaagaaguaaugaacauuguccuaaucgcauuaucauuauuagcuauauuaaaaggcauauacaacgucgcaaccugcggucuuuucggacucguaucauuccuauuacuaugcggaagaucaugcucaacaaccuacaaaggaguauacgaacuacaaacacucgaauuagauauggcaucucuaaauaugacaaugccacuaucaugcaccaaaaacaacucacaucacuacauaaugguaggaaaugaaacaggccuugaauuaacacucaccaacacaucaauaauuaaccacaaauucugcaaccuauccgaugcacaccgcaaaaaccucuacgaccacgcauuaaugucaauaauuucuaccuuucaucuaucaauacccaauuucaaccaauacgaagcaaugucaugcgacuucaacggaggaaaaauauccguacaauacaaccuaucacaugcauacgcaguggacgcagcaaaccauugcggcaccaucgcaaauggaguucuacaaacauuuaugagaauggcuuggggcggauccuacauagcacuagacuccggaaaaggaucaugggacugcaucaugacuucauaccaauaccuaauaauacaaaacacauccugggaagaccauugccaauucucaagaccaucaccaauaggauaccuaggacuauuaucacaacgaacaagagacaucuacauaucuaggagauuacucggaacauucacuuggacucuaucagacucagaagguaacgaaacaccagguggauacugccuaacaagauggaugcuaauagaagcagaacuaaaaugcuucggaaauacugcaguagcaaaaugcaacgaaaaacacgacgaagaauuuugcgacaugcuaagacucuuugauuucaacaaacaagcaauacgacgacuaaaaacagaagcacaaaugucaauccaacuuauaaacaaagcagucaacgcauuaauaaacgaccaauuaaucaugaaaaaucacuuaagagacaucaugggaauaccauacugcaacuauucuaaauacugguaccuuaaucacacaguaacaggaaaaacaucauuaccaagaugcuggcuaguaucaaacgguucauaucuaaacgaaacucauuucucugacgacauagaacaacaagccgacaacaugauaacagaacuacuccaaaaagaauauauagauagacaaggaaaaacaccccuaggauuaguugaucuauucguauuuuccaccagcuucuaccuaaucucaauuuuccuacaccuuguaaaaauaccuacacacagacacguaauaggaaaaccaugucccaaaccacacagacuaaaccacaugggaaucuguucaugcggacuauacaaacacccaggagucccaguaaaauggaaacgauaa

SEQ ID NO: 1792 - RNA, 1473 nt, Artificial Sequence
  derived and/or modified protein sequence (opt6) from LASV(ISTH0230-NIG-2011;Clade II)__AIT17420__GPC
augggccaaauaauaacauuuuuccaagaagucccacacguuauagaagaaguaaugaacauaguacuaauagcacuaucucuucuagcaauauuaaaaggaauauacaauguagcaacaugcggacuauucggccuagucucauuucuauuauuaugcggaagaucaugcuccacaacauacaaaggcguauacgaacuacaaacacuagaacuagacauggccucucuaaacaugacaaugccacuuuccugcacaaaaaacaauucacaccacuacauaaugguaggaaacgaaacaggcuuagaauuaacauuaacaaacacaagcauaauaaaccacaaauucugcaaucuaucagaugcacacaaaaaaaacuuauaugaccaugcauuaaugucaauaaucucaaccuuucaccucucuauaccaaacuucaaccaauaugaagcaaugucaugugacuuuaacggcggcaaaauaucuguacaauauaaccuaucccacacauacgcaguagacgcugcaaaccacugcggcacaauagcaaacggaguauuacaaacauucaugcgcauggcaugggguggaucauacauugcuuuagacucaggaaaaggaucaugggacuguauaaugacaucauaucaauaccuaauaauacaaaacacaacaugggaagaccauugccaauucagcagaccaucaccaauaggauauuuaggacuacuaucucaaagaaccagagauauauacauauccagacgacuucuaggaacauucacauggacacuaucagacucagaaggaaaugaaacaccaggaggauacuguuuaacacgcuggaugcuaauagaagcugaauuaaaaugcuucggcaacacugccguagcaaaauguaaugaaaaacaugacgaagaauucugcgacauguuaagacucuucgauuucaauaaacaagcaauaagaagauuaaaaacagaagcacaaauguccauacaauuaauaaacaaagcaguaaacgcccuaauuaaugaccaauuaauaaugaaaaaucaccuaagagacauuaugggaaucccuuacuguaacuacucaaaauacugguaucuaaaucacaccguaacaggaaaaacaucccugccacgaugcugguuaguaucaaauggaagcuaccuaaaugaaacccacuucagugaugauauagaacaacaagcagacaauaugauaaccgaauuacuacaaaaagaauacauggacagacaaggaaaaacaccccuaggauuaguagaccuauucguauucucaaccucauuuuaccuaauaucaauauuccuacaucuaauaaaaauacccacacacagacacauaacaggcaaaccauguccaaaaccccacagacuaaaccacauggguauauguucauguggauuauauaaacauccaggaguaccuguaaaauggaaaagauaa

SEQ ID NO: 1793 - RNA, 1473 nt, Artificial Sequence
  derived and/or modified protein sequence (opt6) from LASV(ISTH0531-NIG-2011;Clade II)__AIT17424__GPC
augggucaaauaauaacuuucuuccaagaagucccacacguaauagaagaagucaugaacauaguccuaauagcacuaucauuacuagccauccuuaaagguauauacaacguugcaacaugcggacuuuucggucuagucucauucuuauuacuaugcggaagaucaugcuccacaaccuacaaaggaguauaugaauuacaaaccuuagaauuagacaugacaaaccuuaauaugacuaugccacucuccuguacuaaaaacaacucacaccacuacauaaugguaggaaacgaaacaggacuagaacuaacauugacaaacacaucaauaauaaaucauaaauuuugcaauuuaucagacgcacauaagaaaaaccucuacaaccacgccuuaaugucaauaauaucaacauuccaucuaucaaucccaaacuucaaccaauacgaagcaaugucaugcgacuucaauggcggaaaaauaucuguacaauacaauuuaucacacgcauacgcagucgaugcagcaaaccacugcggaacaauagcaaacggaguauuacaaacauucaugcgaauggcauggggcggaucauauauagcacuagauucaggaaaaggcucaugggacugcauaaugacaagcuaccaauacuuaauaauucaaaacacaacaugggaagaccacugccaauuuucaagacccucacccauaggcuaucuaggacuauuaucacaacgaacacgagacauauacauaucaagacgacuacuaggaacauuuacauggacccuuucagacucagaaggcaaugaaacaccaggagguuauugccuaacacgauggaugcuaauagaagccgaauuaaaaugcuucggaaacacagcuguagcaaaauguaacgaaaaacaugaugaagaauuuugugacaugcuaagacucuucgacuucaacaaacaagcaauaagaagacuaaaaacagaagcacaaaccaacauccaacuaauaaacaaagccguaaaugcauuaauaaacgaucaacucaucaugaaaaaccaccuacgagacauuaugggaauaccauauuguaacuacuccaaguauugguaccuaaaccacacagucacaggaaaaacaucauuaccaagaugcugguuaguaagcaacggaucauaccuaaacgaaacccacuuuucagacgacauagaacaacaagccgacaauaugauaacagaacuauuacaaaaagaauacauggacagacaaggcaaaacaccccuaggacucgucgacuuauuuguauucucaacaucauucuacuuaauaagcauauuccuacaucucgucaaaauaccaacacacagacacaucauaggcaaacccuguccaaaaccccauagauuaaaucacaugggaaucugcucaugcggucuauacaaacacccaggaguuccaguuaaauggaaaagauaa

SEQ ID NO: 1794 - RNA, 1473 nt, Artificial Sequence
  derived and/or modified protein sequence (opt6) from LASV(ISTH0595-NIG-2011;Clade II)__AIT17428__GPC
augggccaaauaauaacauucuuucaagaaguaccacacguaauagaagaaguaaugaacauaguuuuaauagcacuuucacuccuagcaaucuuaaaaggaauauacaacguagcaaccuguggccuauucggacuaguaagcuuccuacuacuaugcggaagaucuugcucaacuacauacaaaggagucuacgaacuccaaacacuagaauuagauauggccucacucaauaugacaaugccccuaucaugcacaaaaaauaacucacaccacuauauaauggucggaaacgaaacaggauuagaacuuacauuaacuaacacaucaauaauuaaccacaaauucuguaaucuauccgacgcucacaaaaaaaaucuuuacgaccacgcacuuaugucaauuauaucaaccuuccauuuaucuauacccaacuucaaccaauacgaagcaaugagcugcgauuuuaacggcggaaaaauaucuguacaauacaauuuaucucauacauacgcugucgacgcagccaaccacuguggaacaauugcaaacggcguucuacaaacauucaugcgaauggcuugggguggauccuacaucgcacucgacucaggaaaaggaucaugggacugcauuaugaccagcuaccaauaccuaauaauccaaaacacuacaugggaagaccauugucaauuuuccagaccauccccaauaggauacuuaggauuacuuucacaaagaacaagagacauauacauauccagaagauuacuaggcacauucacauggacauuaucagacuccgaaggaaacgaaacaccaggaggauauugccucaccagauggaugcuaauagcagcagaccuaaaauguuucggaaauacugcuguagcaaaaugcaaugaaaaacacgacgaagaauucugcgacauguuacgucuauucgacuuuaacaaacaagcaauagaacgacuaaaaacagaagcacaaaugucuauacaacuaauaaauaaagcagucaacgcacuaauuaaugaucaacuaauaaugaaaaaccaccuaagagacauaaugggaaucccauacugcaauuacucaaaauauugguaccuaaaccacacaguaacaggacgaacaucucuaccacguugcuggcuaguaucaaacgguucauaccuaaacgaaacacauuucucagacgacauagaacaacaagccgauaacaugauaacagaauuauuacaaaaagaauacauggacagacaaggaaaaaccccacucggacuaguagauuuauucguauucuccacaucauuuuaucucaucucuauauucuuacacuuaguacgcauaccaacacauagacauguaauaggaaaaccauguccaaaaccacauagacuaaaccauaugggcauauguuccugcggacuauauaaacacccagguguacccgucaaauggaaaagauaa

SEQ ID NO: 1795 - RNA, 1473 nt, Artificial Sequence
  derived and/or modified protein sequence (opt6) from LASV(ISTH0964-NIG-2011;Clade II)__AIT17430__GPC
augggacaaauaauaacauuuuuccaggagguaccacacguaauagaagaaguaaugaacauaguauuaauagcacucucacuacuagcaauacucaaaggaauauacaacguagcaacauguggccuuuucggauuagucucauuccuauuauuaugcggcagaucaugcucuacaacauacaaaggcguauacgaacuacaaacauuagaacuagacauggccucuuuaaacaugaccaugccucuaucaugcacaaaaaacaacucacaucacuacauaaugguaggaaaugaaacaggacuagaacuaacacuaacaaacacaucaauaauaaaccacaaauuuugcaacuuaucagaugcacauaaaaaaaauuuauaugaucaugcacuaaugagcauaauaucaacauuccaucuauccauaccaaacuucaaccaauacgaagcaaugucaugcgacuuuaacgguggaagaauaucuguacaauacaaucuaucccacacauacgccguagaugccgcaaaacacuguggcacaauugcaaacggaguauuacaaacauucaugagaauggcauggggaggcucauacauagcacuagacucaggaaaaggaucaugggacugcauaaugacaucauaccaauaucuuauaauccaaaacaccacaugggaagaucauugccaauucucacgccccucaccaauaggauaucuaggccuucuaucccaaagaacaagagauauauauaucuccagaagacuauuaggaaccuucacauggacauuaucagauucugaaggcaaugaaaccccaggaggcuacugcuuaaccagauggauguuaaucgaagcagaauuaaaaugcuucgguaauacagcagucgccaaaugcaaugaaaaacacgacgaagaauucugugacaugcuaagacuauucgacuuuaacaaacaagcaaucagaagacuaaaaacugaagcccaaauguccauccaauuaauaaacaaagcaguaaacgcacuaauaaacgaccaacucauaaugaaaaaucaucuaagagauauaaugggaauaccauacugcaacuauuccaaauauugguauuuaaaucacaccguaacaggaaaaaccucacuaccacgaugcugguuaguaucaaacggaucauaccuaaacgaaacacacuucucugacgauauagaacaacaagcagacaacaugauaaccgaacuuuuacaaaaagaauacauugacagacaaggaaaaacaccacuaggacuaguugaccucuucguauucuccacaucauucuaucuaauaucuauauuuuuacaccuagucaaaauaccaacacaucgacacgucaucggaaaacccugccccaaaccacacagacuaaaccauauggguauauguagcugcggccuauacaaacauccaggaguaccaguaaaauggaaaagauaa

SEQ ID NO: 1796 - RNA, 1473 nt, Artificial Sequence
  derived and/or modified protein sequence (opt6) from LASV(ISTH1038-NIG-2011;Clade II)__AIT17438__GPC
augggacaaauaauaacauuuuuccaggagguaccacacguaauagaagaagucaugaacaucguauuaaucgcauuaucacuccuagcuauccuaaaagguauauacaacguugcaaccugugguuuauucggacuuguaucauuccuacuauuaugugggagauccugcucaacaacuuacaaaggcguauacgaacuacaaacacuagaauuagacauggccaacuuaaacaugaccaugccacuaucauguacaaaaaauaacucccaccauuacaucagagucggaaacgaaacaggccuugaacuaacauuaaccaauaccucaauaauaucacauaaauucuguaaucuaucagacgcccacaaaaaaaaccucuacgaccacgcccuaaugucaauaauaucaacauuucacuuaucaaucccaaauuucaaucaauacgaagcaaugucuugugacuuuaauggaggaaaaauuuccguacaauauaacuuaucacacacauacgcaguagaugcagcaaaccauugcgguacaauagccaacggaguccuacaaacauuuaugagaauggcauggggaggaucauacauagcacuagacucagguaaagguucaugggacugcauaaugacauccuaccaauaccuaauaauacaaaacacaacaugggaagaucacugucaauucagucgaccauccccuauaggauaccuaggacuauuaucacaaagaacacgagacauauacauaucaagaagauuauuaggcacauucacuuggaccuuauccgauucagaaggaaaagaaacaccaggaggcuauugucuaaccagauggaugcuuauagaagcagagcuaaaaugcuucggaaacacugcaguagcaaaaugcaacgaaaaacaugacgaagaauuuugugauaugcuuagacuauuugacuucaauaaacaagcaauacgaagacuaaaaacagaagcacaaaugaacauacaauuaauaaacaaagcaguaaaugcacuaaucaaugaccaauuaaucaugaaaaaucaucuaagagacaucaugggaauaccauacugcaauuacucaaaauacugguacuuaaaccacacuguaacuggaaaaacuucucuaccaagaugcugguuagucuccaauggaucauacuuaaaugaaacacauuuuucagacgacauagaacaacaagcagacaacaugauaacagaauuacuccaaaaagaauauauagauagacaaggaaaaacuccacuaggauuagucgaucuauuuguauuuuccacauccuuuuaccuaauauccaucuuuuuacacuuaguaaaaauaccaacacauagacauguaauuggaaaaccaugcccaaaaccacaucgccuuaaccaaaugggaauauguucaugcggauuauacaaacaaccuggaguaccaguaaaauggaaacgauaa

SEQ ID NO: 1797 - RNA, 1473 nt, Artificial Sequence
  derived and/or modified protein sequence (opt6) from LASV(ISTH1048-NIG-2011;Clade II)__AIT17442__GPC
augggacaaauaauaacauucuuucaagaagucccacauguaauagaagaaguuaugaacauaguccuaauagcacuaucuuuacuagcaauauuaaaagguauauacaauguagcaacaugcggacuauucggucuaguaucauuccuacuacuaugcggaagaucauguucaacaaccuacaaaggaguauaugaacugcaaacauuagaacuagacauggcaucacucaacaugacuaugccucuaucaugcaccaaaaacaauucacaccacuacauaaugguaggaaacgaaaccggauuagaacuaacacuaacaaacacaucuauaaucaaucauaaauucugcaauuuaagcgacgcacaccgcaaaaaccuauacgaucacgcacucaugaguauaauaucaacuuuucaccuaucaaucccaaacuucaaccaauaugaagcaaugucaugcgacuucaauggaggaaaaauauccguacaauauaacuuaucacacgcauaugcagucgaugcagcaaaccacuguggaacaauagcaaacggaguauuacaaaccuuuaugagaauggccuggggcggauccuauauagcacuagauucaggcaaaggaucaugggauugcauaaugacaaguuaucaauaccuaauaauacaaaacacaucaugggaagaccacugccaauucucaagacccagcccaaucggauaucuaggauuauuaucacaaagaacaagagacauauauauaaguagaagacuauuaggaacuuuuacauggacauuauccgacucagaaggaaacgaaacaccaggcggauacugcuuaacccgauggaugcuaauagaagccgaauuaaaaugcuucggaaauacugcagucgcaaaauguaacgaaaaacacgacgaagaauuuugcgacaugcucagacuauucgacuuuaacaaacaagcaaucagacggcuaaaaacagaagcacaaaugucuauacaauuaauaaacaaagcuguuaacgcacuaauuaaugaccaacuaauaaugaaaaaucaucuaagagauauaaugggcauaccauacugcaacuacucaaaauacugguaccuaaaucacacuguaacaggaaaaacaucauuaccaagaugcugguuaguaucuaacgguucauaccuaaacgaaacacacuucucagacgacaucgaacaacaagccgauaacaugauaacagaacuacuacaaaaagaauacauagaucgccaaggaaaaacaccucuaggccuagucgaccuauucguauuuucaacauccuucuacuuaauuucaauauuucuacacuuaguaaaaauaccaacccacagacacguaauaggaaaaccaugcccaaaaccacaccgaauaaaccacaugggaauauguucaugcggacuauacaaacauccaggaguaccagucaaauggaaacgauaa

SEQ ID NO: 1798 - RNA, 1473 nt, Artificial Sequence
  derived and/or modified protein sequence (opt6) from LASV(ISTH1058-NIG-2011;Clade II)__AIT17446__GPC
augggacaaauaauaaccuucuuucaagaaguaccccaugucauagaagaaguaaugaacauaguauuaauugcacucagucuacuagcaauacuaaaaggcauauacaacguagcaaccugcggacuauucggcuuagucucauuccuucuauuaugcggacgaucaugcaguacaacauacaaaggaguuuacgaacuccaaacauuagaauuagauauggcaucauuaaacaugacaaugccuuuaucuugcacuaaaaauaacucacaccacuacauaaugguaggaaaugaaacaggacuagaacuaacccuaaccaacacuucaauaauaaaucacaaauuuugcaaccucucagacgcacauaaaaaaaaucucuaugaucaugcuuuaauguccauaauaucaacauuccauuuaucaauaccaaacuucaaccaauacgaagcaaugucaugugacuucaauggaggaaaaauaucaguacaauauaaccuaucacauacuuacgcagucgacgcagcaagccauuguggaacagucgcaaauggcguacuacaaacauucaugcgcauggcauggggaggaucauacaucgcauuagauuccggaaaaggaucaugggacuguauaaugacuucauaccaauaucuaauaauacaaaacacuacaugggaagaccacugucaauucucaagaccaucaccaauaggcuaucuaggacuauuaagccaaagaaccagagauauauacauaucaagaagauuacuaggcacauucacauggacccuuucagacagcgaagguaacgaaacaccuggaggauauugucuaacaagauggauguuaauagaagcagaauuaaaaugcuuuggcaauacagcaguagcaaaaugcaaugaaaaacacgaugaagaauucugcgacauguuaagacucuuugacuuuaacaaacaagcaauaagacgucuaaaaacagaagcccaaaugucuauacaacuaauaaacaaagcaguaaacgcacuaauaaaugaucaacuuauaaugaaaaaucaucuuagagauauaaugggaauaccauacugcaauuacucaaaauacugguaucucaaucacacaguaaccggaaaaacauccuuaccaagaugcuggcuaguuuccaacggaucauacuuaaacgaaacacacuucagugacgauauagaacaacaagcagacaacaugauaacugaacuauuacaaaaagaauacauggaccgccaaggaaaaacuccauuaggacucguagaccucuucguauuuucaacaaguuucuaucuaauauccauauuccuacacuuaguaaaaauaccaacacauagacacguaauaggaaaaccaugucccaaaccacaccgauuaaaccacaugggaauaugcucauguggcuuauacaaacauccagguguaccaguaaaauggaaacgauaa

SEQ ID NO: 1799 - RNA, 1473 nt, Artificial Sequence
  derived and/or modified protein sequence (opt6) from LASV(ISTH1064-NIG-2011;Clade II)__AIT17450__GPC
augggacaaauaauaacauuuuuccaagaagucccucacguaauugaagaaguuaugaauauaguacuaauagcacuaucauuauuagcaauccuaaaaggaauauacaaugucgcaacaugcggauuauucggacuaguaucauuccuacuacuaugcgguagaucuugcucaacaacuuacaaaggaguauacgaacuacaaacacuagaacuagacauggcaucauuaaauaugacuaugccacuuuccugcacaaaaaauaauucacaccacuacaucauggucgguaaugaaacuggccuagaauuaacccuuacaaacacauccauaauaaaccacaaauucugcaaccuuucagacgcacacaaaaaaaacuuauacgaucacgcacuaaugucaauaauaucuacauuccauuuaucaauccccaacuucaaucaauaugaagcaaugucaugcgacuucaauggaggaaaaauaucaguccaauauaaccuaucacacacauacgcagucgacgcagcaaaccacugcggaacaaucgcaaacgguguacuccaaacauuuaugcgaauggcauggggaggaucauauauagcccuugacuccggaaaagguucaugggauugcauuaugacauccuaccaauauuuaaucauacaaaacaccaccugggaagaucacugccaauucucaagaccauccccaauaggauaccuaggucuacuuucacaaagaacaagagauauuuacauaagccgacgauuacuaggaacuuucaccuggacccuaucagacucagaaggaaacgaaacaccagguggauauugucuaacaagauggaugcuaauagaagcagaauuaaaaugcuuuggcaauacagcaguugcaaaaugcaacgaaaaacaugacgaagaauucugcgauaugcuacgacuauucgacuuuaauaaacaagcaauccgacgcuuaaaaaccgaagcccaaaugucaauccaauuaauaaacaaagcagucaacgccuuaaucaaugaccaacucauaaugaaaaaccaccuaagagauauaaugggcaucccauacuguaacuacuccaaauacugguaccucaaccacaccguaaccggaaaaacaucucuaccacgcugcugguuaguauccaauggaucauaccuaaaugaaacacauuucucugaugacaucgaacaacaagcugauaauaugauaacagaacuacuacaaaaagaauacauagauagacaaggaaaaacaccauuaggacuagucgaccuauucguauucucuacaucguucuauuuaaucuccaucuuccuacaccuaguaaaaauaccaacacacagacacauaauaggaaaaccaugcccaaaaccacaccgucuaaaccacaugggaauauguucuugcggauuauauaaacaccccgguguacccguaaaauggaaaagauaa

SEQ ID NO: 1800 - RNA, 1473 nt, Artificial Sequence
  derived and/or modified protein sequence (opt6) from LASV(ISTH1069-NIG-2011;Clade II)__AIT17454__GPC
augggacaaauaaucacauucuuccaagaaguaccucauguuaucgaagaaguaaugaacaucguauuaauagccuucucuuuacuagccauauuaaaaggaauauauaauguagcuacauguggacuauucggacuuguaucauuccucuuauuaugcggaagaucuugcuccaccacauacaaagguguuuaugaacuacaaacacucgaacucgacauggcaucacuuaauaugacuaugccacuaucauguacuaaaaauaacucacaccacuacauaaugguaggaaaugaaacaggacuagaacuaacacuaacaaacacuuccauaauaaaccacaaauuuugcaaccuauccgaugcacauaaaagaaaucuauacgaccacgcacuuaugucaauaauaucaacauuccacuuaucaauaccaaacuucaaccaauaugaagccaugagcugcgauuucaauggcggcaaaaucucaguacaauacaaucucucacacacauacgcaguagaugcagcaggucauugcggaacaauagcaaaugguguauuacaaacauucaugagaauggcauggggagguucauacauagcacuagacucaggaaaaggcucaugggauuguauaaugacauccuaccaauaucuaauaauccaaaacaccacaugggaagaucacugccaauucucaagaccaucaccuauaggauacuuaggcuuacucucacaaagaacccgagauauauacauaucccgaagauuauuaggcacuuucacauggaccuuaucagauucagaaggaaacgaaacccccggaggcuacugccuuacaagauggauguuaauagaagcagaacuaaaauguuucggaaacacagcaguagcaaaaugcaaugaaaaacacgacgaagaauuuugcgauauguuaagacuauucgauuucaacaaacaagcaauccgaagacuaaaaacagaagcacaaaugucaauacaauuaauaaacaaagcaguaaaugccuuaaucaacgaccaauuaauaaugaaaaaccauuuaagagacauaaugggcaucccauacugcaauuauucaaaauacugguacuuaaaccacacaauaacagguaaaacaucacuaccccgauguuggcuaguauccaacggaagcuacuuaaacgaaacccauuucuccgacgauauagaacaacaagcagacaauaugauaacagaauuacuccaaaaagaauacauggacagacaaggcaaaacaccacuaggacucguagaccuauucguuuucucaacaucauucuaucuaaucagcaucuuucuccaccuagucaaaauaccaacccaccgacacaucauaggcaaacccugcccaaaaccacauagacuaaaccacaugggaauaugcucuugcggauuauacaaacaucccggaguuccaguaagauggaaacgauaa

SEQ ID NO: 1801 - RNA, 1473 nt, Artificial Sequence
  derived and/or modified protein sequence (opt6) from LASV(ISTH1096-NIG-2012;Clade II)__AIT17458__GPC
augggacaaauaauaaccuucuuccaagaaguaccccacguaaucgaagaaguaaugaauauaguacuaauagcacuauccuuacuagccauacuaaaaggaaucuacaauguagcaacaugcggccuauuuggauuaguauccuucuuacuacucugcggacgaucauguucaacaacauacaaaggcguauacgaacuucaaacucuagaacuagacauggcaagcuuaaauaugacaaugccauuaucaugcacaaaaaacaacucacaucauuacauaauggucggaaacgaaacaggacuagaauuaacacuuacaaacacuuccauuauaaaccacaaauucugcaacuuauccgacgcccauaaaaaaaaucuauacgaccaugcucuaauguccauuauaaguaccuuccaccuaucuauaccaaacuucaaccaauacgaagcaaugucuugcgauuucaacggaggaaaaauaucaguacaauacaaucuaucacacacauaugcaauagaugcagcgaaccacuguggaacaauagcaaauggaguacuucaaacauucaugagaauggcauggggaggcucauauauagcacuagacucaggaaaaggaucuugggauugcaucaugacuacauaccaauacuuaauaauucaaaacacuacaugggaagaccacugccaauuuucaagaccaucaccaauaggauaccuaggucucuuaucacaaagaacuagagauauauacauaucccgaagauuauuaggaacauucacauggacccuaucagacucugaaggaaacgaaacaccaggaggauacugucuaacucgauggauguuaauagaagcagaauuaaaaugcuuuggaaacacagcaguagcuaaaugcaaugaaaaacacgacgaagaauuuugugauaugcuaagacuauucgauuucaacaaacaagcaauaagacgacuaaaaaccgaagcacaaaugucaauacaacuaauaaauaaagcaguaaacgcucucauaaacgaccaacucauaaugaaaaaucauuuacgagacauaaugggaaucccauauugcaacuacucaaaauacugguauuuaaaccauacuguaacaggaaaaacaucauuaccaagaugcuggcuuguaagcaauggaucauauuuaaacgaaacacauuucagcgacgacauagaacaacaagcagacaacaugauaacagaacuacuacaaaaagaauacauggaccgacaaggaaaaaccccucuuggacuuguagaccuuuuuguauucuccacaucuuucuaccuaaucucaauauuccuacaucuaguaaaaauacccacacacagacacgucauaggaaaaccaugcccaaaaccccacagacuaaaccauaugggaauaugcucaugcggacuauacaaacauccagguguaccugucaaauggaaacgauaa

SEQ ID NO: 1802 - RNA, 1473 nt, Artificial Sequence
  derived and/or modified protein sequence (opt6) from LASV(ISTH1107-NIG-2012;Clade II)__AIT17462__GPC
augggacaaaucaucacauucuuucaagaaguaccacauguaauagaagaaguaaugaauauaguauuaauagcauuaucauuauuagcaauacuaaaaggaauauauaacgucgcaacaugcggauuauucggauuaguaucauuccuacuacuaugcggaagaucaugcucaacaaccuacaaaggaguauacgaauuacaaacacucgaacuagauauggcaucacuaaacaugacaaugccucuaucaugcacuaaaaacaacucacaucacuacaucaugguaggcaaugaaacaggauuagaauuaacacuaaccaauacaucaauaauaaaucacaaauuuuguaaucucucugacgcacacaagaaaaaucuauaugaccacgcacuaaugucuauaauaagcacauuucaccuuaguauuccaaacuucaaucaauacgaagcaaugucaugcgacuuuaauggaggaaaaaucucaguacaauacaacuuaucacacgcauacgcaguagacgcagccaaccacugcggaacaauugcaaacggaguacuacaaacauuuaugcgaauggcaugggguggaucauauauugcucuagacuccggaaaaggaucaugggacugcauaaugacuucauaccaauaccucauaauacaaaacacuacaugggaagaccacugccaauucucaagaccauccccaauaggauauuuaggucuauuaucacaacgaacacgagauauauauauuucaagaagauuacuaggaacauuuacauggacccuaucagauucagaaggaaaugaaacaccaggcggauauugcuuaaccagauggaugcuaauagaagcagaacuaaaaugcuucggaaacacagcaguagcaaaaugcaacgagaaacacgacgaagaauuuugugauaugcuacgauuauucgauuucaauaaacaagccauaagacgucuaaaaacagaagcucaaaugucaauacaauuaauaaacaaagcaguuaaugcauuaauaaacgaucaacuaaucaugaaaaaccacuuacgcgauauaaugggaauacccuacugcaacuacucaaaauauugguaccuaaaccacacaguaacuggaaaaaccucacuacccaaaugcugguuaguauccaacggaucauaccuaaaugaaacacacuuuucagacgacauagaacaacaagcagacaacaugauaacagaauuauuacaaaaagaauacauagacagacaaggaaaaaccccauuaggccuagucgacuuauucguauucuccacaucauucuaccucauaucaaucuuccuacauuuaguaaaaauaccuacacacagacacguaauaggaaaaccauguccaaaaccacaccgacucaaccacaugggcauaugcucaugcggacuauacaaacauccaggaguacccguaaaauggaaaagauaa

SEQ ID NO: 1803 - RNA, 1473 nt, Artificial Sequence
  derived and/or modified protein sequence (opt6) from LASV(ISTH1111-NIG-2011;Clade II)__AIT17466__GPC
augggacaaauaauaacauucuuucaagaaguaccacaaguaauagaagaagucaugaauauaguauuaauagcauuaucacuacuagccauacuaaaaggaauauauaacguagccacuuguggacuauucggacucguaucauuccuccuacuaugcggucgaucaugcuccacaacauacaaaggcguuuaugaacuacaaacacuugaacucgacauggcaucacuaaauaugacaaugccauuaucaugcacaaaaaacaacucccaucacuacauuaugguaggaaacgaaacaggucuagaacucacacuuacaaaucaauccauaauaaaccacaaauucuguaaucuaucagacgcccauaaaaaaaaucuuuacgaucaugcacuaaugucaaucauaucaacauuucaccuaucaauaccaaacuucaaccaauacgaagccaugucaugcgauuuuaacggaggaaaaauauccguacaauacaaucuuucccauacauuugccguugacgcagcaaaccacugcggaacaauagcaaauggagucuuacaaacauucaugagaauggcauggggaggauccuauauagcauuagacucagguagagguucuugggauugcauaaugacaucauaccaauaccuaaucauccaaaauacaacuugggaagaucacugucaauucucaagaccaucaccaaucggcuaccuaggauuacuaucucaaagaacacgagacauauacauuucaagacgacuacuaggcacauucacauggaccuuaucagauucagaaggcaaugaaacaccugguggauacugucuaaccagauggauguuaauagaagcagaauuaaaaugcuucggaaauacagcaguagcaaaauguaaugaaaaacacgacgaagaauucugugauaugcuacgacuauucgauuucaacaaacaagcaauacgaagacucaaaacagaagcacaaaugagcauacaacuaaucaacaaagcuguaaacgcauuaaucaacgaccaacuaauaaugaaaaaucaucuaagagacauaaugggaauaccauauugcaacuauucuaaauacugguacuuaaaucacaccauaacaggaaaaacaucccuacccagaugcuggcuugucucaaacggaucauaccuaaacgaaacacacuucucagaugacauagaacaacaagcugauaacaugauaacagaauuacuacaaaaagaauauauggauagacaaggcaaaacaccacuaggccuaguagaccuauucguuuucucaacaucauucuaccuaauaucaauauuccuacaccuagucaaaaucccaacacacagacacguaaucggaaaaccuugcccaaaaccacauagauuaaaucacaugggaaucugcucuuguggacuauauaaacacccagguguuccaguaaaauggaaaagauaa

SEQ ID NO: 1804 - RNA, 1473 nt, Artificial Sequence
  derived and/or modified protein sequence (opt6) from LASV(ISTH1121-NIG-2012;Clade II)__AIT17470__GPC
augggucaaaucauaacauuuuuccaagaaguaccacacguaauagaggaagucaugaacauaguauuaaucgcacuuaguuuacuagccauauuaaaaggaauauacaauguagccacaugcggauuauucggacucguaucauuccuauuacucugcggaagaucaugcucaacaacauacaaaggcguauacgaacuacaaaccuuagaacuagacauggcaucauuaaacaugaccaugccacuaucaugcaccaaaaacaacucacaccacuacauaaugguaggaaacgaaacaggauuagaauuaacauuaacaaacacaucaaucaucaaccacaaauucugcaacuuauccgacgcacacagaaaaaaucuauacgaucacgcccuaaugucaauaauuagcacauuucauuuaucaauaccaaauuucaaccaauacgaagcaauguccugcgacuucaacgguggaaaaauaucaguacaguacaacuuaucccacacauacgcaguagaugccgcaaaucacugcggaacaauagccaauggaguauuacaaacauucaugcgaauggcauggggaggaucauacauugcacuagacucuggaaaaggaucuugggauuguauaaugaccucauaucaauaucuaaucauccaaaauacaaccugggaagaucauugucaauucucaagaccuucacccauaggauaccuaggauuacuuucccaaagaacacgagauaucuacauauccagaagacuacucggaaccuucacauggacccuaagcgauucagaaggaaacgaaaccccaggaggcuacugccuaacuagauggauguuaauagaagcagaauuaaaauguuucggaaauacagccgucgcaaaaugcaaugaaaaacaugaugaagaauuuugcgauaugcucagacuauucgauuuuaauaaacaagcaaucagaagacuaaaaacagaagcacaaauguccauacaacuaauaaacaaagcaguaaacgcauuaauaaacgaccaacucaucaugaaaaaccaucuaagagacauaaugggaaucccauacugcaauuacucaaaauauugguaccuaaaccauacaguaacuggaaaaacaucauuaccacgcuguuggcucgucaguaacgguucauacuuaaacgaaacacauuuuucagacgacauugaacaacaagcagacaacaugauaacagaacuacuccaaaaagaauacauagacagacaaggaaaaaccccauuaggauuaguagacuuauucguauucucaacaucuuucuaucuuauauccauauuucuucaccuaguaaaaauacccacacacagacacguaauaggaaaacccugucccaaaccacacagacuaaaccacaugggaauauguucaugcggacuauacaaacacccaggaguaccagucaaauggaaaagauaa

SEQ ID NO: 1805 - RNA, 1473 nt, Artificial Sequence
  derived and/or modified protein sequence (opt6) from LASV(ISTH1129-NIG-2012;Clade II)__AIT17474__GPC
augggucaaauaauaacuuuuuuccaagaaguaccacacguaauagaagaaguaaugaacauaguacuaauagcauuaucgcuauuagcuauacuuaaaggaauuuacaacgucgcaacaugcggauuauucggacuugucucauucuuacuacuauguggaagaucaugcucaacaacauacaaaggagucuacgaacuucaaacacuagaacuagacauggcauccuuaaauaugacuaugccacuaucaugcaccaaaaacaacucccaccacuacauaaugguaggaaaugaaacaggccuagaacuaacccuaacaaacacauccauaauuaaccacaaauuuugcaaccuauccgacgcacacaaaaaaaacuuauacgaccacgcacucaugucaaucauaagcacauuccacuuaucuauaccaaacuuuaaucaauaugaagcaaugucaugcgacuucaacggcggcaaaaucucaauacaauacaaccugucacacacauacgccguugacgcagccaaccacugcggaacaauugccaacggcguucuacaaacauucaugcgaauggcauggggcggaucauauaucgcacuagauucagguaaaggaucaugggauugcauaaugaccucauaucaauaccucaucauacaaaacacaacaugggaagaucacugccaauucagccgacccucaccaauaggauaucuuggccuacuuucccaacgaacucgagauauuuauauaucacgaagacuacuuggaacauucacauggacacuaucagacucagaaggaaacgaaacuccaggaggauacugccuaacccgcuggauguuaauagaagcagaauuaaaaugcuucggaaauacagcuguagccaaaugcaacgaaaaacacgacgaagaauuuugcgauaugcuaagacuauucgacuucaacaaacaagccauuagacgacuaaaaaccgaagcacaaaugucaauacaauuaaucaacaaagcaguaaacgcacucauaaacgaucaacuaaucaugaaaaaccauuuacgagauauaaugggaauaccauacugcaauuacucaaaauauugguacuuaaaccacacuauaaccggaaaaacaucauuaccaagauguugguuagucuccaauggaucauaucuaaaugaaacacacuucucagacgacauagaacaacaagcagauaacaugauaacagaacuauuacaaaaagaauacauugaucgacaagguaaaacaccacuaggacuaguagaucucuuuguauuuucuacaucuuucuaccuaauauccauuuuccuacaccucguaaaaauccccacccacagacacauaacaggaaaaccuugcccaaaaccacacagacuaaaccauaugggaauaugcucuugcggccuauacaaacauccaggaguaccaguaagauggaaacgauaa

SEQ ID NO: 1806 - RNA, 1473 nt, Artificial Sequence
  derived and/or modified protein sequence (opt6) from LASV(ISTH1137-NIG-2011;Clade II)__AIT17478__GPC
augggacaaauaauaacauuuuuccaagaagucccacacguaauagaagaaguaaugaacauaguucuaauagcccuaaguuuauuagccauacuuaaagguauauauaauguugcaaccugcggcuuauucggucuaguuucauuccuacuauuaugcggaagaucauguucaacuacauacaaaggaguauacgagcuccaaacauuagaacuagacauggcaucacuaaacaugacaaugccacuaucauguacuaaaaacaacucacaccauuacauaaugguaggaaacgaaacaggucuagaauuaacauuaacaaauacuucuauaauaaaccauaaauucugcaaucuaucugacgcacauaagaaaaaucuauaugaccaugcacuaauguccauaauaucaaccuuccaccuaucaaucccaaacuucaaccaauacgaagcaaugucuugcgacuuuaauggcggaaaaauauccguacaauacaaucuaucacacacauaugcaguagacgcggccgaccauugcgguacaauagcaaacggaguacuacaaacauucaugagaauggcauggggaggaucauacauagcauuagacuccgguaaaggaucuugggacugcauaaugacaaguuaccaauacuuaauaauacaaaauaccacaugggaagaccacugccaauucucacguccuucaccaauaggauacuuaggucuacucagucaaagaacuagagauauauauauaucaagaagacucuuaggaacauuuacauggacacuaucagacucagaaggaaacgaaacacccggaggauauugcuuaacaagauggauguuaauagaagccgaacuuaaaugcuucggaaauacagcaguagcuaaauguaacgaaaaacaugaugaagaauuuugugauaugcuaagacucuucgacuucaauaaacaagcaauaucaagacuaaaaacagaagcacaaaugagcauacaauuaauaaauaaagcuguuaacgccuuaauaaacgaccaacuaauaaugaaaaaucaccuaagagacauaaugggaauaccauacugcaacuacucaaaauacugguaccuuaaucacacagucacagguaaaacaucacucccaagauguuggcucguaucaaacggaucauaccuaaacgaaacccacuucucagacgacauagaacaacaagcagacaacaugauaacagaaauguuacaaaaagaauacauugacagacaagguaaaaccccauuaggucuaguagaccuauucgucuuuuccacauccuucuaccuaauaagcauauucuuacaccucguuaaaauaccaacucauagacacguaaucggaaaaccauguccaaaaccacauagacuuaaccacaugggaauaugcucuugcggauuauacaaacacccaggaguaccaguuaaauggaaacgauaa

SEQ ID NO: 1807 - RNA, 1473 nt, Artificial Sequence
  derived and/or modified protein sequence (opt6) from LASV(ISTH2010-NIG-2012;Clade II)__AIT17482__GPC
augggacaaaucauaacuuucuuucaagaaguaccccacguaauagaagaaguaaugaacauaguauuaauagcacuaucucuacucgccauacucaaaggcaucuauaauguagcaacaugcggcuuauuuggauuaguaucuuuucucuuauuauguggacgauccugcucaacaacauauaaagguguauacgaauuacaaacacuagaacuagacauggccucacuaaacaugacaaugccacuaucaugcaccaaaaauaacucacaccauuauauuaugguaggcaacgaaacaggacucgaacuaacccuaacaaacacaucaauaauaaaccacaaauucugcaauuuaucugacgcacacaaaaaaaaucucuaugaccaugcccuaaugucaauaauaucaacuuuccaccuaucaaucccaaacuucaaccaauaugaagcaaugucaugcgacuuuaacggaggcaaaaucuccguacaauacaaucucucccacgcauacgcaguagacgccgcaaaccauuguggcacaauagcaaauggugucuuacaaacauucaugcguauggcauggggaggaucauacauagcucuagacagcggaaaaggcucaugggauuguauaaugacuucauaucaauacuuaauaauacaaaacauaaccugggaagaccacugucaauuuucacgacccucacccauagguuacuuaggacuacuaagccaaagaaccagagauauauacauaucuagaagauuacuaggaacauucacauggacacuaucagacuccgaaggcaacgaaacaccaggaggauacuguuuaacuagauggaugcuaauagaagcagaacuaaaaugcuucggaaauacagcaguagccaaauguaaugaaaaacaugaugaagaauucugcgauaugcuacgucuauucgacuucaacaaacaagcaauucgaagauuaaaaacagaagcacaaaugucaauacaacuaauuaacaaagcaguaaacgcauuaauaaacgaucaauuaauuaugaaaaaccacuuaagagacauaaugggaaucccauauugcaacuacucaaaauacugguauuuaaaucauacaguuacaggcaaaacaucccuaccaagaugcuggcuagucucaaacggaucuuaccugaaugaaacacacuuuucagacgacauagaacaacaagcagauaacaugauaacagaacuauuacaaaaagaauacauagacagacaaggaaaaacuccacuaggacuuguagaccuauucguauucaguacaucauucuaccucauaagcauauucuuacaccuaguaaaaauaccaacacauagacauguagucggaaaaccuugcccaaaaccacacagguuaaaccauauggguauaugcucuugcggacuauauaaacacccaggaguaccugucaaauggaaacgauaa

SEQ ID NO: 1808 - RNA, 1473 nt, Artificial Sequence
  derived and/or modified protein sequence (opt6) from LASV(ISTH2016-NIG-2012;Clade II)__AIT17486__GPC
augggacaaaucauaacauucuuccaagaaguaccccaugucauagaagaagucaugaacauaguucuaauagccuuaucacuccuagcaauauuaaaaggaauauauaacguagcaaccugcggauuauucggcuuagucucauuccuacuccuaugcggacgaucuugcucaacaacauacaaaggagucuacgaauuacaaacacuagaauuagacauggcaucucuaaauaugaccaugccauuaucaugcaccaaaaacaacucacaucauuacauaauggucggaaacgaaacaggauuagaacuaacccuaacaaacacaucaaucaucaaccauaaauuuugcaaucuaucagacgcacacaagaaaaaucuauacgaucaugcacuaaugucaauaauaucuacauuccaucucucaauaccaaacuucaaucaauacgaagcaaugucaugugauuuuaacggaggaaaaauuucaguacaauacaaucuaucccauaccuacgcaguagaugcagcaaaucauuguggaacaauagcaaacggcguacuacaaacuuucaugagaauggcauggggaggaucauacauugcacucgacagugguaaaggaucaugggauuguauaaugacaucauaucaauaccucauaauucaaaacacaacaugggaagaccacugccaauuuucacgcccaucaccaguaggauaccucgguuuacuaagccaaagaacccgagacauauacaucucaagaagacuacuaggaacauucacauggaccuuaucagauagugaaggaaaugaaacacccggaggauauugccuaacacgcuggauguuaauugaagccgaacuaaaauguuucggaaacacagcaguugccaaaugcaaugaaaaacaugacgaagaauuuugcgacaugcuaagauuauucgauuuuaauaaacaagccauuagaagacucaaaaccgaagcacaaaugucaauccaacuaauaaauaaagcaguaaaugcauuaauaaacgaccaacuaaucaugaaaaaccaccuaagagacauaaugggaauaccuuacugcaauuauucaaaauauugguacuuaaaccacaccguaaccggcaaaacaucacuaccaagauguugguuaguaucaaacggaucauaccuuaacgaaacacacuucagcgacgacauagaacaacaagcagacaauaugauaacagaacuacuucaaaaagaauacauagacagacaaggaaaaacaccacucggacuuguagaucucuuuguauuuuccacaucuuucuaccucauaucuauauuccuccaccuaguaaaaauaccaacacacagacacguuaucgguaaacccuguccaaaaccacaucgacuaaaccacaugggcauauguucaugcggacuauacaaacaucccggagucccaguaaaauggaaacgauaa

SEQ ID NO: 1809 - RNA, 1473 nt, Artificial Sequence
  derived and/or modified protein sequence (opt6) from LASV(ISTH2020-NIG-2012;Clade II)__AIT17490__GPC
augggacaaauaauaacauucuuucaagaagucccacacguaaucgaagaaguaaugaauauuguccucauaacacuaucauuacuagcaaucuuaaaaggaauauacaauguagcaaccuguggacuauuuggacucguaucauuccuauuacuuugcgguagaucaugcucuacuacauauaaaggagucuaugaacuccaaacacuagaauuagauauggcaaaccuaaauaugaccaugcccuuaucaugcacaaaaaacaauagucaccacuacauuaugguuggaaacgagacaggucuagaacuaacccucaccaacacauccauaauuaaccacaaauucugcaaucuauccgacgcccauaaaaaaaauuuauacgaccacgcacuuauguccauaaucucaacuuuccaucuuucuauacccaauuuuaaccaauacgaagcuaugucaugcgauuuuaacggaggaaaaauaucaguacaauacaaucuaucacauaccuucgcaguagacgcagcaaaccacugcggaacaauagcuaauggaguccuacaaaccuuuaugagaauggcauggggaggaucauacauagccuuagacuccggaaaaggauccugggauugcaucaugaccuccuaccaauaucucauaauacaaaacaccacaugggaagaucacugucaauuuucucgaccaucaccaauagguuaccuaggacucuuaucucaaagaacaagagauaucuauauaucuagacgacuucuaggaaccuuuacuuggacauuaucugacuccgaagguaacgaaacaccaggaggauacugccuaacaagauggaugcuaauagaagccgaacuaaaauguuucggcaauacagcaguagcaaaauguaacgaaaaacacgacgaagaauuuugcgacauguuaagauuauucgacuuuaacaaacaagccauacgccgcuuaaaaacugaagcacaaaugagcauacaacucauuaauaaagccguaaacgcacucauaaacgaccaacuaauaaugaaaaaccacuuaagagacauuaugggaauaccauacuguaauuacucuaaauauugguaucuaaaucauacaguaaccggaaaaaccucauuaccaagaugcuggcuaguuucuaauggaucauaucuaaacgaaacacacuuuuccgacgacauagaacaacaagcagauaauaugauaacagaauuacuacaaaaagaauacauggaccgacaaggaaaaaccccuuuaggacuaguagaucuauucguauuuucaacaucauuuuaccuaauuucaaucuuccuacaucucguaaaaauaccaacacauagacacauaaucgguaaacccugccccaaaccacaccgccuaaaccacaugggcauaugcucaugcggauuauauaaacauccuggaguaccaguaaaauggaaacgauaa

SEQ ID NO: 1810 - RNA, 1473 nt, Artificial Sequence
  derived and/or modified protein sequence (opt6) from LASV(ISTH2025-NIG-2012;Clade II)__AIT17494__GPC
augggacaaauaauaacauucuuucaagaaguaccccacguaaucgaagaagucaugaacauaguccucauagcacuauccuuacuagcaauacucaaaggaguauacaacguagcaacuuguggccuauuuggacucguaucauuuuuauuacuauguggucgauccugcucuacaauauauaaaggaguauacgaacuccaaacauuagaauuagacauggcgucauuaaauaugaccaugccauuaagcuguaccaaaaauaacucacaccauuacaucaugguaggaaaugaaacaggacucgaacuaacacuaacaaacacauccauaauuaaccacaaauuuugcaaccuauccgaugcacacaaaaaaaacuuauacgaucacgcuuuaaugucaauaauauccacuuuucaccucucaauacccaacuucaaucaauaugaagcaaugucaugcgacuucaacggcggaaaaaucucaguccaauacaacuuaucacacaccuaugcuguagacgcagccaaccacuguggaaccauagcuaacggcguacuacaaacauucaugagaauggcauggggcgguucuuauaucgcacuagacucaggaaaaggauccugggacugcauaaugacaucguaccaauaccuaauaauacaaaacacuucaugggaagaucauugucaauucucaagaccaucaccaauaggauaccuaggccuauuaucucaaagaacuagagauauauacauaucaagaagacuuuuaggaacauucacauggaccuuaucagauucagaaggaaacgaaaccccaggaggauauugccuaacacguuggaugcuaauagaagcagaacuaaaaugcuucggcaauacagcuguagccaaaugcaacgaaaaacacgacgaagaauucugcgacauguuaagacuauucgauuucaacaaacaagcuauuagaagacuaaaaacagaagcacaaaugucaauacaacuaaucaacaaagcagucaacgcucuaaucaacgaucaacuaauaaugaaaaaucaucuccgagacauuaugggaauuccauauugcaacuacaguaaauauugguacuuaaaccacacaguuaccggaaaaacuagccucccccgaugcuggcuaguuucaaacgguucauauuuaaacgaaacccacuucuccgacgauaucgaacaacaagcagacaacaugaucacagaacuucuucaaaaagaauacauagaucgacaaggcaaaacaccccuaggacucguugaccucuucguauuuucaacaucauucuaccuaauaucaauauuccuucauuuaguaaaaauaccaacacacagacauguaauaggaaaaccauguccuaaaccacacagauuaaaccacaugggaauauguucauguggucuauacaaacacccaggaguuccaguaaaauggaaacgauaa

SEQ ID NO: 1811 - RNA, 1473 nt, Artificial Sequence
  derived and/or modified protein sequence (opt6) from LASV(ISTH2031-NIG-2012;Clade II)__AIT17498__GPC
augggacaaauaauaacuuuuuuccaagaaguaccccacguaauugaagaaguaaugaacauaguccuaauagcacuaucacuacucgcuauccuaaaaggaaucuauaacguagcaacauguggacuauucggacuaguaaguuuucuauuauuaugcggcagaucaugcucaaccacauauaaaggaguauacgaacuacaaacauuagaacuagacauggcaucacuaaacaugaccaugccccuuucguguaccaaaaacaauucucaucauuacauuauggucggcaacgaaacaggacuggaacuaacacuaacaaauaccucuauaauaaaucacaaauucugcaacuuaucagaugcacacaaaaaaaaucuauaugaucacgcauuaaugucaauaauaucaacauuccaccuauccauaccuaacuucaaccaauacgaagcaaugucaugcgacuucaacgguggaaaaaucucuguccaauauaaucuaucacacaccuaugccguggacgcagcaaaccacuguggaacaauagcaaacggaguuuuacaaaccuuuaugcgaauggcauggggaggaucuuacauagcacuagacucaggaaaaggaaacugggacugcauuaugacuucguaucaauaccuaaucauacaaaacacuacaugggaagaucacugucaauucuccagacccucaccuauaggauacuuaggucuauuaagccaaagaacuagagacauauacauaucacgcagacuuuuaggaacuuucacauggacccuaucagacucagaaggaaacgaaacaccaggaggcuauuguuuaacaagauggauguuaauagaaacagaacuaaaauguuucgguaauaccgccguagcaaaaugcaacgaaaaacacgacgaagaauucugcgacaugcuuagacuauucgacuucaacaaacaagccauaucaagacuaagaucagaagcccaaaugucaauucaacucauaaauaaagcaguaaacgcacuaauaaacgaucaauuaauaaugaaaaaccaccuaagagacauaaugggaauaccuuacugcaauuauucaaaauacugguaccucaaucauacaguaacuggaaaaacaucacucccaaaaugcugguuaguaucaaacggcucauaccuaaacgaaacucacuucucagacgacauugaacaacaagcagauaacaugauaacagaaaugcuacaaaaagaauauauagacagacaaggaaaaacaccauuaggacucguagacuuauuugucuucucaaccucauucuaucuuauaucaauauuccuccaucuaguaaaaauaccaacacacagacacauaacaggaaaaccauguccaaaaccacauagacuaaaccacaugggcauaugcucauguggacuuuacaaacacccaggaguaccaguaaaauggaaaagauaa

SEQ ID NO: 1812 - RNA, 1473 nt, Artificial Sequence
  derived and/or modified protein sequence (opt6) from LASV(ISTH2037-NIG-2012;Clade II)__AIT17502__GPC
augggucaaauaauaacauucuuccaagaaauaccccauguaauagaagaaguaaugaacaucguacuuauaacacuaagccuucuagcuauacuaaaagguaucuacaauguagccacuuguggucucuucggccucgucuccuuucuuuuacuaugcggaaaaucauguuccacaacauacaaaggaguauacgaacuacaaacacuagaauuagacauggccucccuaaauaugacaaugccacuaucauguaccaaaaauaauagccaccacuacauaaugguaggaaacgaaaccggacuugaauuaacacuaaccaacacaucuauuauaaaccacaaauucugcaauuuauccgaugcucacagaaaaaaucuauaugaccacacccuaaugucaauaauaucaacauuucaucuaucaauaccaaauuucaaccaauacgaagcaaugaguugugacuucaacggaggaaaaauauccguacaauacaaccuaucacacgcauacgcuauagacgccgccacccacugcggcacaauagcaaacggaguacuacaaaccuuuaugagaauggcaugggguggcucauacauagcauuagacucaggaaaaggaggaugggauuguauaaugacaucauaccaauaucuaaucauacaaaauacuacaugggaagaucacugccaauucucucgacccucuccaauaggauacuuaggccuacuuucucaaagaacaagggauauauacauaucaagacgacuccuaggaacauucacuuggacauuaucagacuccgaaggaaacgaaacaccagguggcuauugccucacccgauggaugcucauagaagcagaauuaaaaugcuuuggaaacaccgcugucgcaaaaugcaacgaaaaacaugacgaagaauucugugauaugcuaagacucuucgacuucaauaaacaagcaauacgaagacuaaaaaccgaagcacaaaugucaauacaacuaauaaacaaagcaguaaacgcccuaauaaaugaccaacuaauuaugagaaaccaccuaagagacaucaugggaauaccauacuguaacuacucaaaauacugguaccuaaaccacacuguaacaggaaaaacaucacuaccaaaauguugguuaguauccaacggaucuuaucuaaacgaaacccacuucucagacgacauagaacaacaagcagauaacaugauaaccgaacuacuacaaaaagaauacauggacagacaaggaaaaacaccacuaggacuaguugacuuauucguuuucucaacauccuucuaccuaauuuccauauucuuacacuuaguaaaaauaccaacacacagacacguaauaggaaaaccaugcccaaaaccacacagacucaaccacaugggcguaugcucauguggacuauacaaacauccaggaguaccaguuaaauggaaacgauga

SEQ ID NO: 1813 - RNA, 1473 nt, Artificial Sequence
  derived and/or modified protein sequence (opt6) from LASV(ISTH2042-NIG-2012;Clade II)__AIT17506__GPC
augggucaaauaauaacauucuuucaagaagucccacacgucaucgaagaagucaugaacauaguacuaaucgcauuaucauuacuagccauacucaaaggaauauauaauguugcaacauguggacuauuuggauuaguauccuuucuacuauuaugcggcagaucuugcucaacaacauacaaaggagucuacgaauuacaaacacucgaacuagacauggcaucacuaaacaugaccaugccccuauccuguaccaaaaacaacucccaccauuacaucauggucggaaaugaaacaggcuuagaacuaacacuaacaaacacaucaauaauuaaccauaaauucugcaaccuaucagacgcacauaagaaaaauuuauacgaccaugccuuaaugucaauaauauccacuuuccaccuuaguauacccaacuuuaaccaauacgaagccauguccugugacuuuaacggaggaaaaauauccguacaauacaaucuaucacaugcauaugcaguagacgcagcagaacacugcggaacaauagcaaacggaguacuacaaacauuuaugagaauggcauggggaggcucauauauagcacuagauucugguaaaggauccugggacugcguuaugacaaguuaccaauaucuaauaauacaaaauacaacaugggaagaccauugccaauuuaguagacccucaccaauuggauaccuaggacuccuaucacaaagaacacgagacauauauauauccagaagacuacuaggcacauucacuuggacguuaucugacucagaaggcaacgaaacacccgguggcuacugucuaacaagauggaugcuaauagaagcagagcuaaaauguuuuggaaauacagcaguagccaaaugcaacgaaaaacaugacgaagaauuuugcgacaugcuacgacuauuugauuuuaauaaacaagcaauagaaagauuaaaaacagaagcccaaaugucaauucaacuaauaaacaaagccgucaacgcuuuaauaaaugaucaauuaauaaugaaaaaccaccuaagagacauaaugggaauaccguacugcaacuauucaaaauacugguaccuaaaccacacaguaaccggaaaaacaucacuaccacgauguuggcuaguaucuaacggaucuuacuuaaacgaaacccacuuuagugaugauauagaacaacaagcugauaauaugauaacagaaaugcuccaaaaagaauauauagaucgacaaggaaaaaccccucuuggccuagucgaccuauuuguuuucucaacaucauucuauuuaauaucuaucuuccuacaucuaguuaaaauaccaacccaucgacacguaauaggcaaaccaugcccaaaaccccacagacucaaccacauggguauaugcagcugcggauuauacaaacaccccggaguaccagucaaauggaaaagauaa

SEQ ID NO: 1814 - RNA, 1473 nt, Artificial Sequence
  derived and/or modified protein sequence (opt6) from LASV(ISTH2046-NIG-2012;Clade II)__AIT17510__GPC
augggacaaaucauaacauucuuccaagaaguaccacacguaauagaagaagucaugaacauaguauuaauugcauuaucuuuacuagcaauacuaaaaggaauauauaacguagcaacuugcggacuauucggacuaguaucuuuccuacuacuaugcggaagaucuugcucuacaaccuauaaaggagucuacgaacuacaaacccuagaauuagacauggcaagccuaaacaugacaaugccauuaucaugcaccaaaaacaacucucaccacuacauaaugguaggcaaugaaaccggacuugaauuaacacuaacaaacacuucaauaauaaaccacaaauucuguaaccuaucagacgcacacaaaaaaaacuuauaugaccacgcuuuaauguccaucauaucaaccuuccaccucucaauaccaaacuucaaucaauacgaagccauguccugugacuuuaacggaggaaaaauauccguacaauauaaccucucacacacauacgcagucgacgcagcaaaccacugcggaacaauugcaaacggcguauuacaaacauucaugcgcauggccuggggagguucauacauagcacuagacucaggcaaaggauccugggauugcauaaugacaagcuaccaauaucuaauaauacaaaacaccacaugggaagaccacugucaauucuccaggccauccccaauaggauacuuaggacuacuaucucaaagaacaaaagacauauacauaucuagaagacuacucggaacauucacauggacacuaagugauucugaaggaaaugaaacaccaggaggauacugucuaacacgauggaugcucauagaagccgaauuaaaaugcuuuggaaacacagcuguagcaaaaugcaaugaaaaacaugacgaagaauucugugacaugcuaagacuauucgacuucaauaaacaagccauacgacgauuaaaaacagaagcacaaauguccauacaacuaauaaauaaagcuguaaaugcauuaaucaacgaccaauuaauaaugaaaaaucaucuaagagauauaaugggaauaccauauugcaacuacucuaaauacugguaccuaaaucacacagucacaggaaaaaccagccuuccaagaugcuggcuaguaucaaacggaucuuaucuaaacgaaacacauuucuccgacgacauagaacaacaagcugacaacaugauaacagaacuauuacaaaaagaauacaucgaucgacaaggaaaaacaccauuaggauuagucgaccuuuuuguauucucaacaucauucuauuuaauaucaauauuccuacauuuagucaaaauaccaacacaccgacaugucauaggcaaaccaugccccaaaccccacagacuaaaccacauggguauuuguucaugcggucuauacaaacacccaggaguaccaguuaaauggaaacgcuaa

SEQ ID NO: 1815 - RNA, 1473 nt, Artificial Sequence
  derived and/or modified protein sequence (opt6) from LASV(ISTH2050-NIG-2012;Clade II)__AIT17514__GPC
augggacaaauaauuacauuuuuccaagaaguaccacacgucauagaagagguaaugaacauaguacuaauagcacuaucuuuacuagcaguacuuaaaggaauauauaauguagcaacaugcggacuauuuggauuaguaucauuuuuacuacucuguggacguucaugcucaaccaccuacaaaggaguauacgaauuacaaacuuuagaacuagacauggcaagccuaaacaugacaaugccacuaucauguacaaaaaacaauucacaccacuacauaaugguaggaaaugaaacaggauuagaauuaacacuaacaaacacauccauaauuaaccacaaauucugcaaucuauccgacgcccacaaaaaaaaccuauacgaccacgcauuaaugucaauaauuagcaccuuucaccuauccauaccuaacuuuaaucaguacgaagcaaugucuugugacuucaauggaggaaaaauaagcguacaauauaaccuaucacacacauacgcaguagacgcagcaaaccacugcggcacaauagcaaacggaguccuacaaacauucaugagaauggccuggggaggaucauacauagcacuagacucaggcaaaggaucaugggacugcauaaugaccaguuaccaauauuuaauaauccaaaauaccacaugggaagaccacugccaauuuucaagaccaucaccuauaggcuaccuaggccuacuaucccaaagaacaagagacauauacaucucaagacgucugcuagguacauucacauggacacuaucugauucagaaggaaacgaaacaccaggaggauauugccuaacacgauggauguuaauagaagcagaacuaaaaugcuucgguaacacagccgucgccaaaugcaacgaaaaacaugaugaagaauuuugcgacaugcuacgacuauucgauuuuaauaaacaagcaaucagacgacuaaaaacagaagcacaaauguccauccaacuaauaaauaaagcaguaaaugcauuaauuaacgaucaauuaauaaugaaaaaucaccuaagagacauaaugggaauucccuacuguaauuauucaaaauauugguaucucaaccacaccguaacagguaaaacaucacuaccaagaugcuggcuaguaagcaauggaucuuauuuaaaugaaacacacuucucagacgacauagaacaacaagcagacaauaugauaacagaauuacuacaaaaagaauacauugauagacaaggaaaaacaccauuaggucuaguagaccuauucgucuucucaaccuccuuuuaccuaauaucaauauuuuuacaccuaguaaaaauaccaacucacagacacguaauuggaaaaccauguccaaaaccucaucgauuaaaccacaugggaauauguucaugcggauuauacagacaucccggagucccaguaaaauggaaaagauga

SEQ ID NO: 1816 - RNA, 1473 nt, Artificial Sequence
  derived and/or modified protein sequence (opt6) from LASV(ISTH2057-NIG-2012;Clade II)__AIT17518__GPC
augggacaaauaauaacauuuuuucaagaagucccacacguaauagaagaaguaaugaacauuguacuaaucgcauuaucacuccuagccauauuaaaaggaauauacaacguagcaacaugcggacuauucggauuaguaucauuucuacuacuuugcggcagaucaugcucaacaacauauaaaggcguauaugaauuacagaccuuagaacuagauauggcaucacuaaauaugaccaugccuuuaucaugcacaaaaaacaauucccaccauuacauaaugguuggaaaugaaaccggacuugaacuaacacuaacaaacacauccauaaucaaucauaaauucuguaaccuaagcgacgcacacaaaaaaaaccuuuacgaccacgcacuaauguccauaauaagcacauuucaccuaucaauuccaaacuuuaaccaauacgaagcuaugucaugugacuucaauggaggaaaaauaucaguacaauacaaccuaucacaugcauacgcaguagacgcagcuaaccacugugguacaaucgccaacggcguacuccaaaccuucaugagaauggcuuggggaggaucauacauagcacuagacuccggaaaaggcucaugggacugcauaaugacaucauaccaauacuuaaucauacaaaacacaacaugggaagaucacugucaauucucacgaccauccccaauagguuaccuaggauuacuaucacaaagaaccagagauauauacauaagcagaagauuauuaggaaccuuuaccuggaccuuaucugacuccgaaggaaacgaaacacccggagguuacugcuuaacaagauggaugcuaaucgaagcagaacuaaaaugcuucggaaacacagccguagcaaaaugcaaugaaaaacacgacgaagaauucugugauaugcuaagacuauucgacuucaacaaacaagcaaucagacgacuaaaaaccgaagcucaaaugucaauacaacuaaucaauaaagcaguaaaugcacuaauaaaugaccaauuaauaaugaaaaaucacuuaagagacauaauggguauaccauacuguaauuacucaaaauacugguaccuaaaccacacuguaacaggaaaaacauccuuaccaagaugcuggcuaguaucgaacggaucauaccuaaaugaaacacacuucucagacgacaucgaacaacaagcugauaauaugauaacagaauuauuacaaaaagaauauauggaccgacaaggcaaaacaccauuaggacuaguagacuuauucgucuucucuacauccuuuuauuuaauaucaauauuuuuacaucuaguaaaaauaccaacacacagacaugucauaggaaaaccguguccuaaaccacaccgccucaaccacaugggaaucugcucaugcggacuauacaaacacccaggaguaccaguaaaauggaaacgauaa

SEQ ID NO: 1817 - RNA, 1473 nt, Artificial Sequence
  derived and/or modified protein sequence (opt6) from LASV(ISTH2064-NIG-2012;Clade II)__AIT17524__GPC
augggccaaauaauaaccuucuuccaagaaguaccacauguuauagaagaagucaugaacauagugcuaauagcauuaucauuacuagcaauacuaaaaggaauauacaacguugcaacaugcggcuuauucggacuaguauccuuccuucucuuaugcggaagaucaugcuccacaacauauaaagggguauacgaacuccaaacauuagaauuagauauggcaucccugaacaugaccaugccacuaucaugcacaaaaaacaauucacaccauuacauaaugguaggaaaugaaaccggauuagaauuaacucuaacaaacacuuccauaauaaaccauaaauucugcaacuuaucagacgcccacaaaaaaaaccuauaugaccaugcacuaauguccaucauaucuacauuccaccuaucuauaccaaauuucaaccaauaugaagccaugucaugugauuucaacggaggcaaaauaucuguccaauacaacuuaucacauacuuacgcaauagacgcagcaaaucacugugguacuaucgcaaacggcguauuacaaacauucaugcgaauggcaugggguggaucauauauagcccucgacucaggaaaaggauccugggacugcauuaugacaagcuaucaauauuuaauaauacaaaacacaacaugggaagaucacugucaauucagcagaccaucaccaauuggauaccuaggacuauuaucacaacgcacccgcgauauauacauaucaagaagauuacuaggaacauucacauggacauuaucagauucagaaggaaacgaaacacccggaggauacugcuuaacaagauggaugcuaauagaagcugaauuaaaaugcuucggaaacacagcuguugcaaaaugcaacgaaaaacaugacgaagaauuuugcgauaugcuuagacucuucgacuuuaacaaacaagcaaucagaagacuaaaaacugaagcacaaaugucuauacaacuaauaaacaaagcaguuaacgccuuaauaaaugaccaacuaauaaugaaaaaccacuuaagagauauuaugggcauaccauacugcaacuauucaaaauacugguaccucaaccacacuguaacaggaaaaacaucauuaccaagaugcuggcuaguaucaaauggaucauaccucaacgaaacacacuucucagaugacauagaacaacaagcagacaacaugauaacagaaaugcuacaaaaagaauacauggacagacaaggaaaaacaccauuaggacuaguagauuuauucguauucuccacaagcuuuuaucucaucuccauauuccuacacuuaguaaaaaucccaacacauagacacguaauaggaaaaccaugcccaaaaccacauagacuaaaucacaugggcauuugcuccugcggccuauauaaacauccaggagucccuguaaaauggaaaagauaa

SEQ ID NO: 1818 - RNA, 1473 nt, Artificial Sequence
  derived and/or modified protein sequence (opt6) from LASV(ISTH2065-NIG-2012;Clade II)__AIT17528__GPC
augggucaaauuauaaccuucuuccaagaaguaccccacgucauagaagaaguaaugaacauaguucuaaucgcccuaucauuacuagccauguuaaaagguauauauaauauagccaccuguggacuauucggcuuaaucucauuccugcuauuauguggaagaucaugcucaacaacuuacaaagguguauaugaauuacaagcacucgaauuagacauggcaaaucuuaauaugaccaugccauuaucaugcacaaaaaauaacucccaucacuacauaauggucggaaacgaaacaggccucgaacuaacauuaacuaacacaucuaucauaaaccacaaauuuugcaaucuaucugacgcacauaaaaaaaaucucuacgaccacgcccuaaugucaauaauuuccacuuuucaccuaucaauuccaaacuucaaccaauacgaagcaaugucaugcgacuucaacggagguaaaauaucuguucaauacaaucuaucacauacauacgcaggagaugcagcaaaacacugcgguaccauagcaaacggcguauuacaaacauucaugagaauggcauggggcggaucauacauagcacuagacucaggcaaaggaaauugggacuguauaaugacaucauaccaauaucuaauaauacaaaacaccacaugggaagaccacugucaauuuucacgaccaucaccaauuggauaucuaggccuauuaucacaaagaacaagagacauauauauaucaagacgauuacuagguacauucacauggacauuauccgacucagaaggaaacgaaaccccaggaggauacuguuuaacccgauggaugcuaauagaagccgaacuaaaaugcuuuggaaacacagcaguagcaaaaugcaaugaaaaacacgacgaagaauuuugugacaugcuaagacuauuugacuucaacaaacaagcaauacgaagacucaaaacagaagcacaaaugucuauacaacuaauuaacaaagccgucaacgcauuaauaaacgaucaauuaauaaugaaaaaccacuuaagagacauaauggguauacccuacugcaacuacucaaaauacugguaucuaaaccacucagucacaggcagaacaucucucccacgaugcuggcuuguaucuaacggauccuaccuaaacgaaacucaauucucagacgacauagaacaacaagcugacaauaugaucacagaaauguuacaaaaagaauacauagauagacaaggaaaaacuccacuaggacuaguugaccuauuuguauuuucaacaucauucuaccuaauaucaaucuucuuacauuuaauuaaaauuccaacacaccgacacauaguaggaaaaccauguccaaaaccucaucgccuaaaccacaugggaauauguucaugcggauuauacaaacauccaggaauaccaguaaaauggaaacgauaa

SEQ ID NO: 1819 - RNA, 1473 nt, Artificial Sequence
  derived and/or modified protein sequence (opt6) from LASV(ISTH2094-NIG-2012;Clade II)__AIT17538__GPC
augggacaaauaauaacuuuuuuucaagaaguaccacaugucauagaagaaguaaugaauauaguacuaauugcacucucacuacuagcaaucuuaaaaggaaucuacaacauagcaacuugcggccuuuucggacuaaucucauuccucuuauuaugcggacgaucaugcagcacaacauacaaaggugucuacgaauuacaaacauuagaauuagacauggcuaaccuaaauaugaccaugccacuaucauguaccaaaaacaacucacaccauuacauaaugguaggcaacgaaacaggauuagaacucacacuaacaaacacaucaauaauaaaccacaaauucuguaacuuaucugacgcucauaaaaaaaaccucuacgaccacgcauuaaugucaauaauuucaacuuuucacuuaucuauaccaaacuucaaucaauacgaagcaaugucaugugauuucaaugaaggaaaaauaucaguacaauauaauuuaucacacucauacgcaaucgacgcugcaggccacugcggaaccaucgcaaauggaguacuacaaacauucaugagaauggcuuggggaggcuccuacauagccuuagacucaggaaaaggaaauugggacugcaucaugaccucauaucaauacuuaaucauccaaaauacaacaugggaagaccauugccaauucucaagaccaucaccaauaggauaccuaggauuauuaucacaaagaacuagagauauauacauauccagaagauuacucgguacuuucacuuggaccuuaucagacucagaaggcaaugaagcaccaggaggauauugcuuaacaagauggaugcucauagaagcagaacuaaaauguuucggcaacaccgccauagccaaaugcaaugaaaaacacgacgaagaauucugcgacauguuaagacuauuugauuucaacaaacaagcaauaaaacguuuaaaagccgaagcacaaaugucuauacaucuaaucaauaaagccgucaacgcauuaaucaaugaccaacuaaucaugaaaaaucaccucagagauauaaugggaaucccauacugcaacuacuccaaauauugguaucuaaaucacacaguuacuggaaaaaccucauuaccaaaauguugguuaguaucuaacggaucauaccuaaacgaaacccacuuuagcgaugacauagaacaacaagcagacaacaugauaaccgaauuauuacaaaaagaauacauggacagacaaggaaaaaccccauuaggacuaguugauuuauucguauucucaacuucauucuaucucaucucaaucuucuuacaccuaguaaaaauaccaacacacagacacauaguaggaagaccaugcccaaaaccccaccgacucaaccacaugggaaucugcagcugcggcuuauauaaacaccccggcgucccaguaaaauggaaaagauaa

SEQ ID NO: 1820 - RNA, 1473 nt, Artificial Sequence
  derived and/or modified protein sequence (opt6) from LASV(ISTH2129-NIG-2012;Clade II)__AIT17544__GPC
augggacaaauaaucacauucuuccaagaaguaccccacgucaucgaagaagucaugaauauuguauuaauagcuuuaucacuacuagcaauccuaaaagguauauauaacguagcaacaugcggauuauucggauuaguaaguuuucuacuauuauguggaagaucaugcucaacaacauauaaaggcguauacgaauuacaaacuuuagaacuagacaugggaucauuaaauaugacaaugcccuuaucauguacaaaaaacaacucccaccauuacauaaugguaggaaacgaaacaggacucgaacuaacacuaacaaauacaucaauaauaaaccacaaauucugcaacuuaagcgacgcacacaaaaaaaacuuauacgaucacgcauuaaugucaauaaucucuaccuuccaucucagcauaccaaacuucaaccaauaugaagcaaugucaugcgauuucaaugguggcaaaauaucuguacaauacaacuuaucacauucauacgcagucgaugcagccaaccauugcggaaccauagcaaacggaguucuccaaacauuuaugagaauggcauggggaggaucauacauagcacuagacucaggaaaaggauccugggacuguaucaugacaucauaccaauacuuaauaauacaaaacacaacuugggaagaccacugccaauucucaagaccuucacccauaggauacuuaggcuuacuaucacaaagaacaagagacauauacauaucaagacgucuauuaggaacuuucacauggacauuaucagacucagaagguaacgaaacuccaggaggauauugucuaacaagauggaugcuaauagaagccgaacuaaaaugcuuuggaaauacagcaguagcaaaaugcaacgaaaaacacgacgaagaauucugcgacaugcuacgauuauuugacuucaauaaacaagcaauaagaagacuuaaaacagaagcacaaaugucaauacaauuaaucaacaaagcaguaaacgcauuaauaaacgaccaauuaauaaugaaaaaccacuuaagagacauuaugggcauaccauauugcaacuauucaaaauauugguacuuaaaucauacaguaacaggaaaaaccagucuaccaagaugcugguuaguaucaaacggcucuuaccuaaaugaaacacacuucucagaugacauagaacaacaagcugacaacaugauaacagaacuacuacaaaaagaauacauggauagacaaggaaaaacaccacucggauuaguagacuuauucguauuuucaacaucauucuaccuaaucucaaucuuuuuacaucuaguaaaaaucccaacucauagacacaucauagggaaaccaugucccaaaccacacagacucaaccauaugggaauaugcucuuguggacuauauaaacacccuggaguacccguaaaauggaaacgauaa

SEQ ID NO: 1821 - RNA, 1473 nt, Artificial Sequence
  derived and/or modified protein sequence (opt6) from LASV(ISTH2217-NIG-2012;Clade II)__AIT17548__GPC
augggacaaauuauaacauucuuucaagaaguaccccacguaauagaagaaguaaugaacauaguacuaauugcacuaucauuacuugcaauacuaaaaggcaucuacaacguagccacuugcggacuauuuggucucguaucauuccuauuccucugcggaagaucuugcucaaccacauauaaaggaguauacgaacuacaaaccuuagaauuagacauggccucacuaaauaugacaaugccauuaucaugcaccaaaaacaacucacaucacuacaucaugguaggcaacgaaacaggacuagaacuuacauuaaccaacacaucuauaauaaaccacaaauuuuguaaccuuucagacgcacacaaaagaaaucuauacgaccaugccuuaaugucaauuauaucaacuuuucacuuaagcauuccaaacuucaaucaauacgaggcaaugucaugcgacuuuaacggaggaaaaauaucaguacaauacaauuuaucacacgccuacgcuggagaugccgccaaacacugugguaccauagccaacggagucuuacaaaccuuuaugagaauggccuggggaggaucauacaucgcauuagacucuggaaaaggcucaugggacugcauaaugacuucauaccaauacuuaauaauacaaaacacaacaugggaagaucauugucaauuuucaagaccaucaccaauaggauaccuaggauuauuaucacaaagaacacgagacaucuauauaucuagacgcuuacuaggaacauucacauggacacuaucugacucagaagguaaugaaacacccggaggauauuguuuaacuagauggaugcugauagaagccgaauuaaaaugcuucggaaauacagccguagcaaaaugcaacgaaaaacacgaugaagaauuuugcgacaugcuuagacucuuugacuuuaacaaacaagcaauaagacgauuaagaacagaagcacaaaugucaauacaacuaauaaacaaagcaguaaacgcacuaauaaaugaccaauuaauaaugaaaaaccaucuaagagauauaauggguauaccauauugcaauuacucaaaauacugguaccuaaaccauacagucacaggaaaaaccagcuuaccuaaaugcuggcucguaucaaauggaucauaccuaaacgaaacacacuucucagacgauauagaacaacaagcagacaauaugauaacagaaaugcuacaaaaagaauacaucgacagacaaggaaaaacaccucuaggccuuguagaucuuuucguuuucaguacaucauucuaccuaaucucaauauucuuacaccuaguaaaaaucccaacacacagacacguaauaggaaaaccaugcccaaaaccacaccgccuuaaccacaugggaauaugcucaugcggacuauauaaacacccaggaguaccaguaaaauggaaacgauaa

SEQ ID NO: 1822 - RNA, 1473 nt, Artificial Sequence
  derived and/or modified protein sequence (opt6) from LASV(ISTH2271-NIG-2012;Clade II)__AIT17552__GPC
augggacaaaucauaaccuucuuccaagaaguaccacacguaauagaagaaguuaugaauauaguccuaauagcacucucauuacuagcuauacuaaaaggcauauacaacguagcaacauguggccuauucggacuaguaucuuucuuacuauuaugcggaagaucuugcuccacaacauacaaaggaguauaugaacuacaaacacuagaauuagacauggcaagcuuaaauaugaccaugccucuaaguugcacaaaaaacaauucacaccacuacauaauggucggaaaugaaacaggauuagaauuaacauuaacaaacacaaguauaauaaaucacaaauucuguaaucucucagacgcccauaaaaaaaaccuauacgaccacgcccuaaugucaauaauauccacauuucauuuauccauaccaaauuucaaucaauacgaagcaaugaguugugacuucaacggaggaaaaauaucuguacaauauaacuuaucccacgcauacgcaguaaacgcagcuaaccacugcgguacuauugcuaauggaguauuacaaacauuuaugagaauggcuuggggaggaucuuacauugccuuagauucaggaaaaggaucaugggacugcauaaugacuagcuaccaauaccuaauaauacaaaacacuacaugggaagaccacugccaauucucaagacccucaccuauaggauaucuaggccuccuaagucaaagaacaagagacaucuacauaucaagacgacuacuaggaacauuuacauggacccuaucagacucagaaggaaacgaaacaccaggagguuacugccuaacccgauggaugcuaauagaagcagaacuaaaaugcuuuggaaauacagccguagcuaaaugcaaugaaaaacacgacgaagaauuuugcgacaugcuacgacucuucgacuuuaacaaacaagcaauaagacgacuaaaaaccgaagcacaaaugucaauacaacuaauaaacaaagccguuaacgcauuaauaaacgaccaauuaaucaugaaaaaccaccuccgcgauauaaugggaauacccuacugcaacuacucuaaauacugguaccuaaaucauacugucacaggaaaaacuucacuaccaagaugcuggcuaguaucaaacggaucauaucuaaaugaaacacauuucucagacgacauagaacaacaagcagauaacaugauaacagaacuccuacaaaaagaauauauggaucgacaagguaaaacaccauuaggacuaguagaccuauuuguuuucucuacaucauucuaccuaauaagcauauuccuacaucugguuaaaauuccuacacacagacacguaaucggaaaaccaugcccaaaaccacaccgacucaaccauaugggaaucuguucauguggacucuacaaacacccaggagucccaguuaaauggaaaaaauaa

SEQ ID NO: 1823 - RNA, 1473 nt, Artificial Sequence
  derived and/or modified protein sequence (opt6) from LASV(ISTH2304-NIG-2012;Clade II)__AIT17556__GPC
augggccaaauaauaacauuuuuccaagaaguaccacacgucaucgaagaaguaaugaauaucguacuaaucgcucuaucauuacucgcaauacuaaaaggaauauauaacguugcaacaugcggacuauucggauuaguaucauucuuauuauuaugcggaagaaguugcucaacaaccuacaaaggcguuuacgaauuacaaacauuagaacucgacauggcaucucuaaacaugacaaugccccuaucaugcacaaaaaauaacucacaccauuacauaaugguaggaaacgaaacaggucuugaauuaacauuaacaaacaccucuauuauaaaccacaaauuuugcaaccuaucagacgcacacaaaaaaaacuuauaugaucacgcacucaugucaauaaucucaacauuccaccuaucaauaccaaauuucaaucaauacgaagcaaugucaugcgacuuuaauggaggaaaaauauccguacaauacaauuuaucacacacauacgcaguagacgcagcaaaccacuguggaacaauagcaaauggcguacuccaaacauuuaugagaauggccuggggaggaucauacauagcacuagacucaggaagaggaucaugggacugcauaaugaccucauaccaauacuuaauaauacaaaauaccaccugggaagaccacugccaauucucuagaccaucuccaaucggauaccuaggacuacuuucccaaagaacccgagauauauacauaucuagaagacuacuaggaacauuuacauggacacuaucagacucugaagguaacgaaacuccaggaggauacugccuaacuagauggauguuaauagaagcagaauuaaaaugcuucggaaacaccgccguagcaaaaugcaaugaaaaacacgaugaagaauucugcgacaugcuuagacucuucgacuuuaacaaacaagcaauaagaagauuaaaaacagaagcucaaaugucaauucaacuaauaaauaaagcaguuaacgcuuuaauaaacgaccaacuaauaaugaaaaaccaucuaagagacauaaugggaauaccauacugcaauuacuccaaauacugguaccuaaaucacacaauaacaggaaaaacaucauuaccaagaugcugguuaguaucaaacggaucauaucuaaaugaaacacauuuuucagacgauauagaacaacaagccgacaacaugauaaccgaacugcuacaaaaagaauauauagacagacaaggaaaaaccccucuaggucuaguagacuuauucguauucucaacaucuuucuaccuaauaucaauauuccuacaccuaguaaaaauaccaacacacagacacaucacaggaaaaccaugccccaaaccucacagacuaaaccacaugggaauauguuccugcgguuuauauaaacaccccgguguacccguacgcuggaaaagauaa

SEQ ID NO: 1824 - RNA, 1473 nt, Artificial Sequence
  derived and/or modified protein sequence (opt6) from LASV(ISTH2312-NIG-2012;Clade II)__AIT17560__GPC
augggacaaauaauaacauucuuccaagaaguaccacacguaauagaagaagucaugaacauaguacuaauugcauuaucauuacucgcagucuuaaaaggaauuuacaacguugcaacauguggacuauucggccuagucucuuucuuauuacuaugcggaagaucauguucuacaacauacaaaggaguauacgaacuacaaacacuugaacuagacauggcaucucuaaacaugaccaugccccuaagcuguacuacaaauaauucacaccauuacauaaugguaggaaacgaaacaggacuagaacuaacacuaacaaacacaucaauaaucaaucacaaauucugcaaucuguccgacgcacacaagaaaaacuuauacgaccacgcacuaaugucaauaauaucaacauuccaccuaucuauaccaaacuucaaccaauacgaagcuauguccugugacuucaacggaggaaaaauaucuguacaauacaaucuaagccaugcauacgcaggagaagccgcaaaucacugcggcacaauagcaaauggaguucuacaaacauuuaugagaauggccuggggaggaucauauauagcacucgacagcggaaaaggaucaugggacugcauaaugaccagcuauaaauaccuaaucauacaaaacacaacauggggcgaccauugccaauuuucgcgccccucgccaauuggauaccucggccuacuaucacaaagaacaagagauauauauauaucuagacgacuacucggaacauuuacguggacacuaucagauucagaaggcaacgaaacaccaggaggauacuguuuaacaagauggauguuaauagaagcagaacuaaaaugcuucgguaacacagcuguagcaaaauguaaugaaaaacacgacgaagaauuuugcgacaugcuacgauuauucgacuucaauaaacaagcaauuagaaaacuaaaaacagaagcacaaaugucaauacaacuuauaaacaaagcaguuaacgcauuaaucaacgaccaauuaauaaugaaaaaccaucuaagagacauaaugggcauaccauauuguaauuacuccagauacugguaccuaaaccacacaguaacagguagaacuucgcuucccagaugcugguuagucuccaaugguucauaccuaaaugaaacacacuucucagacgauauugaacaacaagcagacaauaugauaacugaacuauuacaaaaagaauauauagauagacaaggaaaaacaccauuaggccuagucgaccuauuuguauuuucaacaucauucuacuuaaucucaauauucuuacauuuaguaaaaauaccaacucacagacauauaauaggaaaaccaugcccuaaaccacauagauuaaaccacaugggaauaugcuccuguggacuuuacaaacacccaggaguuccaguuaaauggaaaagauaa

SEQ ID NO: 1825 - RNA, 1473 nt, Artificial Sequence
  derived and/or modified protein sequence (opt6) from LASV(ISTH2316-NIG-2012;Clade II)__AIT17564__GPC
augggacaaauaaucacuuucuuucaagaaguaccacacgucauagaagaaguaaugaacauuguacuaauagcucuuucacuauuagcuauacuaaaaggaauauacaacguagccaccuguggacucuucggacuauuaucauuucuauuacuaugcggaagaucuugcucaacuacauacaaaggaguauacgaauuacaaacacucgaacuagauauggcaagccuuaacaugacaaugccacuaucaugcacaaaaaauaauucacaccauuacauaauggucggaaacgaaaccggcuuagaauuaacacuuacaaacaccaguauaauuaaccacaaauucuguaaccuaucagaugcacacaaaaaagaucuauacgaucacgcauuaaugucaauuaucucaaccuuccacuuaucaauaccaaacuucaaccaauacgaagccauguccugugauuuuaacggcggcaaaauaucaguacaauauaaccuaucacacgcauaugcagucgacgcagcaaaacacugcggaacaauugccaacggaguacuacaaacauucaugcgaauggcauggggagguuccuacauagcauuagacucaggaaaaggcucaugggauugcauuaugacaucauaucaguaccuuauaauccaaaacacaucaugggaagaccacugucaauuuuccagaccaucaccaauaggauaucuaggacuacuaagccaaagaacacgugacauauacaucucucgacgacuacuaggcaccuucacauggacauuaagugacucagaaggaaacgaaacucccggcggauacugccuaacaagauggaugcuaauagaagcagaacuaaaauguuuuggaaauaccgcaguagcaaaaugcaacgaaaaacaugacgaagaauuuugcgacauguuaagauuauucgauuucaauaaacaagcuauaaaacgucuaaaaacagaagcacaaaugucaauacaauuaauaaauaaagccguaaacgccuuaauaaacgaccaauuaaucaugaaaaaccacuuacgagacauaaugggaauuccauauugcaacuacaguaaauauugguaucuuaaccauacaguaaccggaaaaacaucacucccacguugcuggcucguuucaaauggcuccuacuuaaacgaaacacauuuuucagacgacauagaacaacaagcagacaauaugauaacagaacuacuacaaaaagaauacauagaccgacaaggaaaaacaccauuaggauuaguagaccucuucguauuuucaaccucauucuacuuaauaucaaucuuucuacauuuaguaaaaauaccaacucacagacacgucauaggaaaaccaugcccaaaaccucacagacuaaaucacaugggcaucugcaguuguggauuauacaaacaccccggagucccagucaaauggaaaagauaa

SEQ ID NO: 1826 - RNA, 1473 nt, Artificial Sequence
  derived and/or modified protein sequence (opt6) from LASV(ISTH2358-NIG-2012;Clade II)__AIT17572__GPC
augggacaaauaauaacauucuuccaagaagucccucacguaauagaagaaguaaugaacauaguacuaauagcacuaucucuauuagcaaucuuaaaaggaauauacaacguagcaacaugcggacuauucggauuaguaucauuucuacuuuuaugcggcagaucauguucaacaacauauaaaggaguauacgaguuacaaaccuuagaacuagacauggcaaauuuaaauaugaccaugccauuaucaugcaccaaaaacaauucccaucacuacauaaugguaggaaacgaaacaggacuagaacuuacauuaacaaauacauccauaauaaaccacaaauucugcaaucucuccgaugcacacaagaaaaaccucuacgaccacgcacucaugaguauaauuucaacauuccaucuaucaauaccuaacuucaaccaauacgaagcaaugucaugcgauuucaauggagguaaaauaucaguacaauacaaccuaucacacaauuaugcaguagacgcagcaaaccacugcgguacaauagcaaacggaguccuacaaacauucaugagaauggcauggggaggauccuauaucgcacucgauucaggaaaaggaaacugggacuguauaaugacaucauaccaauaccuaauaauacaaaacacaacaugggaagaucauugucaauucucuagaccaucaccaaucggauaucucggacuauugucacaaagaacaagagacauauacauaucacgaagacuauuaggaacauucacauggacauuaucugacagcgaagguaaugacaugccugguggauacugucuaaccagauggaugcuaauagaagcagaauuaaaaugcuucggaaacaccgcaguugcaaaauguaaugaaaaacacgaugaagaauuuugcgacauguuaagauuauucgauuucaacaaacaagcaauaagacgacuaaaaacagaagcccaaaugaacauucaauuaauaaauaaagcuguaaaugcccuaauaaacgaucaauuaauaaugaaaaaccacuuaagagacauaauggguauaccauacugcaacuacucaaaauauugguacuuaaaucauacaguaaccggaaaaacguccuuaccaagauguuggcuuguauccaacggcucauaccucaacgaaacacacuuuucagacgauauagaacaacaagcagacaacaugauaacagaauuacuacaaaaagaauacauggaucgacaaggaaaaacaccacuaggucuaguagauuuauucguauucucaacauccuucuaccucauauccauauuucuacaccuaguuaaaauucccacacaccgacacaucaucggaaaacccuguccaaaaccucacagacuaaaccacaugggaauaugcucaugcggacuuuauaaacauccuggaguaccagucaaauggaaaagauaa

SEQ ID NO: 1827 - RNA, 1473 nt, Artificial Sequence
  derived and/or modified protein sequence (opt6) from LASV(ISTH2376-NIG-2012;Clade II)__AIT17576__GPC
augggccaaauaaucacauuuuuccaagaaguaccccauguaauagaagaaguaaugaacauuguuuuaauugcacuaucauuacuagccauacuuaaaggcauauauaacguagcaacaugcggauuauucggauuaguaucuuuccuacuauuaugcggcagaucaugcucaaccacauacaaaggugucuacgaacuacaaacccuugaacuagacauggcaucccuaaauaugacaaugccauuaucuugcacaaaaaacaacucacaccacuauauuaugguaggaaaugaaacaggacuagaauuaacacucacaaauacaucaauaaucaaccacaaauuuugcaaccuaucagacgcacacaaaaaaaaccuauacgaccacgcccuaaugucuauaauauccacauuccacuuauccauccccaacuucaaucaauaugaagcuaugucaugugacuuuaauggagguaaaaucucuguucaauauaaccucucucacacauacgccguagacgcagcaaaccacuguggcaccauagccaauggaguacuacaaacauuuaugcgcauggccugggguggauccuacauagcucuugacucaggaaaagguaacugggacugcauaaugacauccuaccaauacuuaauuauccaaaacacaacuugggaagaccacugucaauuuucucgaccaucaccaauuggauaccuaggacuccuaucucaaagaacaagagacauauacauauccagaagacuauuaggcaccuucacauggacuuuaucagacucugaaggaaaugaaacaccaggcggauauugccucacucgauggaugcucauagaagccgaacuuaaaugcuucggaaacaccgcaguagcaaaaugcaaugaaaaacacgacgaagaauuuugugacaugcuaagauuauucgacuuuaauaaacaagcaauaagccgcuuaaaaacagaagcacaaauguccauucaacuaaucaacaaagcaguuaaugcacuaauaaaugaccaacuaauaaugaaaaaccaccuuagagacauuaugggaauaccauacugcaauuacucuaaauacugguacuuaaaccauacaguaacaggaaaaaccagccuaccacgaugcugguuaguaucuaacggaucauacuuaaacgaaacacacuuuucagaugacauugaacaacaagcagacaacaugauaacagaaaugcuacaaaaagaauacauagacagacaaggaaaaacaccccuaggacuuguagaccuauuuguauuuucaacauccuuuuaccuaauauccauauuccuacaccucguaaaaauaccaacacacagacacauaacaggaaaaccaugcccuaaaccacauagacuaaaccauaugggaauauguucaugcggacuauacaaacaccccggaguaccaguaaaauggaaaagauaa

SEQ ID NO: 1828 - RNA, 1473 nt, Artificial Sequence
  derived and/or modified protein sequence (opt6) from LASV(Lassa virus/H.sapiens-wt/NGA/2015/ISTH_0543;Clade II)__AVO03639__GPC
augggccaaauaauaaccuucuuucaagaagucccacacguuauagaagaaguaaugaacauaguacuaauagcauuaucacuacuagcaauccuaaaaggaauauacaacguagcaacuugcggccuauucggacuaguaucauuccuccuacuaugcggacguuccugcuccacaacauacaaaggcguauacgaacuacaaacauuagaacuagacauggcaaacuuaaacaugaccaugccauuauccugcacaaaaaacaacucucaccauuauauaaugguuggaaacgaaacaggacucgaauuaacuuuaaccaacacaucaauaauuaaucauaaauucugcaacuuauccgacgcacacaaaaaaaaccuauacgaucacgcacuaaugagcauaauaucuacuuuccaucuaucaauaccaaauuucaaucaauacgaagcaaugucaugugauuucaauggcggaaaaauauccguacaauauaauuuaucccauacauacgcaguagaugcagcaaaccauugcggaacaauugcaaacggaguccuacaaacauuuaugcgaauggcauggggcggaagcuacauagcacucgauucaggaaaagguuccugggauuguauaaugacuucuuaucaauacuuagucauccaaaacacuacaugggaagaucacugccaauuuucuagaccauccccaauuggauaucugggacuacuuucccaaagaacaagagacauauacaucuccagaagacuauuaggaacauucacauggaccuuaucagacucagaaggaaacgaaacaccaggugguuacugccuaaccagauggaugcuaauagaagcagaacuaaaaugcuuuggaaacaccgcagucgcaaaauguaacgaaaaacacgacgaagaauucugcgauaugcuaagacuauuugacuucaauaaacaagccauaagaagauuaaaaacugaagcacaaaugucaauacaacuaauaaacaaagcaguaaacgcacucauaaacgaccaauuaauaaugaaaaaccacuuacgagacauaaugggcaucccauacugcaacuauucaaaauacugguaccucaaucauacaguaacaggaaaaacaucacuaccaagaugcuggcucguauccaacggaucauacuuaaacgaaacacacuuuucagacgacaucgaacaacaagcagacaauaugauaacagaacuacuccaaaaagaauauauagauagacaaggaaaaaccccacuaggacuagucgaccuauucgucuucagcacaagcuucuaccuaauauccauuuuccuucaucucguaaaaauacccacucacagacacauaacuggaaaaccaugcccaaaaccacacagauuaaaccacaugggaauaugcucauguggacuauacaaacacccagguguuccaguaaaauggaaaagauaa

SEQ ID NO: 1829 - RNA, 1473 nt, Artificial Sequence
  derived and/or modified protein sequence (opt6) from LASV(Lassa virus/H.sapiens-wt/NGA/2015/ISTH_0547;Clade II)__AVO03583__GPC
augggacaaauaauaaccuucuuucaagaaguaccacacguaauagaagaagucaugaauauaguacuaauagcuuuaucacuacuagccauauuaaaaggcauauacaacguugcaacaugcggucuauucggucuaguaucuuucuuauuacucugcggaagaucaugcaguacaacauacaaaggaguauaugaacuucaaacacucgaauuagacauggcaucacuaaacaugacaaugccccuaucaugcaccaaaaacaacucucaccacuauauaaugguaggaaacgaaacuggccuagaacuaacuuuaacuaauacauccauaauaaaucauaaauuuugcaaccuaagugacgcacacaagaaaaaccuauacgaucacgcauuaaugucaauaaucucaacauuucacuuauccauaccuaacuucaaccaauaugaagcuaugucaugugacuucaacggcggaaaaauaucaguacaauacaaucuaucacacacauaugcaguagacgcugcaaaccacugcggaacaauugccaacggaguccuccaaacauuuaugagaauggcauggggaggauccuauauagcacuagacucaggaaaaggcucaugggacugcauaaugacaucauaccaauaucuaauuauacaaaacacaacaugggaagaccacugccaauucucaagaccaucaccaauaggauaccuaggauuauuaucacaaagaacuagagacauuuacauuucacgacgauuacuaggaacauuuacauggacacuaucagacucagaagguaacgaaacaccaggagguuacugccuaacaagauggauguuaauagaagcagaauuaaaauguuucggaaacacagcaguagcaaaaugcaacgaaaaacacgacgaggaauuuugugacaugcuuagacuauucgauuucaacaaacaagccaucagaagacuaaaaacagaagcacaaaugucaauacaacuaauuaacaaagcaguaaaugcacuaauaaacgaucaauuaauuaugaaaaaccacuuaagagauauaauggguauuccuuauuguaacuacucaaaauauugguacuuaaaccauacaguaacuggaaaaacaucacuucccagaugcugguuagucucaaacggaucauacuuaaaugaaacacauuuuucagaugacauagaacaacaagcugauaacaugauuaccgaauuacuacaaaaagaauacauagaaagacaaggaaaaacaccacucggauuaguagaccucuucguauucucaaccucuuuuuaccuaauaaguaucuuccuacauuuagugaaaauaccaacacacagacauauaacaggaaaaccaugcccaaaaccacacagacuuaaccacaugggaauauguuccugcggacuauacaaacaucccggaguaccagucaaauggaaaagauaa

SEQ ID NO: 1830 - RNA, 1473 nt, Artificial Sequence
  derived and/or modified protein sequence (opt6) from LASV(Lassa virus/H.sapiens-wt/NGA/2015/ISTH_0574;Clade II)__AVO03657__GPC
augggacaaauaauaacauucuuccaagaagucccccacguaauagaagaaguaaugaauauaguacuaaucgcauuauccuuacuagcaauccuaaaaggcauauacaacguagccacaugcggcuuauucggccuaguagcauuucuacuacuaugcggaagaucaugcucaacaaccuauaaaggaguauacgaacuacaaacacucgaauuagauauggccuccuuaaacaugacaaugccacuaucaugcaccaaaaacaauucacaccauuacauaaugguaggaaaugaaaccggccuugaauuaacacuaacaaacacauccauaaucaaccauaaauucugcaaccucagugacgcgcacaaaaaaaaucuauacgaccaugcauuaaugucuauaauaucaaccuuucacuuaucaauuccaaacuuuaaccaauacgaagcaaugucaugcgacuucaacggaggcaaaauauccguacaauacaaucuaucacacacauaugcaguagacgcagcaaaccauugcggaacaauuaccaauggaguacuacaaacauucaugcgaauggcauggggaggaucauauaucgcauuagacucaggaaaaggauccugggacuguauuaugaccucauaccaauauuuaauaauacaaaacacuacaugggaagaccacugccaauucucuagaccaucaccaauaggauacuuaggauuacuaucucaaagaacaagagauaucuacauaucccgaagacuucucggaaccuucacauggacacucucugacucugaaggaaacgaaacaccaggaggcuacugccucacaagauggaugcuaaucgaagcagaacuaaaaugcuucggaaauacagcaguggcuaaaugcaacgaaaaacacgacgaagaauuuugcgauaugcucagacuauucgauuucaacaaacaagccauuagaagauuaaaaaccgaagcucaaaugucaauacaauuaauaaacaaagcaguaaacgcacuaaucaacgaccaauuaauaaugaaaaaucaccuaagagauauaauggguauuccauauugcaauuacucuaaauacugguaccuaaaucacacagucaccggaagaacaucacuaccaagaugcugguuaguauccaacgggucuuacuuaaacgaaacacacuucucagacgacauagaacaacaagcugauaacaugauaacagaacuauuacaaaaagaauacauggaccgacaaggaaaaacaccauuaggauuagucgaccuauucguauucucaacuucuuucuauuuaauauccauuuuccuacaccuaauaaaaauaccuacacacagacauguaaucggaaaaccaugucccaaaccacacagacucaaccacaugggcauaugcucaugcggacuauacaaacacccagguguacccgucaaauggaaaagauaa

SEQ ID NO: 1831 - RNA, 1473 nt, Artificial Sequence
  derived and/or modified protein sequence (opt6) from LASV(Lassa virus/H.sapiens-wt/NGA/2015/ISTH_0681;Clade II)__AVO03617__GPC
augggacaaauaauaacauucuuucaagaaguaccacacguaauagaagaaguaaugaauauaguacuaaucgcucuaucacuacuagcaauauuaaaaggaauauacaacguagcuaccuguggcuuauuuggccuaguaucauuccucuuacuaugcggccgaucauguucaacuacauauaaaggaguauacgaauuacaaacauuagaauuagacauggcauccuuaaacaugacaaugccauuaucauguaccaaaaauaacucacaccacuacauaaugguaggaaaugaaacaggucuagaacuaacacucacaaauacauccauaauaaaccacaaauucugcaaucuuucagaugcacauaaaaaaaacuuauacgaucacgcacuaaugucuauaauuucaacuuuccacuuaucaauaccaaauuuuaaucaauacgaagcaaugucaugcgacuucaacgguggaaaaauaaguguacaauacaacuuaucacauacauacgccgaaggagcagcaaaucacugcggaaccauagcaaacggaguucuacaaacuuuuaugagaauggcauggggaggaucauacauagcacuagauucagguaaaggaucaugggacuguauaaugaccucuuaccaauaucucaucauacaaaauacaacaugggaagaccacugccaauucucacgaccaucaccaauaggauaccuaggauuacuaucacaaagaacucgagauauauauaucucaagaagacuacuuggaaccuucaccuggacacuuucagauucugaaggcaacgaaacaccaggaggauacugucuaacaagauggaugcuaauagaagcagaacuuaaaugcuuuggaaauacagcagucgcaaaaugcaacgaaaaacacgacgaagaauuuugcgacaugcuaagacuauuugacuucaauaaacaagcaauaaugagacuaaaaacagaagcacaaauguccauacaacuaauaaauaaagccguaaaugcacuaauaaaugaccaacuaauaaugaaaaaccaccuaagagacauaaugggcaucccauacugcaacuauucaaaauacugguaucuaaaucacaccguaaccggaaaaacaucauugccacgauguugguuaguaucaaaugguucauaccuaaacgaaacacacuucucugacgacauagaacaacaagcagacaauaugaucaccgaaauguuacaaaaagaauacauggacagacaaggaaaaacuccacuaggcuuagucgacuuauucguauucucuacaucauucuacuuaauaaguauauuccuacauuuaguaaaaauaccaacacacagacacgucauaggcaaaccauguccaaaaccacauagauuaaaccauaugggaauauguuccugcggacuauacaaacauccuggaguaccagucaaauggaaaagauaa

SEQ ID NO: 1832 - RNA, 1473 nt, Artificial Sequence
  derived and/or modified protein sequence (opt6) from LASV(Lassa virus/H.sapiens-wt/NGA/2015/ISTH_0682;Clade II)__AVO03625__GPC
augggccaaaucauaacauucuuucaagaaguaccucacgucauagaagaagucaugaauauaguccuaauagcacuaucauuacucgcaauacuaaaagguauauacaaugucgcaacaugcggauuauuuggauuaguaucuuucuuauuacuuuguggcagaucaugcucaacaacauacaaaggaguauaugaacuacaaacacuagaacuagacauggcauccuuaaauaugacaaugcccuuauccugcaccaaaaauaauucucaccauuacauaaugguaggaaaugaaacaggacuugaacuaacauuaaccaacaccucaauaauaaaucacaaauuuugcaaucucucagaugcccacaaaaaaaaccuauacgaccacgcccuuaugucuauaauauccacauuccaccuaucaauccccaacuucaaucaauacgaagcaauguccugcgacuuuaacggaggcaaaauaucaguacaauacaacuuaucgcaugccuacgccgucgaugcagcaaaccauugugguacaauagcaaacggaguccuacaaacauuuaugcgaauggccuggggcgguuccuacaucgcacuagauuccggaaaaggauccugggauuguauaaugacauccuaucauuacuuaauuauacaaaacacaacaugggaagaccauugucaauuuucacgaccaagcccaaucggauaccuaggacuacucucccaacgaacuagagacauauacauaucacgacgucuacuaggaacauucacauggacauuaucagacuccgaaggaaaugaaaccccuggcggcuacugccuuacaagauggaugcuuaucgaagcagaacuaaaaugcuucggaaacacagcaguagcaaaaugcaacgaaaaacacgaugaagaauuuugcgauaugcuaagauuauuugauuucaacaaacaagcaauacgacgucuaaaaacugaagcccaaaugucaauacaauuaauaaacaaagccgucaaugcacuaaucaacgaccaauuaauaaugaaaaaccaccuaagagacauaaugggaauaccuuacugcaacuauucaaaauauugguaucuuaaccacacuguuacaggaaaaacaucacuaccuagauguugguuaguaucaaauggauccuauuuaaacgaaacacacuuuucagacgacauagaacaacaagcugacaauaugaucaccgaacuccuacaaaaagaauauaucgacagacaagguaaaacaccauuaggucuagucgaccuauuugucuucucaaccucauucuaccuaaucaguauauucuuacaccuuguaaaaauuccaacacauagacacguaauuggcaaaccaugcccaaaaccccacagacuaaaccacaugggaaucugcucauguggacuauacaaacacccaggaguaccagucaaauggaaaagauaa

SEQ ID NO: 1833 - RNA, 1473 nt, Artificial Sequence
  derived and/or modified protein sequence (opt6) from LASV(Lassa virus/H.sapiens-wt/NGA/2015/ISTH_0687;Clade II)__AVO03581__GPC
augggacaaauaauaacauucuuucaagaaguaccacacguaaucgaagaaguaaugaauauaguacuaaucgcacuauccuuacucgcaauacuaaaaggcauauacaauguugccacaugcggccuauuuggacuaguaucauucuuacuucucugcggaagaucuuguucaacaacauacaaaggaguuuacgaauuacaaacucucgaacuagacaugacaaaccugaacaugacaaugccucuaucaugcaccaaaaauaauucccaucacuacaucaugguaggaaaugaaacuggauuagaauugacauuaacaaacacaucaauuauaaaucacaaauuuugcaacuuaucagaugcacauaaaaaaaacuuauacaaucaugcauuaaugucaauaauaucgacauuucaccuaagcauaccuaacuucaaccaauacgaagcuaugucaugugacuucaacggagguaaaauaucaguccaauacaaucucucacacacauaugccguagaugccgcaaaucacugcggaacaguagcaaacggaguauuacaaacauuuaugcgaauggcauggggcggauccuacauagcacucgacagcggaaaaggaggcugggacugcauuaugacaucauaccaauaucuaauaauacaaaacacaacaugggaagaccacugccaauucucaagaccaucaccuaucggauaccucggacuacuaucacaaagaacuagagacauauauauauccagacgauuacuaggaacauuuaccuggacacuauccgacuccgaaggaaaugaaacaccaggaggcuauugucuuacaagauggaugcuaauagaagcagaacuaaaaugcuucggaaauaccgcaguagcaaaauguaaugaaaaacacgacgaagaauucugugacauguuaagacuauucgauuucaacaaacaagccauaagaaaauuaaaagccgaagcccaaaugucaauacaacuaauaaacaaagcaguaaacgcucuaauaaacgaccaacuaauaaugaaaaaccaucuaagagacauaaugggaauaccauacugcaacuauucaaaauacugguacuuaaaucacacuguaacaggaaaaacauccuuaccaaaaugcugguuaguaucaaacggaucauaucucaacgaaacacauuucagcgacgauauagaacaacaagccgacaacaugauaacagaacuucuacaaaaagaauacauggacagacaaggaaaaacuccacuaggacuaguagacuuauucguauuuucaacaucauucuaucuaauuagcaucuuucuacaccuagucaaaauaccaacucauagacacaucauaggaaaaccaugucccaaaccacacagacuaaaucacaugggaauaugcucaugcggccuauacaaacacccaggcguacccguaaaauggaaaagauaa

SEQ ID NO: 1834 - RNA, 1473 nt, Artificial Sequence
  derived and/or modified protein sequence (opt6) from LASV(Lassa virus/H.sapiens-wt/NGA/2015/ISTH_0736;Clade II)__AVO03573__GPC
augggacaaauaauaacauucuuccaagaagucccacacguaaucgaagaaguuaugaacaucgucuuaauagcucuaucucuuuuagccguacuaaaaggaaucuacaauguagcuacaugcggacuauucggauuaguauccuuccuucuacuuugcggaagaucaugcucuacaacuuauaaaggcgucuacgaacuucaaacacuagaauuagacauggcaucauuaaauaugacaaugccauuauccugcacuaaaaacaacucacaucacuauauaaugguuggcaacgaaacaggacuagaacuaacauuaacaaacacaucaaucauaaaucauaaauuuugcaacuuaagugacgcacacaaaaaaaacuuauacgaucacgcauuaaugagcauaaucuccacauuccaccuaucaauuccaaauuucaaccaauaugaagccaugucaugcgauuuuaacggaggaaaaauaucuguacaauacaacuuaucccacacacaugcaguagacgcagccaaccacugcggcacaauagcaaacggaguacuacaaacauuuaugcgcauggcauggggaggauccuacauagcacuagauucaggaaaagguucaugggacuguauaaugacauccuaucaauaccuaauaauccaaaauacaacaugggaagaccacugucaauucuccagacccuccccuauaggauacuuaggacuacucucacaaagaacaagagacaucuacauaucaagaagacuacuaggaacauuuaccuggacacuaucugacucagaaggcaacgaaacaccaggaggauauugucuaacaagauggaugcuaauagaagcagaacucaaaugcuucggaaacaccgcaguagcaaaaugcaacgaaaaacacgacgaagaauuuugugacaugcuaagauuauuugauuucaacaaacaagcaauucgccgacuaaaaacagaagcacaaaugucaauacaauuaaucaacaaagcaguaaaugcacuaauaaacgaccaacuuauaaugaaaaaucaccuaagagacauaaugggaauaccauacugcaacuauucuagauacugguacuuaaaucacacaguaacaggaaaaacaucacuaccaagaugcugguuaguaucuaacggcaguuaucuaaacgaaacacauuucucagacgauauagaacaacaagcagauaauaugauaacagaacuucuacaaaaagaauacaucgacagacaaggcagaacaccccucggauuaguagacuuauucguuuuuuccacaucuuucuaccuaauauccauauuccuccaccucguaaaaauacccacacacagacacguaauaggaaaacccuguccaaaaccacaccgacuaaaccacaugggaauuugcuccuguggccucuauaaacacccaggcguaccagucaaauggaaaagauaa

SEQ ID NO: 1835 - RNA, 1473 nt, Artificial Sequence
  derived and/or modified protein sequence (opt6) from LASV(Lassa virus/H.sapiens-wt/NGA/2015/ISTH_0789;Clade II)__AVO03551__GPC
augggccaaauaguaacauucuuccaagaagucccacaugucauagaagaaauaaugaacauaguauuaauaacacuaucucuacuagcaauacuaaaaggaguuuacaacuuagcaacuugcggcuuaauaggauuaauaaccuuccuauuccuauguggaagaucauguucaacaauauacaaaggaucauaccaauuccaaaccuuagaacuaaauauggaaacacuaaacaugaccaugccacuaucaugcacuaaaaacucaucacaccauuacauccguguuucaaacgaaacaggauuagaauuaacacuaaccaacaccucaauaauaaaccacaaauucugcaacuuaucagacgcacacaagaaaaacuuauacgaccacacacucaugagcaucauaucaacuuuccaccugucuauaccaaacuucaaccaauacgaagcaaugucaugugacuucaauggaggcaaaauaucaguacaauacaaccuaucacacucauacgcuguagaugcagccaaccacugugguacaguagcgaacgguguccuacaaacauucaugcgcauggcuuggggcggauccuacauagcauuagacucaggaagaggcaacugggacuguauaaugacaucauaucaauaccuaauaauacaaaauacaacaugggaagaccacugucaauucucaagaccaucaccaauaggauaccuaggccuacuaucucaaagaacaagagacauuuacauaucaagaagacuacuuggcacauuuacuuggaccuuaucagauucagaaggaaaagaaacaccaggaggauacugccuaacaagauggaugcuaauagaagcagaauuaaaaugcuucggaaauacagccgucgcaaaaugcaaugaaaaacacgacgaagaguucugcgauaugcuuagacuauucgauuuuaauaaacaagcuauacaaagauuaaaagcagaagcacaaaugagcauacaauuaauaaauaaagcaguuaacgcacuaauaaacgaccaacuaauaaugaaaaaccacuuaagagauauaaugggcauuccauacugcaacuauucaaaauacugguaccuaaaucauacaucaacaggacgaaccagccuacccaaaugcuggcuaguuucaaauggcucauaucuaaacgaaacacauuucuccgacgauauagaacaacaagcagacaacaugaucacagaaauguuacaaaaagaauauauagacagacaaggaaaaacaccauuaggauuaguagaccucuucguauucuccacaucauucuacuuaauaucaauauuuuuacaucuuguaaaaauacccacacaucgacacauaguuggaaaauccugcccuaaaccucaccgccuaaaucauaugggcauaugcucauguggucuauacaaacgaccuggugucccagucaaauggaaacgauaa

SEQ ID NO: 1836 - RNA, 1473 nt, Artificial Sequence
  derived and/or modified protein sequence (opt6) from LASV(Lassa virus/H.sapiens-wt/NGA/2015/ISTH_0821;Clade II)__AVO03641__GPC
augggacaaauaauuacuuuuuuucaagaaguuccacacguaauagaagaagucaugaauauaguacuaauagcacuauccuuacuagcaauauuaaaaggaauauacaacguagcaaccugcggacuuuuuggacuaguuucauuccuacuacucugcggacgcucuugcucuaccacauauaaaggcguuuaugaacuucaaacauuagaacuagauauggcuucccuaaacaugacaaugccauuaucaugcacaaaaaacaauucacaccacuauauaaugguaggcaacgaaacaggauuagaauuaacauuaacaaacacaucaauaauaaaccacaaauuuuguaaccuuuccgacgcucacaaaaaaaaccuuuacgaccacacacuaaugucaauaauaucaacauuccaucucucaauaccuaacuucaaccaauacgaagcaaugucaugcgacuucaauggcgguaaaauaaguguacaauacaaccucucacacaccuacgcaguagaugcagcaaaccacugcggaacaauagccaacggaguccuucaaaccuucaugagaauggcauggggaggcuccuacauagcacucgacagugguaaaggcaauugggacugcauaaugacaucauaucaauaucuaauaauacaaaacaccacaugggaagaccacugucaauuuucgagacccucacccaucggauacuuaggcuuacucagccaaagaacaagagauauauacaucucaagaagacuauuaggaacauucacuuggacccucucagacucagaaggaaacgaaacaccagguggauacugccuaacaagauggauguuaauagaagcagaacuaaaaugcuuuggaaacacagcagucgcaaaaugcaacgaaaaacaugacgaagaauucugcgauauguuaagacucuucgauuucaacaaacaagcaauaucccgacucaaaacagaagcacaaaugucuauacaacuaauaaauaaagcaguaaacgcauuaauaaacgaucaauuaauaaugaaaaaccaccuaagagauauaaugggaauaccauacugcaauuacucaaaauacugguacuuaaaccacacaguuacaggaaaaacaucauuaccucgcugcugguuaguauccaacggaucauauuuaaacgaaacacauuuuucagacgacaucgaacaacaagcagacaacaugauaacagaaauguuacaaaaagaauauauagacagacaaggcaaaacaccacuaggacuagucgaucuauucguauuuucaacaucauuuuauuuaauauccauauuccuacauuuaguuaaaauaccaacucacagacacguaauaggcaaaccaugcccaaaaccacauagauuaaaucacaugggaauauguucaugcggacuauacaaacacccaggaguaccaguaaaauggaaaagauaa

SEQ ID NO: 1837 - RNA, 1473 nt, Artificial Sequence
  derived and/or modified protein sequence (opt6) from LASV(Lassa virus/H.sapiens-wt/NGA/2015/ISTH_0831;Clade II)__AVO03545__GPC
augggacaaauagucacauuuuuucaagaaguaccacacgucauagaagaaauaaugaacauaguacuaauaacacuaucacuauuagcaauacuuaaaggaguuuauaaccuugcaaccuguggacuaauaggacuaaucacauuccuauuucuaugcggaagauccugcucaaugacauacaaaggaucauaccaacucgaaacacuagaacuuaauauggaaaccuuaaauaugacaaugccacuaucauguacuaaaaacacaucacaccauuacauaagagucggaaaugaaaccggacucgaauuaacucuaacaaacacaucaauaauuaaccauaaauucugcaacuuaucugaugcccacaaaaaaaauuuauacgaccauuccuuaaugucaaucguaucuacauuucaccucucaaucccaaacuuuaaccaauaugaagccaugucaugugauuuuaacggcggaaaaaucucaauacaauauaauuuaucucacgcauaugcaggcgaugccgcaaaacauugcggaacauuagcaaacggaguauuacaaaccuucaugagaauggcuuggggaggaucauauauagcccucgauuccggaagaggaaacugggacugcauaaugaccucauaucaauaucuaauuauacaaaacaccaccugggacgaccauugccaauucucacgaccaucuccaauaggauaucuaggauuacuaagucaaagaacaagagaaauauauauaucacgaagauuacuaggaacauucacauggacacucucagacucugaaggaaacgaagcaccaggcggauauugucuaaccagauggaugcuaaucgaagcagaacuaaaaugcuuuggaaauacagccguagccaaaugcaacgaaaaacacgacgaagaauuuugcgacauguuaagauuauucgacuucaauaaacaagcaauccaacgacuaaaaacagaagcacaaauguccauacaacucauaaacaaagcugucaaugcccuaauaaacgaccaacucauaaugaaaaaccaccuaagagacauuaugggcauacccuacugcaauuauucaaaauacugguaccuuaaccacaccacaacaggaagaacaucccuaccaagauguugguuagucucaaacggaagcuaccuaaacgaaacacauuucucagaugacauugaacaacaagcagacaacaugauaacagaaaugcuucaaaaagaauacauugauagacaaggaaaaacaccacuaggauuaguagauuuauuugucuucucaaccucuuucuaccuuauaagcauauucuuacacuuagucaaaaucccuacacaccgacauauagucggcaaaucaugcccaaaaccacaccgauuaaaccauaugggaauaugcagcugcggacuauacaaacaaccuggaguaccaguccgguggaaaagauaa

SEQ ID NO: 1838 - RNA, 1473 nt, Artificial Sequence
  derived and/or modified protein sequence (opt6) from LASV(Lassa virus/H.sapiens-wt/NGA/2016/ISTH_0009;Clade II)__AVO03571__GPC
augggccaaauaauaacauucuuccaagaaguaccacacguaauagaagaaguaaugaacauuguauuaauagcacuaucacuacuagcaaucuuaaaaggaauauacaacguagccacaugcggacuacuaggacuagucucauuccuauuacuaugcggaagaucuugcucaacaacauacaaaggcguauacgaacuacaaacauuagaacuagauauggcaucucuaaacaugacaaugccauuaagcugcacaaaaaauaauucacaccauuacauaaugguaggcaacgaaacaggcuuagaacucacauuaacaaauaccucaaucauaaaucauaaauucugcaaucuaucagacgcacauaaaaaaaaccuuuaugaccacgcacuaaugucaauaauaucaacauuccacuuaucuauaccaaauuuuaaucaauaugaagcaaugucuugcgauuuuaacggaggaagaauaucaguccaauacaaucucucacacuccuacgcaguagacgcagcaaaccauugugggacaauagcaaacggaguacuacaaacauuuaugcgaauggcauggggugguaguuacauagcacuagacucaggaaaaggcucaugggacugcauaaugacaucauaccaauaccucauaauacaaaacaccaccugggaggaccacugccaauucucacgaccaucaccaauaggauauuuaggucuucucagucaaagaacaagagacauauauauaucuagaagacuacuaggaaccuucacauggacacuaucagacucagaagggaaugaaacaccaggaggauacugcuuaacaagauggauguuaauagaagcagaacuaaaaugcuucgguaacacagcaguagcaaaaugcaacgaaaaacacgacgaagaauucugcgacaugcuuagacuguucgauuucaauaaacaagcaauaaggagauuaaaaacagaagcacaaaugucaauacaauuaauaaacaaagcaguaaaugcauuaauaaacgaccaacucauaaugaaaaaucacuuaagagauauaaugggaauaccauacuguaacuacucaaaauacugguaucuaaaccauaccguaacaggcaaaaccucauuaccaagaugcugguuaguaucaaacggcuccuacuuaaacgaaacccacuucucagacgauauagaacaacaagcagacaacaugauaacagaacuacuccaaaaagaauacauagaucgacaaggaaaaacaccacuaggucuaguagaccuauucguauucucaacaagcuucuaccuaauaucaaucuuucuacaccuaguaaaaauaccaacacacagacacauaacagguaaaccaugcccaaaaccccauagacuaaaccacaugggcauauguucauguggcuuauacaaccacccaggaguaccaguaaaauggaaacgauaa

SEQ ID NO: 1839 - RNA, 1473 nt, Artificial Sequence
  derived and/or modified protein sequence (opt6) from LASV(Lassa virus/H.sapiens-wt/NGA/2016/ISTH_0017;Clade II)__AVO03567__GPC
augggacaaauaauaaccuucuuucaagaaguaccacacgucauagaagaaguaaugaacauagucuuaauugcacucucacuacuugcaauauuaaaaggaaucuacaaugucgcaacaugcggacuauuugggcuaguaaguuuucuauuauuaugcggccgauccugcuccacaacauacaaaggaguauacgaacuacaaacacuagaauuagauauggcauccuuaaacaugacaaugcccuuauccugcacuaaaaauaacucacaccacuacauaaugguaggcaaugaaacaggcuuagaauuaacacuaaccaauacaaguauaauaaaucacaaauucugcaaucuaucagaugcacacaaaaaaaaccuuuaugaccaugcauuaaugagcauuauauccaccuuccaccuuucaauaccuaacuucaaccaauacgaagcaaugucgugcgacuucaauggcggaaaaaucucaguacaauauaaccucucacacacauacgcaauagacgccgcaaaccacugcgggacuauagcaaacggaguacuacaaacauuuaugagaauggcauggggaggcucauacauagcacuagacucaggaaaaggaucaugggauugcauaaugacaucauaccaauaccuaaucauacaaaacaccacaugggaagaucauugccaauuuucaagacccucaccaauaggauaccuaggacuauuaucacaaagaacacgugacaucuacauaucaagacgacuacucggaacauucacauggacuuuaucagauuccgaagguaacgaaacccccggagguuacugccuaacaagauggaugcuaauagaagcagaauuaaaaugcuucggaaacacagcaguagcaaaauguaacgaaaaacacgaugaagaauucugugacaugcuaagacuauuugacuucaacaaacaagcaaucagaagacuaaaaacagaagcacaaaugucaauacaacuaauaaauaaagcaguaaacgcucuaauaaaugaccaacuaauaaugaaaaaccaccucagagacaucaugggaauaccauauugcaauuauuccaaauacugguaccuaaaccauaccguuacaggcaaaacaucauuaccaagauguuggcuaguaucaaauggcucauaucuaaacgaaacccacuucucagacgacauagaacaacaagcugacaacaugauaacugaacuauuacaaaaagaauacauggaccgccaaggcaaaacaccucuaggccuaguagaucucuucguauuuucaaccaguuuuuaccuaauaucaauauuccuacaccuaguaagaauaccaacucacagacacguaauaggaaaaccaugcccaaaaccacauagacuuaaccauauggguauaugcucauguggauuauacaaacaccccggcguaccaguaaaauggaaaagauaa

SEQ ID NO: 1840 - RNA, 1473 nt, Artificial Sequence
  derived and/or modified protein sequence (opt6) from LASV(Lassa virus/H.sapiens-wt/NGA/2016/ISTH_0035;Clade II)__AVO03619__GPC
augggucaaauaauaacuuucuuccaagaagucccccacguaauagaagaagucaugaacaucguacuaauagcuuuaucacuacucgcaauccucaaaggaauuuacaacgucgcaaccugcggacuauucggccuaguaucauucuuauuacuauguggaagaucaugcucaaugacauacaaaggaguauacgaauuacaaacacuagaacucgacauggcaucacuaaacaugacaaugccauuaucuugcaccaaaaauaacucacaccacuauauaaugguaggaaaugaaacaggacuagaacucacacuuacaaacaccucaauaauaaaccacaaauucugcaaccuaucagacgcacauaaaaaaaacuuauacgaccacgcacuuaugucuauaauaucaacauuccauuuauccaucccuaacuuuaaucaauacgaagcaaugucaugcgacuucaacggaggaaaaauuucaguacaauauaaccucucucacacauacgcaguagacgcugcaaaucacugcggaacaauagcaaauggaguccuacaaacauucaugagaauggcauggggagguucauauauagcacuagacucaggaaaaggaagcugggauuguaucaugaccucauaccaauacuuaauaauacaaaacaccacaugggaagaccacugccaauucucacgaccaucuccaauagguuacuuaggauuacuaucucaacgaacacgcgauauauacauuucccgaagacuauuaggaacauucacauggacacucagcgacagcgaaggaaaugaaacaccaggaggcuauuguuuaacaagauggaugcuaauagaagcagaacugaaauguuucgguaacacagccgucgccaaaugcaacgaaaaacaugaugaagaauucugcgacauguuaagacucuucgacuuuaacaaacaagcuauacgaagauuaaaaacugaagcacaaaugagcauacaacuaauaaacaaagcaguaaaugcucucauuaacgaccaacucauaaugaaaaaccaccuaagagauauaaugggcaucccauacuguaacuacucaaaauacugguaccuaaaccacacaauaacaggcaaaacaucacucccacgcuguugguuaguauccaacggaucuuacuuaaacgaaacacauuucucagacgauaucgaacaacaagcagauaauaugauaacagaauuacuacaaaaagaauacauggaccgacaaggaaaaaccccacuaggacuaguagaucuuuucguauucucaacaucauucuaccuaauaucaauauuccuacauuuagucaaaauaccaacacaccgacauguaauaggaaaacccuguccaaaaccucacagauuaaaccacaugggcauauguucuugcggacucuauaaacacccaggaguaccaguaaaauggaaaagauaa

SEQ ID NO: 1841 - RNA, 1473 nt, Artificial Sequence
  derived and/or modified protein sequence (opt6) from LASV(Lassa virus/H.sapiens-wt/NGA/2016/ISTH_0104;Clade II)__AVO03631__GPC
augggacaaguaauaacauucuuccaagaaguaccccacguaauugaagaaguaaugaacauaguucuaauagccuuaucacuacuagcuauauuaaaaggaauuuacaauguugccacaugcggacuauucggacuaauaucauuuuuguuacucugcggcagauccugcucaacaacuuacaaaggcguauacgaacuacaaacacuagaacuaaacaugcaaaaccuaaacaugacaaugccauuauccugcacaaaaaacucaucacaccacuacauuaugguaggcaaugaaacuggacuagaauuaacacuuacaaacacaucaauaaucaaccacaaauucugcaaccuaucagaugcacauaaaaaaaaccuauacgaccacgcacuaaugucaauaaucucaacauuccaccuaucaauaccaaacuuuaaccaauacgaagcaaugucaugugacuuuaacggcggaaaaauuuccguccaauacaaccuaucccauacauaugcaaucgacgcagcaaaccauugcggaacagucgcaaauggaguuuuacaaacauucaugagaauggcauggggaggaagcuacauagcauuagauucuggaagaggaaacugggacuguauuaugacuuccuaccaauauuuaauaauacaaaauaccacaugggaagaccauugccaauuuucaagaccuuccccaaucggcuaccuaggccuauuaucacaaagaacaagagauauauacaucucacgacgacuccuagguaccuucaccuggacacuaucugacucagaaggaaacgaagcaccaggcgguuacugccucaccagauggauguuaauagaagcagaacuaaaauguuuuggaaacacugcaguagcaaaaugcaaugaaaaacaugacgaagaauuuugugacaugcuaagacuuuucgacuucaauaaacaagcaauaaaaagauuaaaaacugaagcucaaauguccauccaacuaauaaauaaagcagucaacgcauuaauaaacgaccaacuaauaaugaaaaaucaucuaagagacauaaugggcauaccauauugcaauuacucuaaauacugguacuuaaaccacacaguaacaggccgaacaucucuaccuagaugcugguuaguaucaaacggcucauaucuaaacgacacacaauucucugaugacauagaacaacaagcagauaacaugaucacagaaaugcuacaaaaagaauauauggacagacaaggaaaaacaccacuugguuuaguagauuuauucguauuuuccaccucuuucuauuuaauaucaauauuccuacaccuaguaaaaauaccaacacaucgucauauagucggacgaccaugcccaaaaccccaucgacucaaccauauggguaucuguucuuguggacucuauaaacauccugguguacccguuaaauggaaaagauaa

SEQ ID NO: 1842 - RNA, 1476 nt, Artificial Sequence
  derived and/or modified protein sequence (opt6) from LASV(Lassa virus/H.sapiens-wt/NGA/2016/ISTH_0133;Clade II)__AVO03635__GPC
augggucaaauaaucaccuuuuuccaagaaguaccacacguuaucgaagaaguaaugaacaucguccucauagcacuaagucuacuagcaguacuaaaagcaauauacaacguagccacuugcggcguauuuggacuaauaucuuuccuacuacuauguggccgcucaugcuccacaacauauaaaggaguauacgaacuacaaacacucgaauuagacauggcaaaccuaaacaugaccaugccccucuccugcacaaaaaacaauucccaucacuacauaaugguaggaaacgaaacaggcuuagaacuaacacuaaccaacacauccauaaucaaccauaaauuuuguaaccuaucagacgcacacaaaaaaaaccuauaugaccauagccuaauguccaucauaucaacauuccaucuaucuauaccaaacuucaaccaauacgaagcaaugucaugcgauuuuaauggaggcaaaauauccguacaauacaaucuaucucauucauacgcaguagacgcagcaaaacacuguggcacaauugcaaauggaguauuacaaaccuuuaugcgaauggcauggggagggucauauaucgcacuagauagcgguaaaggagguugggacugcaucaugacaucauaucaauaucucauaauacaaaauacaacaugggaagaccauugccaauucucaagaccuucuccaaucggauaccuaggacuauuaucacaaagaacaagagacauauacauuaguagaagacuuuuaggaacuuuuacauggacacuaucagauagcgaaggaaaugacgcaccaggaggauauugccuaaccagauggaugcucauagaagcagaacuaaaaugcuuuggaaacacagcaauagcaaaaugcaaugaaaaacacgacgaagaauucugcgacaugcuaagauuauucgauuucaauagacaagcaauaaaacgacuaaaaacagaagcacaaaugucaauacaacuaauaaacaaagccguuaaugcacuaauaaaugaccaauuaaucaugaaaaaccaccuacgcgauauaauggguauacccuauugcaacuauucaaaauacugguacuuaaaucacacaauaacaggcaaaacaucacuaccaagaugcugguuaguaucaaacggaucauaucucaaugaaacacacuuuucagaugauauagaacaacaagccgacaauaugauaacagaacuacuccaaaaagaauacauggauagacaaggaaaaacaccucuaggacuaguagaucuauucgucuucuccacaucuuucuaucuaauaucaauauucuuacaucuaguaaaaauacccacacacagacauauaguaggcaaaccaugcccaaaaccacauagacuaaaucacauggguauaugcuccugcggauuauacaaacaccccggagucccagucaaauggaaaagacaauaa

SEQ ID NO: 1843 - RNA, 1473 nt, Artificial Sequence
  derived and/or modified protein sequence (opt6) from LASV(Lassa virus/H.sapiens-wt/NGA/2016/ISTH_0141;Clade II)__AVO03649__GPC
augggucaaauaauaacuuucuuucaagaagucccacauguaauagaagaaguaaugaauauaguacuaauaacccuaucacuacuagcaauauuaaaagguaucuacaacgucgcaacaugcggacuauucggcuuaguuucauuucuacucuuauguggacgaucauguagcacaauuuauaaaggaguauacgaacuccaaacacucgaacuagacauggcaucuuuaaacaugacaaugccauuaucaugcacaaaaaacaacucucaucacuacauaaugguaggaaacgaaacaggacucgaauuaacacucacaaacacaucaauaauaaaucauaaauuuugcaaccuaucagacgcucacaaaaaaaaccuauacgaccacgcauuaaugucaaucauaucuacauuccacuuaucaaucccaaauuucaaccaauaugaagcaaugucaugugacuucaacggaggaaaaaucucaguacaauacaacuuaucacauacauacgcagucgacgccgcagaacacugugguacaauagccaacggaguauuacaaaccuuuaugagaauggcauggggaggaucauacauagcacucgauucaggcaaaggaucaugggacugcauuaugacaucauaucaauaccuaauaauacaaaauacaacaugggaagaccauugccaauuuuccagaccauccccaauaggauacuuaggccuccuaucacaacgaacaagagacaucuacauaucaagaagacucuuaggaacauuuacauggacacuaucugauucagaaggaaaugaaacaccaggaggauacugccucaccagauggaugcuaauagaagccgaacuaaaaugcuucggaaacacagcagucgcuaaaugcaaugaaaaacacgacgaagaauuuugcgacaugcuaagacuauucgacuucaauaaacaagcaauaagaagacuaaaaacagaagcacaaaugucaauacaacuaauaaacaaagcaguaaacgcacucauaaacgaccaacuaauaaugaaaaaucauuuaagagacaucaugggaauccccuacugcaacuacagcaaauacugguacuuaaaccauaccguaacaggaaaaacaucauuacccagauguuggcuuguaucaaacggcucauaccuaaacgaaacccgcuucucagaugacauagaacaacaagcagacaauaugauaacugaacuacuacaaaaagaauauauugacagacaaggaaaaacaccacuaggccuaguagaucuauucguuuucaguacaucauuuuaccuaauaucaauauuuuuacaucuuguaaaaauaccaacccauagacacauaauaggaaaaccaugccccaaaccacacagauuaaaccacaugggaauauguucaugcggauuauacaaacacccaggaauacccguaaaauggaaacgcuaa

SEQ ID NO: 1844 - RNA, 1473 nt, Artificial Sequence
  derived and/or modified protein sequence (opt6) from LASV(Lassa virus/H.sapiens-wt/NGA/2016/ISTH_0146;Clade II)__AVO03633__GPC
augggacaaauaauaacuuucuuucaagaaguaccccacgucauugaagaaguaaugaacauaguacuaauagcacuaaguuuacuagcaauacuaaaaggcauauauaacguagcuacaugcggccucuucggauuaguaucauuccuucuauuauguggaagaucaugcucaaccacauauaaaggagucuaugaacuacaaacccucgaauuagacauggcaucacuaaacaugacaaugccacuaucaugcacaaaaaacaauucacaucacuauauaauggucggcaacgaaacaggcuuagaacuaacacuaacaaacaccucuauaauaaaucacaaauucugcaaccuauccgacgcacauaaaaaaaaccuauacgaccaugcacuaaugucaauaauaucaaccuuucaccuuucaauaccuaauuucaaucaauaugaagcaaugucaugcgacuucaacggaggaaaaauaucuguacaauacaacuuaucccauacauacgcugucgacgcugcaaaccauugcggcacaaucgcaaacggcguauuacaaacauucaugagaauggcauggggugguucauacauagcauuagacucaggaaaagguucaugggacugcauaaugacuucauaccaauauuuaauaauacaaaacaccacaugggaagaucacugccaauuuucaagaccaucaccaauaggauauuuaggacuacuaucucaaagaacucgcgacaucuacauauccagaagacuacuaggcacauucacauggacucuaucagauucagaaggaaacgaaacaccuggaggauacugccuaacaagauggaugcuaauagaagcagaacuaaaaugcuucggaaacacagcaguugcaaaaugcaacgaaaaacaugaugaagaauucugcgacaugcuaagacuauucgauuuuaauaaacaagccauaagaagacuaaaaacagaagcacaaaugucaauacaauugauaaauaaagcaguuaacgcacuaauaaacgaucaacuuauaaugaaaaaucaccuaagagacauuaugggaauaccauacugcaacuacuccaaauauugguaucucaaucacacagucacaggaaaaacaagucuaccucgauguuggcuaguauccaacggauccuaccuaaacgaaacacacuuuuccgaugauaucgaacaacaagcagacaacaugaucacugaacuuuuacaaaaagaauauauggacagacaaggaaaaacuccacucggacuaguagaucuauucguauucuccacaucauucuacuuaauaagcauuuucuuacaucuaguuaaaauaccaacacacagacacguuauaggcaaacccugcccaaaaccacaccgacuaaaucauaugggaauuuguuccugcggacuauacaaacacccaggagucccagucaaauggaaaagauaa

SEQ ID NO: 1845 - RNA, 1473 nt, Artificial Sequence
  derived and/or modified protein sequence (opt6) from LASV(Lassa virus/H.sapiens-wt/NGA/2016/ISTH_0187;Clade II)__AVO03549__GPC
augggacaaauaguaacauucuuucaagaaguaccacacguaauagaagaaguaaugaacauaguacuaauagcucuaucaguauuagcaauccucaaaggucuauacaacuucgcaacaugcggacuuaucggccuaguaacauuuuuacuacuaucagguagaucaugcucaauggucuacaaagguguauaugaauuacaaacacuagaacuaaacauggaaacacucaacaugacaaugccauuauccugcaccaaaaauaauucacaccacuacauccgaguaggaaaugacacaggauuagaauuaacacuaacaaauaacacauuacuaaaucauaaauucugcaacuuauccgacgcacacaaaaaaaaucuauaugaucacgcuuuaaugucaauuauaagcacauuucacuuauccaucccuaacuucaaccaauacgaagccaugucaugugacuuuaacggcggcagaauaacaguacaauacaaccuaucacacucuuacgcaguagacgcagcuaaccacuguggcaccgucgcaaauggaguacuacaaacauucaugagaauggcauggggcggaucauacauagcauuagacucaagacauggaaacugggacugcauaaugacauccuaccaauaccuaauuauacaaaacacaacaugggaagaucauugccaauucucaagaccuucaccuauaggauacuuaggacuacucagccaaagaacacgagacauauacauaucuagaagauuacuuggaacauucacauggacacuaucagacucagaaggaaaugaaacacccggaggauacugccuaacacgcuggaugcuaaucgaagcagaacuaaaauguuuuggaaacacagcaguagcaaaaugcaacgaaaaacaugacgaagaauucugcgauaugcuaagacuauuugauuucaauaaacaagcaauaagaagacuaaaagccgaagcccaaaugucaauacaacuaaucaacaaagcagucaacgcgcuaauaaaugaucaauuaauaaugaaaaaucaucuuagagacauaaugggaaucccauacugcaauuacucaaaauacugguauuugaaucacacaucaacaggaaaaacaucauuaccaagaugcuggcuaguauccaauggaucauaccuaaacgaaacacacuucucugacgacauagaacaacaagcugacaauaugauaacagaaauguuacaaaaagaauaucuugaccgacaagguaaaacaccauuaggacuaguagacauauucguauuuucaacaaguuucuaccuaauaucaauauuccuacaucuaauaaaaauacccacacauagacacauaguaggaaaaccaugcccaaaaccacacagauuaaaccacaugggaauaugcucuuguggacuauacaaacaaccaggaguaccaguaagauggaaacgauaa

SEQ ID NO: 1846 - RNA, 1473 nt, Artificial Sequence
  derived and/or modified protein sequence (opt6) from LASV(Lassa virus/H.sapiens-wt/NGA/2016/ISTH_0199;Clade II)__AVO03653__GPC
augggacaaauaauaaccuucuuccaagaagucccacacgucauagaagaaguaaugaauauaguauuaauugcacuaucuuuacuagcaauccuaaaaggcauauacaauguagcaaccugcggacuauucggacuaguaucuuuccuacuccuauguggaagaucuugcagcaccacauacaaaggagucuacgaacuccaaacacuagaacuagacauggcuagucuaaacaugacaaugccacucuccuguacaaaaaacaacagccaucacuauaucaugguaggaaacgaaacaggacuagaauuaacauuaacaaacacuagcauaauaaaccauaaauucugcaaucuaucagacgcacacaaaaaaaacuuauaugaccacgcauuaaugucaauaauaucaacauuccacuuaucaauaccaaauuucaaccaauacgaagcaauguccugcgacuuuaacgguggaaaaauaucuguacaauacaauuuaucacacacauaugccguagacgcagccaaucacugcggaacuauugcaaauggcguccuucaaacauucaugagaauggccuggggaggaucauacaucgcucuagauucaggaaaaggaaacugggacugcauaaugacaucuuaccaauaccuaauaauccaaaauacaacaugggaagaccacugccaguucucacgcccaucaccaauaggauaccucggacuauuaucacaaagaacaagagauauauauauaucacgaagacuucuuggaacauucaccuggaccuuauccgauuccgaaggaaaugaaacccccggcggauauugccuaacacgauggauguuaauagaagcagagcuaaaaugcuucggcaacaccgcagucgccaaaugcaaugaaaaacacgacgaagaauuuugcgacaugcuccgauuauucgacuuuaacaaacaagcaauaucacgcuuaaaaacagaagcucaaaugucaauccaacuaaucaauaaagcaguaaacgccuuaauaaacgaucaacuaauaaugaaaaaucacuuacgagacauaauggguauaccauacugcaauuacaguaaauacugguacuuaaaccacacaguaacaggcaaaaccucauuacccagaugcuggcucguauccaacggaucauaccuuaaugaaacacacuuuucagacgacauagaacaacaagcagauaacaugauaacagaaaugcuacaaaaagaauacauagacagacaaggaaaaacaccacuaggacuaguagaccuauucguauuuagcaccucauucuaucuaauaucaaucuuucuacaucuaguaaaaauaccaacacacagacacguaaucggcaaaccaugcccaaaaccacaccgauuaaaccauaugggaauaugcucuuguggccuauacaaacacccaggaguaccaguaaaauggaaaagauaa

SEQ ID NO: 1847 - RNA, 1473 nt, Artificial Sequence
  derived and/or modified protein sequence (opt6) from LASV(Lassa virus/H.sapiens-wt/NGA/2016/ISTH_0419;Clade II)__AVO03539__GPC
augggacaaauuguaacauucuuucaagaagucccccacguaauagaagaaguaaugaacauaguacuaauugcauuaucccuacuagcaauauuaaaaggaaucuauaacuucgcaaccugcggacuaauaggacucaucacauucuuauuucuaugcggaagaucaugcagcgcuauauacaaaggauccuaucaacuacaaacaauagaacuaaacauggaaacauuaaauaugacaaugccacucucaugcacuaaaaacagcucccaccacuacauaagagucggaaacgaaacaggucuagaauuaacacuaacaaacauaagcauaauagaccacaaauuuugcaaccucagcgacgcacacaagaaaaacuuauacgaccacgccuuaaugucuaucauaucuacauuucaucuaucaauaccaaacuucaaccaauaugaagcaaugucaugcgacuucaacggaggaaaaauaaguguacaauacaaccuaucacauacauacgcaguagacgcagcaaaccacugcggcacaguugcaaacggaguacuacaaacauuuaugagaauggcaugggguggaucauacauagcacuagacucaggaagaggaaacugggauugcauaaugaccucauaccaauacuuaauaauacaaaauacaacaugggaagaccacugccaauucucaagaccaucacccaucggauaccuaggcuuauuaucacaaagaacccgagacauauacauaucaagaagauuauuagguacauucaccuggacauuaucggacucagaaggaaaagaaacaccaggcggauacuguuuaaccagauggauguuaauagaagcagaacuaaaaugcuuuggaaauacagcaguagcaaaaugcaaugaaaaacacgaugaagaauuuugcgacaugcuaagacucuucgacuucaacaaacaagcaauacaaagacucaaagccgaagcacaaauguccauucaacuaauaaacaaagccguaaacgcucuaauuaacgaucaauuaauaaugaaaaaccacuuaagagacauaaugggaauaccauacugcaacuacuccaaauacugguacuuaaaucacacaucaaccggacgcacaucucuaccacgaugcuggcuaguaucaaauggaagcuacuuaaacgaaacacauuucucagaugacauagaacaacaagcagacaacaugauaacagaaaugcuucaaaaagaauacauagaccgacaagguaaaacaccacuaggucuagucgaucuauucgucuucucaacaaguuuuuaucuaauuucaauauuccuacaccuaauaaaaauaccaacacaccgucacauaguaggaaaaucaugcccaaaaccacacagacuaaaccacauggguauaugcuccuguggacuauacaaacaacccggaguaccaguaaaauggaaaagauaa

SEQ ID NO: 1848 - RNA, 1473 nt, Artificial Sequence
  derived and/or modified protein sequence (opt6) from LASV(Lassa virus/H.sapiens-wt/NGA/2016/ISTH_0447;Clade II)__AVO03559__GPC
augggacaaauaauaaccuucuuucaagaaguaccacacguaauagaagaaguaaugaauauaguauuaauugcacucagcuuacuagcaauauuaaaaggaauauauaauauagccaccugcggacuauucggauuaguuaguuucuuacuauuauguggacgcuccugcucaacaacauacaaaggaguauacgaacuacaaacccuagaacuagacauggcaucauuaaacaugacaaugccauuaucauguacaaaaaacaacucacaccacuacauaaugguaggaaacgaaacuggacuagaacuuaccuuaacaaacacaucuauaauaaaccacaaauucuguaaucuaagugaugcacauaaaaaaaacuuauaugaccauacauuaaugucaauaauaucaacauuccauuuaucuauaccaaacuucaaccaauacgaagcaaugucaugcgacuucaauggaggcaaaauaucaguacaauacaaccuaucacacgcauacgcaguagacgccgcaaaucacugugguacaauugcuaauggaguuuuacaaacauuuaugagaauggccuggggaggaucauacauagcacuagacuccggaaaaggaaacugggacugcauuaugacauccuaccaauaucuaaucauacaaaacacaacaugggaagaucacugccaauucucacgaccaucaccaauaggauaucuaggauuacuuucacaaagaacuagagauauauauaucucacgaagacuccuaggaacuuucacauggacccuaucagacucagaaggaaaugaaacaccagguggauacugcuuaacaagauggaugcuaauagaagcagaacuuaaauguuuuggaaacaccgcagucgcaaaaugcaaugaaaaacaugacgaagaauuuugcgacaugcucagacuauuugauuuuaacaaacaagcaauaagacguuuaaaaacagaagcacaaauguccauacaauuaauaaacaaagcuguaaaugcacuaauaaacgaucaauuaauaaugaaaaaccacuuaagagacaucaugggaauccccuauuguaacuacucaaaauacugguaccuaaaccacacaguaaccggaaaaacauccuuaccacguuguuggcuaguuucaaacggaucuuaucuaaacgaaacacacuucucagacgauaucgaacaacaagcagauaacaugauaacugaacuccuacaaaaagaauacauagaucgacaaggaaaaaccccauuaggcuuaguagauuuauucguauucucaacaucauucuaucuaauaucaauauucuuacaucucguaaaaaucccaacacaucgacacguugucggcaaacccugcccaaaaccacacagauuaaaccacaugggaauaugcagcugcggucuauauaaacaccccggcguaccaguaaaauggaaaagauaa

SEQ ID NO: 1849 - RNA, 1473 nt, Artificial Sequence
  derived and/or modified protein sequence (opt6) from LASV(Lassa virus/H.sapiens-wt/NGA/2016/ISTH_0543;Clade II)__AVO03595__GPC
augggacaaauaauaacauucuuccaagaaguaccacacguaauagaagaagucaugaacauaguucuaauagcacuaucauuacuagccauacuuaaagguauauacaacaucgcaacuuguggacuuuucggacuuauaucauucuuauuauuaugcgguagaucaugcucaacaacauacaaaggaguauacgaacuccaaacacuagaauuagacauggcaaaccuaaacaugaccaugccacucucauguaccaaaaacaauucacaccacuacauaaugguaggaaacgaaacaggacuugaauuaacacuaacaaauacaaguauaaucaaccacaaauucugcaaccucucagaugcucacaagaaaaacuuauacgaccaugcauuaaugagcauaauaaguacuuuucaccuaucuauacccaacuucaaccaauacgaagcaauguccugcgacuucaaugguggaaaaauaucaguucaauauaacuuaagccauaguuacgcaguagaugcugcaggacacugcggaacaauagcaaacggaguacuccaaacauucaugagaauggcauggggaggaucauauauagcacuagacucaggaaaaggaaauugggauuguauaaugacaucauaccaauaucuaguaauacaaaacacuacaugggaagaccacugucaauucagcagaccuucaccaauaggauaccuaggacuacuaucacaaagaacaagagauauauacauaucaagaagacuacuaggaacauucacauggacacuuuccgacucagaaggaaacgaagcaccaggaggauauugcuuaaccagauggaugcuaaucgaagcagaauuaaaaugcuucgguaacacagcaauagcaaaauguaacgaaaaacacgacgaagaauuuugcgacaugcuaagacucuucgacuucaauaaacaagcaauacgaagacuuaaagccgaagcucaaaugucaauacaacuaauaaacaaagcaguaaacgcacuaauaaacgaccaauuaauaaugaaaaaucauuuacgagacauaaugggaauaccauacugcaauuacuccaaauacugguaucuuaaucacacuguaacaggaaaaacaucacuaccaaaauguuggcuaguaucaaacggaucauaccuaaacgaaacacauuucucugaugauauagaacaacaagcagauaauaugauaacagaacuacuacaaaaagaauacauggacagacaaggaaaaacaccacuaggucuaguagaccuauucguauucucaacuucauucuaucuaaucuccauauuccuccaucucguaaaaauaccaacacacagacacauaguaggacgaccuuguccaaaaccacacagacuaaaccacaugggcauauguuccuguggauuauacaaacauccaggugucccagucaaauggaaaagauaa

SEQ ID NO: 1850 - RNA, 1473 nt, Artificial Sequence
  derived and/or modified protein sequence (opt6) from LASV(Lassa virus/H.sapiens-wt/NGA/2016/ISTH_0565;Clade II)__AVO03637__GPC
augggacaaaucguaaccuucuuucaagaaguaccacauguaaucgaagaaguaaugaacauaguccuaauagcauuaucacuucuagcaauccuaaaaggaauauauaacguagcaacaugcggauuauucggacuaauaucauuccucuuauuaugcggcagaucaugcucuacaaccuauaaagguguauacgaacuacaaacacuagaauuagacauggcuaaccuaaauaugacaaugccacuaucauguacaaaaaauucaucacaucauuauauaaugguaggaaacgaaaccggauuagaauuaacacuaacaaacacaucaauaauaaaucacaaauucugcaaccucucagaugcacauaaaaaaaaucuauacgaccacgcacuaauguccauaauaucaacauuucacuuaucaauaccaaauuucaaucaauacgaagcgaugucaugcgacuucaacggcggaaaaauaucaguacaauauaaccuaagucacacauaugcaguagacgcagcaaaccacugcggaacuaucgcaaauggaguucuacaaacauucaugcgaauggcauggggaggcucuuacauugcacuagauucaggaaaaggaaacugggacugcauaaugacaucauaccaauaccuaauaauacaaaacacaacaugggaagaccacugucaauucucuagaccaucaccaauuggauaccuagguuuacuaagccaaagaacacgagacauauacauaucaagaagauuacuuggaacauuuacauggacauuaucagacucagaaggcaacgaagcaccuggaggcuacugcuuaaccagauggaugcuaauugaagccgaacuaaaaugcuucgguaacacagcaauagcaaaaugcaacgaaaaacacgacgaagaauucugcgacauguuaagacuauucgacuucaacaaacaagccauaaaaagacuaaaaucagaagcacaaaugucuauacaauuaauuaacaaagcaguaaacgcccuaauaaacgaccaauuaauaaugaaaaaucacuuaagagacauaaugggcauaccauacugcaacuauucacgauauugguaucuaaaccacacggucacaggaaaaacaucccuaccacgauguuggcuaauaucaaauggauccuaccucaaugaaacacacuucucagaugauauagaacaacaagccgacaacaugauaacagaauuauuacaaaaagaauacauggaccgacaaggaaaaacuccacuaggacuaguagaucuuuucgucuucucaacaucauucuaccucauauccauauuccuacaucuaguuaaaauaccaacacaucgccacauagucggcagaccaugcccaaaaccacauagacuaaaccauaugggaauaugcucauguggacucuauaaacaucccggagucccagucaaauggaaacgauaa

SEQ ID NO: 1851 - RNA, 1473 nt, Artificial Sequence
  derived and/or modified protein sequence (opt6) from LASV(Lassa virus/H.sapiens-wt/NGA/2016/ISTH_0572;Clade II)__AVO03611__GPC
augggacaaauuauaacauucuuucaagaagucccucacguuaucgaagaaguaaugaacauaguauugauagcacuaucacuacucgccauauuaaaaggaaucuacaacgucgcaaccugcggacuauucggauuaguagcauucuuacuacucugcgguagaucaugcucaacuacauacaaaggaguauacgaacuucaaacauuagaacucgacauggcaucucuuaacaugacaaugccacuaucaugcaccaaaaacaauucacaucauuacauaaugguuggaaaugaaacaggccuagaacuaacauuaacaaacacaucaaucaucaaccacaaauuuuguaaucuuucagacgcacacaaaaaaaauuuauacgaucaugcacuaaugucuauuaucucaacauuccacuuaucaauaccaaacuucaaucaacacgaagccaugucuugcgauuuuaacggaggcaaaauaucaguacaauacaauuuaucacacacauacgcaguugaugccgccaaccauuguggaacaauagcuaacggagugcuacaaacauuuaugagaauggcauggggaggcucauacauagcacuagauuccggaaaaggaucaugggauugcauaaugacuucauaccaauaccuaauuauacaaaacacaaccugggaagaucacugccaauucucaagaccauccccuauagguuaccuaggacuccucucacaaagaacaagagacauauacauuucacgaagacuucucggaacuuucaccuggacauuaucagacucagaaggaaacgaaacuccaggaggauauugccuaaccagauggaugcuaauagaagcagaacuaaaaugcuucggaaauacagcaguagcaaaauguaacgaaaaacacgacgaagaauucugcgacaugcuaagacuauucgacuucaacaaacaagcaauucgaagacucaaaacugaagcucaaaugucuauacaauuaaucaacaaagcagucaaugccuuaauaaacgaucaacuaaucaugaaaaaccaccuaagagacauaaugggaauacccuauugcaauuacagcaaauauugguaccuaaaccauacagucacagguagaaccucauuacccagaugcugguuaguaucaaacggaucauaucuaaacgaaacacauuuuucagaugauauagaacaacaagcagauaacaugauaacagaacuacuacaaaaagaauacauggacagacaaggaaaaacaccccuaggacuaguagaccuauucguauucuccacaucauucuauuuaaucucaauauuccuacaucuuaucaaaauaccaacacaccgacacguaauagguaaaccaugcccaaaaccucauagacuaaaccacaugggaauaugcucaugcggacuauacaaacacccaggaguaccaguaaaauggaaaagauaa

SEQ ID NO: 1852 - RNA, 1473 nt, Artificial Sequence
  derived and/or modified protein sequence (opt6) from LASV(Lassa virus/H.sapiens-wt/NGA/2016/ISTH_0610;Clade II)__AVO03585__GPC
augggacaaauaauuaccuucuuucaagaaguaccacacguaaucgaagaagucaugaacauaguacuaauagcacuaucacuauuagcaauacuaaaaggaguguacaacguagcaacaugcggucuauuuggacuuguaucuuuccuacuauuauguggaagaucauguagcacaaccuacaaaggaguauaugaauuacaaacacuagaauuagacauggcaucacuaaacaugaccaugccacuaucaugcacuaaaaacaauucccaccacuacaucaugguaggaaacgaaacaggacuagaauuaacacucacaaacacaucaauaauaaaccacaaauucugcaaucuaucagaugcacauaagaaaaaccuauacgaccacgcacuaaugagcauaauaucaacauuccaucuauccauaccaaauuucaaccaauacgaagccaugucaugcgauuucaacggaggaaaaaucucuguccaauacaacuuaucacacaccuacgccguagaugcagccaaucauugcgguacaauagcaaacggaguucuccaaacauuuaugagaauggcauggggaggaucuuauauagcuuuagacagugguagaggcucaugggauugcaucaugacaaguuaucaauauuuaauaauacaaaacacuacaugggaagaucacugucaauuuuccagacccagcccaauaggauaucuaggacuauuaagccaacgaacccgagauauauauauaucaagacgacuacuaggaacauuuaccuggacccuaucagauucagaaggaaacgaaacccccgguggauacugccuaacaagauggaugcuaauagaagcagaacuaaaaugcuucggaaacacagccgucgcaaaaugcaaugaaaaacacgacgaagaauuuugcgacauguuaagacuauuugacuucaauaaacaagcaauaagaagacuaaaagcagaagcucagaugucaauucaacuaauaaauaaagcagucaaugcauuaauaaacgaucaacuaauaaugaaaaaccacuuaagagacauaaugggcauacccuacuguaauuacucaaaauacugguaucuuaaucacacaguaacaggaagaaccucucuaccaagaugcuggcuaguauccaacgguagcuaccuaaacgaaacacacuucucagaugacauagaacaacaagccgauaacaugauaacagaauuacuacaaaaagaauacaucgacagacaaggcaaaacaccccuaggccuaguagaccuauucguauucucaacaucauucuacuuaauuucaaucuuucuccauuuaguaaaaauacccacacauagacacauaauaggaaaaccaugcccaaaaccacauagacucaaucacauggguauuugcucaugcggacuauacaaacacccaggaguaccaguaaaauggaaaagauaa

SEQ ID NO: 1853 - RNA, 1473 nt, Artificial Sequence
  derived and/or modified protein sequence (opt6) from LASV(Lassa virus/H.sapiens-wt/NGA/2016/ISTH_0621;Clade II)__AVO03543__GPC
augggacaaauaguuacauucuuucaagaaaucccacacguugucgaagaaauaaugaacauaguacuaauaacauuaagucuucuagccauacuaaaaggacuauauaacuucgcaacaugcggucuaauaggccuaauuacauuccuguuccuaugcggaagaucaugcuccacaauauauaaaggaaguuaccaacuucaagcacuagaacuaaacauggaaacuuuaaauaugaccaugccacuaucaugcaccaaaaacaacucccaccauuacauaagaguaggaaaugaaacagguuuagaacuaacacucacaaauacaucaauaaucgaccauaaauuuuguaauuuaucugacgcacacaaacgaaacuuauaugaucauacacuaauguccauaauuucaaccuuucaccuuucaauaccaaauuucaaccaauacgaagccaugucaugcgacuuuaacggaggaaaaauuucaguccaauacaacuuaucacacucauacgcaggcgacgcugcaagacacugcggaacaguagcaaauggaguacuacaaaccuucaugagaauggcauggggcggaucauacauagcacuagauucaggaaaaggaaacugggacugcauuaugaccucauaccaauaccugauaauccaaaacacaacaugggaaaaccauugccaauucucuagaccaucaccaauaggcuacuuaggccuauuaucucaaagaacacgagauauauacaucucaagaagauuauuaggaacauuuacauggacauuaucagacucagaagguaaagaaacaccaggaggauacugccuaacacgcuggaugcucauagaagccgaacuaaaaugcuucggaaauacagcaguagcaaaaugcaacgaaaaacacgacgaagaauuuugcgacaugcuuagacucuucgauuucaauaaacaagcaauacaaagacuaaaaacagaagcacaaaugucaauacaauuaauaaacaaagcaguaaaugcacuaauaaacgaccaauuaauuaugaaaaaccauuuaagagauaucaugggaauaccuuauuguaauuauucaaaauacugguaccuaaaccacacaacaaccggcaaaacaucucuccccaaaugcuggcugguaucaaacggcucauaccucaacgaaacacacuucuccgacgacaucgaacaacaagcagacaacaugauaacagaaaugcuacaaaaagaauacauagauagacaaggaaaaacaccacuuggucuuguagaccuauuugucuucuccacaucauucuauuuaaucucaauauuccuacacuuaauaaaaauaccuacacacagacacauaguaggaaaaucauguccaaaaccacaccgccucaaucacaugggaauaugcuccuguggacucuauaaacaacccggcgucuuaguaaaauggaaaagauaa

SEQ ID NO: 1854 - RNA, 1473 nt, Artificial Sequence
  derived and/or modified protein sequence (opt6) from LASV(Lassa virus/H.sapiens-wt/NGA/2016/ISTH_0701;Clade II)__AVO03629__GPC
augggucaaaucauaacauucuuccaagaagucccccauguaauagaagaaguaaugaauauaguacucaucgcacuuucauuacucgcaauucuaaaaggaauauauaacguagcaacaugcggucuauucggccuuguuuccuuccuacuccuaugcggaagauccugcaguaccacuuauaaaggaguuuacgaacuacaaacacucgaauuagauauggcaucacuuaacaugacuaugccucucuccugcacaaaaaacaacucacaccacuacauaaugguaggaaaugaaacaggacuagaacuaacauuaacaaacacaagcauaauuggccacaaauucugcaaccuauccgacgcacacaaaaaaaaccuauaugaccaugcacuaaugaguauaaucuccacuuuccacuuaucuauaccaaauuucaaccaauacgaagcaaugucaugcgacuuuaacggaggaaaaauaucaguucaauacaaccucucucacgccuaugcaguugacgccgccaaccauugcggaaccaucgccaacggaguccuacaaacauucaugagaauggcuugggguggaucuuauaucgcacucgauucuggaaaaggauccugggacugcauaaugacaucauaccaauaccuaauaauccaaaacacuaccugggaagaucauugucaauucucacgaccaagccccaucggauacuuaggucuacuaucacaaagaacucgagauauauacauauccagaagauuauuagguacauucacauggaccuuaagcgauucagaagguaacgaaacaccuggaggauacugccuaacacgauggaugcuaauagaagccgaacuaaaauguuuuggaaacacagccguugcaaaaugcaacgaaaaacacgaugaagaauuuugcgacaugcuaagacuauucgacuucaacaaacaagcaauaagaagauuaaaaacagaagcacaaauguccauacaacuaauuaauaaagcaguaaaugcauuaauaaaugaccaacuaauaaugaaaaaccaccuuagagacauaaugggaauaccauacuguaauuacucaaaauacugguaccuuaaccacacagucacuggaaaaacaucauuaccaagaugcuggcuaguaucuaauggcucauaccuaaaugaaacacauuucucagacgacauagaacaacaagcagacaauaugauuacagaacuacuucaaaaagaauacauagacagacaaggaaaaacaccauuaggacuaguagaccuauucguauucuccacauccuucuaucuaauaucaauauuccuucaucuaguaaaaauacccacacacagacacguaaucggcaaaccaugcccaaaaccccacagauuaaaccacauggguauaugcucauguggacuauauaaacauccaggaguaccaguaaaauggaaacgauaa

SEQ ID NO: 1855 - RNA, 1473 nt, Artificial Sequence
  derived and/or modified protein sequence (opt6) from LASV(Lassa virus/H.sapiens-wt/NGA/2016/ISTH_0702;Clade II)__AVO03557__GPC
augggacaaauuaucacauucuuucaagaaguaccacauguaauagaagaagucaugaacauaguacuuauagccuuaucacuacuagcaguauuaaaagguauauauaacguagcaacaugcggccucuucggauuagucgccuuccuauuacuaugcggacgaucaugcucaacaacuuacaaaggaguauacgaauuacaaacauuagaacuugacauggcuaaccuaaauaugacaaugccacuaucauguacuaaaaauaacucacaccacuauauaauggucggcaaugaaaccggacuagaacuaaccuuaacaaacacaucuauaaucaaccauaaauucugcaacuuaucagacgcacacaaaaaaaauuuauacgaucacgcccuaaugucaauaauaucaacauuccaccuaucaauuccaaauuucaaccaauacgaagcuaugagcugcgauuucaauggcggaaaaauaucaguacaauauaauuuaucacauaccuaugccguagacgcagcaaaccacugcggcacaauugcaaacggaguccuacaaacuuucaugcgaauggcuuggggagguucauacauagcacuagacucuggaaaaggaaguugggacugcauaaugacaucuuaccaauaccucaucauacaaaacacuacaugggaagaucacugccaauuuucuagacccucaccaauaggauaccucggacuauuaucacaaagaacaagagacauauauauaucaagacgauuacuaggcacauuuaccuggacuuuauccgauucugaaggcaacgaaacaccaggaggauacugccuaacaagauggaugcuaauagaagcagaauuaaaaugcuucggcaauacagcuguagcaaaaugcaacgaaaaacaugaugaagaauucugcgacaugcuaagauuauuugauuuuaacaaacaagcaaucagaagacuuaaaacugaagcacaaaugucuauccaauuaauaaauaaagcaguaaaugccuuaauaaacgaccaacuaauaaugaaaaaccaccuaagagauauaaugggaauaccauauugcaacuauucuaaauacugguauuuaaaccacacaguuaccggaagaacaucacuaccccgaugcugguuaguaucaaacggaucauaucucaaugaaacucacuucuccgaugacauagaacaacaggcagauaauaugauaacagaauuacuacaaaaagaauauauggacagacaaggaaaaacaccacuaggacucguagaccucuucgucuuuuccacauccuucuaccuaauaucaauauuucuacauuuaaucaaaauaccaacccacagacacguaauaggaaaaccauguccaaaaccacacagacuuaaccacaugggaauaugcucauguggccuauacaaacacccaggaguuccaguuaaauggaaaagauaa

SEQ ID NO: 1856 - RNA, 1473 nt, Artificial Sequence
  derived and/or modified protein sequence (opt6) from LASV(Lassa virus/H.sapiens-wt/NGA/2016/ISTH_0703;Clade II)__AVO03597__GPC
augggacaaauaauaacauucuuccaagaaguaccacacguaauagaagaaguaaugaacauaguucuaauugcacuaucgcuucuagcaauacuaaaaggaauauacaaugucgcaacaugcggacucuuuggacucguaucuuucuuacuauuaugcggacgauccuguagcacaaccuacaaaggagucuaugaauuacaaacacuagaacucgacauggccucacuaaauaugacaaugccacuauccugcacaaaaaacaacucacaccacuacauaaugguuggcaacgaaacaggauuagaauuaacuuuaacaaauacaucaauaauaaaucauaaauucugcaaucuuagcgacgcccacaaaaaaaaccuauaugaccacgcccuaaugucaaucauaucaaccuuccaccuaucaauaccuaacuucaaccaauacgaagcaaugucaugcgacuuuaacggcggaaaaaucucuguacaauauaacuuaucacauacauacgcaguagacgcagccucacacugcggaacaauagcaaacggcguacuacaaacauucaugcgaauggcauggggcggaucauacaucgcauuagacagcggaaaaggaucaugggacuguauaaugaccucauaccaauaccuaauaauacaaaacacaacaugggaagaccacugucaauucucacgaccaucaccaauuggauaccuagguuuauuaucacaacgaaccagagacaucuacauaucacgcagauuacuaggaacauuuacauggacauuaucagacuccgaaggaaaugaaacuccaggaggauacugcuuaacccgauggaugcuaauagaagccgaauuaaaaugcuucggaaacacagcaguagccaaaugcaacgaaaaacaugaugaagaauuuugugacauguuacgauuauucgacuuuaacaaacaagcaauaagacgucuaaaaacagaagcacaaaugucaauacaacucauuaacaaagcaguaaacgcuuuaauaaacgaccaacuaauaaugaaaaaucaccucagagauauuaugggcauaccauauugcaacuacucaaaauacugguaccuaaaccauacaguuaccggaagaacauccuuaccaagauguuggcuaguaucaaacggauccuacuuaaaugaaacacacuucucagacgacauugaacaacaagccgacaauaugauaacugaacuacuacaaaaagaauacauagagcgacaaggaaaaacuccacucgguuuaguagaccucuucguuuucucaacgucauuuuaucucauaucaauauuccuacacuuaaucaaaauaccaacacacagacauguaaucggaaaacccuguccaaaaccacacagacuaaaucauaugggaauaugcucaugcggacuauacaaacaucccggagucccaguaaaauggaaaagauaa

SEQ ID NO: 1857 - RNA, 1473 nt, Artificial Sequence
  derived and/or modified protein sequence (opt6) from LASV(Lassa virus/H.sapiens-wt/NGA/2016/ISTH_0717;Clade II)__AVO03547__GPC
augggacaaaucgugacauuuuuccaagaaguaccacauguaauagaagaaguaaugaacaucguacuaauagcauuauccauacuagcaauauuaaaaggacuauauaauguugcaacauguggacuaauaggacuagucaccuucuuauuacuaucagguagaucauguuccaugaucuauaaaggcgucuacgaauuacaaacacuagaacuaaacauggaaacauuaaacaugacuaugccacuaagcugcacaaaaaacaacucgcaccacuauauaaugguaggaaacgaaacaggccuagaacuaacacuaacgaacacaucacuacucaaccacaaauuuugcaaccucucagacgcacacaaaaaaaaccuauacgaucacacauuaaugucaauaauaucaaccuuucaucuaucaauuccuaacuuuaaccaauacgaagcaaugucaugcgauuucaauggaggcaaaauaaccguacaauacaauuuaucacauacauaugcagucgacgcaguaaaccauuguggaacacuagcaaacggaauacuacaaacauucaugagaauggccuggggcggcucuuacauagcccuugauuccagacacggauccugggacugcauaaugacaucuuaccaauaccuaauaauacaaaacacaacaugggaagaucacugccaauucucaagaccaucaccaauaggauaccuaggacuauuaucacaaagaacacgcgauauauauaucucaagacgcuuauuaggcacauucacauggacacuaucagacucagaagguaaugaaacaccaggaggcuacuguuuaacaagauggaugcuaauagaagccgaauuaaaaugcuuugguaacacagcuguagccaaaugcaacgaaaaacacgacgaagaauucugcgauauguuacgacuauucgauuucaacaaacaagccauaagaagauuaaaagcagaagcccaaaugucaauacaacuaauuaacaaagcagucaacgcccucauaaaugaccaacuaauaaugaaaaaccaccuaagagacauaauggguauaccuuacugcaauuacucaaaauauugguaccucaaccacacaucuaccggaagaacuucacuaccacgauguuggcucgucucaaacggaucauaccuaaaugaaacacacuuuucagacgacauagaacaacaagcagacaacaugauaaccgaaaugcuacaaaaagaauacuuagacagacaaggaaaaacaccauuaggacuaguagaucuauuugucuuuaguacaucguuuuauuuaauaucaaucuuuuuacaccuaauaaaaauaccaacacaucgacacaucguuggaaaaccaugcccaaaaccacaccgauuaaaucacaugggaauaugcagcugcggauuauacaaacaaccagguguuccaguaagauggaaaagauaa

SEQ ID NO: 1858 - RNA, 1473 nt, Artificial Sequence
  derived and/or modified protein sequence (opt6) from LASV(Lassa virus/H.sapiens-wt/NGA/2016/ISTH_0753;Clade II)__AVO03609__GPC
augggccaaauaauaaccuucuuucaagaaguaccccacguaauagaagaaguaaugaacauaguauuaauagcacuaucccucuuagcaauacuaaaaggcauauacaacguagcaacuugcggucucuucgguuuaguaucauuccuacuacuauguggacgcagcugcucuacaacauauaaaggaguauaugaauuacaaacacuagaacuagacauggccucauuaaacaugacaaugccacuaaguugcacuaaaaauaauucacaucacuacauaaugguaggaaacgaaacaggauuagaauuaacacuaacaaacacaaguauaauaaaccauaaauucugcaaccuaucugacgcucacaagaaaaacuuauacgaccaugcacuaaugucaauuaucagcacauuccaccuuucuauaccaaacuucaaccaauaugaagcaaugaguugcgacuuuaacggaggaaaaauaucaguccaauauaaccuaucccacacauacgcaguagaugccgcaaaccauuguggaacaauagccaauggaguacuacaaacuuucaugagaauggcauggggaggaucuuauauugccuuagacucuggaaaaggaaacugggacuguauaaugacaucauaccaauaucuaauuauacaaaauacaacaugggaagaccacugccaauucucacguccaagucccauaggauaucuaggauuacucucacaacgaacuagagacauauauauaucuagaagacuauuaggaacauucaccuggacccuaucugacucagaaggaaacgaaaccccaggaggauacugcuuaacacguuggauguuaauagaagcagaauuaaaaugcuuuggaaacaccgcaguagcaaaauguaaugaaaaacaugacgaagaguucugugauaugcuaagauuauuugacuucaauaaacaagcaauaucaagacuaaaaaccgaagcacaaauguccauacaacuuauaaauaaagcagucaacgcacucauuaacgaccaacucauaaugaaaaaucacuuaagagacauaaugggcaucccauacuguaacuacucaaaauacugguacuuaaaccacacaguaacaggaagaacaucacuaccaagaugcuggcuagugagcaaugguagcuaucuaaacgaaacccacuucagcgaugauauagaacaacaagcagauaacaugauaacagaacuacuacaaaaagaauauauggauagacaaggaaaaacaccacuaggauuaguagaucuauucguauucucaacauccuucuauuuaauaucaauauuucuacaccuaguaaaaauaccaacacacagacauguaauaggcaaaccauguccaaaaccacacagacuaaaccauaugggaauaugcaguuguggauuauacaaacaccccggaguacccguuaaauggaaacguuaa

SEQ ID NO: 1859 - RNA, 1473 nt, Artificial Sequence
  derived and/or modified protein sequence (opt6) from LASV(Lassa virus/H.sapiens-wt/NGA/2016/ISTH_0759;Clade II)__AVO03593__GPC
augggacaaauaauaacuuucuuucaagaaguaccacacguaauagaagaaguaaugaauauaguauuaauagcacuaucauuacuagcuauacuaaaaggaaucuauaacguagcaacaugcggauuauucggauuaguaucauuccuauuacucugcgguagaucauguucuaccacuuacaaaggcgucuaugaacuacaaacacuagaauuagacauggcaucuuuaaauaugacaaugccauuaucaugcaccaaaaacaauucacaccauuauauaaugguuggaaacgaaacaggauuagaacuaacacucacaaacaccucaauaauaaaccacaaauuuugcaacuuaucagacgcacacaaaaaaaaucuauacgaccacacccuaaugaguauaaucucaaccuuccacuuaucuauaccaaacuuuaaccaauaugaagccaugaguugcgacuuuaauggaggaaaaaucucaguacaauauaacuuaucacacacuuacgcaguagaugcagcaaaccacugcggaacuaucgcaaacggaguacuacaaacauuuaugagaauggcauggggaggaucauacauugcacuagauuccgguaaaggcucaugggacuguauuaugacaucauaccaauaccuaauaauacaaaacacaucaugggaagaccacugccaauuuucccgaccauccccaaucggauacuuaggacuauuaucccaacgaaccagagauauauacauaucacgccgacuacuaggaacauucacauggacauuaucagauucagaaggaaacgaaacaccagguggcuacugccuaacaagauggaugcucaucgaagccgaacuaaaaugcuucggaaacacagcaguagcaaaaugcaaugaaaaacacgacgaagaauucugugacaugcuccgacuauuugauuucaauaaacaagcaauaagaagauuaaaaacagaagcacaaaugucaauacaauuaauaaacaaagccguaaaugcacuaauaaacgaucaauuaauaaugaaaaaucaccuaagagacauaaugggaauacccuacugcaacuacucuaaauacugguauuuaaaccacacaguaacaggaaaaacaucuuuaccaagaugcugguuggucucaaauggcucauaucuaaacgaaacucacuucucagaugacaucgaacaacaagcugacaacaugauaacagaauuauuacaaaaagaauacauagacagacaaggcaaaacaccccuagguuuaguagaccuauuuguauucucaacaucauucuaccuuauaucaauauuucuacaucuuguaaaaauaccaacacaccgacacgucauaggaaaacccugcccaaaaccacacagacuaaaccacauggguauauguuccugugguuuauauaaacauccuggaguaccaguaaaauggaaaagauaa

SEQ ID NO: 1860 - RNA, 1473 nt, Artificial Sequence
  derived and/or modified protein sequence (opt6) from LASV(Lassa virus/H.sapiens-wt/NGA/2016/ISTH_0777;Clade II)__AVO03615__GPC
augggacaaauaauaacauuuuuccaagaagucccccauguaauagaagaagucaugaacauaguucuaauagccuuaucacuacuagcaauccuaaaaggcauuuauaauguagcaaccugcggacuacuaggauuaauaucauucuuacucuuaugcggacgcucaugcaguacaacauauaaaggaguauacgaacuccaaacuuuagaauuagacauggcuaaccuaaacaugacaaugccuuuaucauguacaaaaaauucaucacaucacuacauaaugguaggaaaugaaacaggucuagaacucacuuuaaccaauaccucaauaauaaaccauaaauucuguaaucucucagacgcacauaaaaaaaaccuauaugaccaugcacuaaugucaauaauaucaacauuccaccuaucaauaccaaacuucaaccaauacgaagcaaugucaugcgacuucaaugguggaaaaaucuccguacaauacaauuuaucacaugcauacgcaguugaugcagcaaaccauugcggaaccauagccaacgguguacuacaaacuuucaugagaauggcauggggaggaucauacauugcacuagauucaggaaaaggaaauugggacugcauaaugaccucauaucaauaucuaauaauucaaaacacaaccugggaagaucacugucaauuuuccagacccucuccuauaggcuacuuaggcuuacucucacaaagaaccagagacauauauaucucaagacgccuacuaggcacuuucacauggacauuaucagauucagaaggcaaugaagcaccaggagguuacugcuuaacaagauggauguuaauagaagcagaacuaaaaugcuuuggaaacaccgcaauagcuaaaugcaaugaaaaacacgacgaagaauucugugacauguuaagauuauucgacuucaauaaacaagcaauacguagacuaaaaacugaagcacaaaugucaauacaacucauaaauaaagcaguuaacgcauuaauaaacgaccaacucauaaugaaaaaucaccuuagagauauaaugggaauaccauauugcaacuauuccaaauacugguaucuuaaucacacagucacagguaaaacaagucuacccagaugcuggcuuauaucaaacggaucauaccuaaacgaaacacauuuuucagaugauauagaacaacaagcagacaacaugaucacagaacuacuacaaaaagaauacauggaccgacaaggaaaaaccccacucggacuagucgacuuauuuguauuuucaacaucauuuuauuuaauaucaauauuuuuacauuuaguaaaaaucccaacacauagacacaucguaggaaaaccaugcccaaaaccccaccgauuaaaccacauggguauaugcucauguggucuauauaaacacccaggaguaccuguaaaauggaaaagauaa

SEQ ID NO: 1861 - RNA, 1473 nt, Artificial Sequence
  derived and/or modified protein sequence (opt6) from LASV(Lassa virus/H.sapiens-wt/NGA/2016/ISTH_0779;Clade II)__AVO03655__GPC
augggacaaauaauaacuuuuuuccaagaaguaccacaugucgucgaagaagucaugaaugucguucuuaucgcauuaucauuacucgcaaucuuaaaaggcaucuacaacauagcaacaugcggccuauuuggacuaaucucauuccuuuuauuaugugguagaucauguucaaccacauacaaaggaguauacgaacuacaaacacucgaauuagacauggccaaccuuaacaugaccaugccauuaucuugcacaaaaaacaacucacaucacuacauaaugguaggaaaugaaaccggcuuagaacuaacuuuaacaaacacuucaaucauaaaccacaaauuuugcaauuuauccgacgcacauaaaaaaaauuuauacgaccacacauuaaugucaauaaucucaaccuuccacuuaucaauaccaaacuuuaaucaauacgaagcaaugucuugcgacuucaacggagguaaaauaucaguacaauauaaccuaucccacggauacgcuguagaugcagcaaaccauuguggaacaauagcaaacggaguccuccaaacauucaugcgaauggcauggggaggaucauauauagcacucgauucuggaaaaggaaacugggauugcauaaugacaucauaccaauaccuaguaauacaaaacaccacaugggaagaucauugucaauucucaagaccauccccaauaggauaccuaggauuacuaucccaaagaacaagagacauauauauaucuagaagacuacuaggaacauucacauggacauuaucagacucagaagguaacgaugcaccaggaggauacugucuaacaagauggaugcuuauugaagcagaacuaaaauguuucggaaacacagccauagcaaaaugcaaugaaaaacacgaugaagaauucugcgacauguuaagacuauuugauuucaacagacaagcaauaaaaagacuaaaaacagaagcccaaaugucaauacaacuaauaaacaaagcaguaaacgccuuaauaaacgaccaauuaaucaugaaaaaccaccucagagacauaaugggcauaccauacugcaauuacucaaaauauugguaccuuaauaauaccguaaccggaaaaucuucacuaccaaaaugcuggcuaguaagcaaugguucauauuuaaaugaaacucacuucucagacgacauagaacaacaagccgauaauaugauaacagaaaugcuacaaaaagaauacauagaucgacaaggaaaaacaccacuaggauuaguagacuuauucguauucuccacaucauucuaccuaauaucaauauuccuacaccuaguaagaauaccuacacaccgacauauaacaggaaaaccaugcccaaaaccacauagacuaaaccacaugggcaucuguuccugcggacucuacaaacaaccaggaguaccagucaaauggaaaagauaa

SEQ ID NO: 1862 - RNA, 1473 nt, Artificial Sequence
  derived and/or modified protein sequence (opt6) from LASV(Lassa virus/H.sapiens-wt/NGA/2016/ISTH_0917;Clade II)__AVO03535__GPC
augggacaaauaguaacuuucuuccaagaaguaccacacgucauagaagaaauaaugaauauaguacuaauaacauuaucccuucuagcaauacuaaaagguguauacaacuuagcaacuugcggacuuauaggccuaauaacuuuccuauuucuauguggaagaucauguucaaugacguacaaaggaaauuaccaacuagaaacucuagaacuaaauauggaaaugcuaaauaugacaaugcccuuauccuguaccaaaaacaacucacaccauuacauaagagucggcaacgaaacaggauuagaacuaacauuaacaaacacaucaaucauucaacacaaauuuugcaacuuaucugacgcccacaaaagaaauuuauacgaccacucccucaugucaauaguaagcacauuucaucuuucaauaccaaauuucaaccaauacgaagcaaugucaugcgacuuuaacggaggcaaaauaucaauacaauauaaccuuucacacacauacgcaggagaugcagcuaaacacugcggaacccuagccaauggaauacuacaaacauucaugagaauggcauggggaggcucauacauagcauuagauuccgguagaggcggaugggacuguauaaugacaaacuaucaauaucuaauaauacaaaauguaaccugggaagaccacugccaauuuucaagacccucaccaauaggauaccucggacuacuaagccaaagaacaagagaaguauauauaucuagaaggcuauuaggcacuuuuacauggacauuaucagacucagaaggaaacgaagcaccaggaggauacugcuuaacaagauggaugcuaauagaggcugaacucaaaugcuuuggaaacacagcaguagcaaaauguaacgaaaaacaugaugaagaauuuugcgacaugcuaagacuauucgacuucaacaaacaagccauacgcagauuaaaagcagaaacccaaaugucaauacaauuaauaaauaaagcaguaaacgcacucaucaacgaccaacuaauaaugaaaaaucaccuaagagacaucauggguauacccuacugcaacuacucaaaauauugguaucuaaaucacacaauaacaggaagaacaucacuaccacgaugcugguuaguaucaaacgguucauacuuaaacgaaacacauuucagcgacgacauagaacaacaagcagacaauaugauaacagaaaugcuccaaaaagaauauaucgacagacaaggaaaaacaccacucggauuagucgaccuguucguauuuucaacauccuucuaucuaauuucaauauuccuucaucuagucaaaauaccaacacaccgucacauaguaggaaaaagcugcccaaaaccucaucgccuaaaucacaugggcauaugcagcugcggauuauacaaacgcccaggaguauccguaagauggaaaagauaa

SEQ ID NO: 1863 - RNA, 1473 nt, Artificial Sequence
  derived and/or modified protein sequence (opt6) from LASV(Lassa virus/H.sapiens-wt/NGA/2016/ISTH_1006;Clade II)__AVO03643__GPC
augggucagauaauaacauucuuccaagaaguaccacaugucauagaagaagucaugaauaucguacucauugcauuaucccuccuagccauacuaaaaggaauauacaacguagcaacauguggacucuucggacuaguggccuuucuucuacuuugcggaagauccugcucaacaacauacaaaggaguauacgaacuacaaacauuagaauuagacauggcuucauuaaacaugacuaugccauuaucaugcaccaaaaacaacucucaccacuauauaaugguuggaaaugaaacaggacuagaacuaacccuaacaaacacauccaucaucaaccauaaauuuuguaaucucucugacgcucauaaaaaaaaccuguaugaccacgcuuuaaugucuauaaucuccaccuuucaucuaucuauaccaaacuucaaucaauacgaagccaugggaugcgacuucaacggaggaaaaauauccguccaauauaauuuaucucacucauaugcaguggacgcugcaaaccacuguggaaccauagcaaauggaguauuacaaacauucaugagaauggcuuggggaggcucauacauagcccucgacucaggaaaaggauccugggauugcaucaugacaucuuaccaauauuuaauuauacaaaacacaacaugggaagaccauugccaauuuucaagaccaagcccaauaggauacuuaggacuauuaucacaaagaacaagagacauuuacaucucaagacguuuacuaggaacuuucaccuggacauuaucagauucagaaggaaacgaaacaccaggaggauacugcuuaacaagauggauguuaauagaagcagaacuaaaauguuuugguaacacugcugucgcaaaaugcaaugaaaaacacgacgaagaauucugugacaugcuuagauuauuugacuucaauaaacaagcaauaaggagacuaaaaaccgaagcucaaaugucaauacaacuaauuaacaaagcaguaaacgcauuaauaaacgaccaauuaauaaugaaaaaccauuuacgagacauaaugggaauaccauacugcaauuauuccaaauauugguaccuaaaccauacaguaaccggacgaacaucacuaccuagaugcuggcuagucucaaauggcuccuaccuuaacgaaacacacuucagcgacgauauagaacaacaagcugacaauaugauuacagaacuauuacaaaaagaauauauggaucgacaaggaaaaacaccucuaggacuagucgaccuauuuguauucucaacauccuucuacuuaauuucaaucuuuuuacacuuaauaaaaauaccaacacauagacacguaauaggaaaacccugcccaaaaccacauagauuaaaucauaugggcauaugcaguugcggauuauacaaacaccccggagucccaguaaaauggaaaagauaa

SEQ ID NO: 1864 - RNA, 1473 nt, Artificial Sequence
  derived and/or modified protein sequence (opt6) from LASV(Lassa virus/H.sapiens-wt/NGA/2016/ISTH_1026;Clade II)__AVO03589__GPC
augggacaaauaaucacauucuuccaagaaguaccucauguaauagaagaaguaaugaacaucguauuaauagcacucucacucuuagcaauauuaaaaggcauauacaacgucgcaacaugcggacuuuuuggccuaguaucauuuuuacuacuauguggucgaucaugcucuacaacauacaaagguguauacgaacuucaaacacuagaauuagacauggcuucacuaaacaugacaaugccccuaucauguacaaaaaacaacagucaccauuauauaaugguaggaaacgaaacaggacuagaacuaacauuaacaaauaccucaaucauaaaucacaaauuuugcaacuuauccgacgcucacaaaaaaaacuuauacgaccacgcauuaaugucaauaauauccacauuccacuuaucaaucccaaacuucaaccaauacgaagccaugucaugugacuucaauggaggcaaaauauccguacaauacaacuuaucacacgcauacgcaauagaugcagcaucccauugcggaacaauagcaaacggaguacuacaaacauuuaugcgcauggcaugggguggaucauauaucgcauuagauucaggaaaaggaucaugggauugcauaaugacaagcuaucaauaccuaaucauacaaaacacuacaugggaagaucauugccaauucucccgaccaucaccaauaggauaucuaggauuacucucucaaagaacaagagacaucuauauuucucgcagacuauuaggaacauucacauggacucucagcgacucagaaggcaacgaaacaccaggcggauauugcuuaacccgauggauguuaauagaagcagaacuaaaaugcuucggaaacaccgcaguagcaaaauguaacgaaaaacacgacgaagaauucugugacauguuaagauuauucgacuuuaacaaacaagccauaagaagacuaaaaacagaagcacaaaugucaauacaacucauaaacaaagcaguuaacgcacuuauaaacgaccaauuaauaaugaaaaaccacuuaagagauauaaugggaauaccauauugcaauuacagcaaauacugguaccuaaaucacaccguuacaggaaaaacaucacuaccccgauguuggcuaguaucaaauggaaguuaccuaaacgaaacacacuuuucagacgauauagaacaacaagcagauaauaugauuacagaacuucuccaaaaagaauaucuagacagacaaggaaaaacaccacuaggacuagucgaucuauucguauuuucaaccuccuucuaccuaauaucaauauuccuccaccuaguaaaaauaccaacacaucgacacgucauaggucgacccugcccuaaaccacacagacuaaaccacaugggaauaugcucaugcggcuuauauaaacacccaggaguaccagucaaauggaaaagauaa

SEQ ID NO: 1865 - RNA, 1473 nt, Artificial Sequence
  derived and/or modified protein sequence (opt6) from LASV(Lassa virus/H.sapiens-wt/NGA/2016/ISTH_1070;Clade II)__AVO03651__GPC
augggucaaauaauaaccuucuuccaagaaguaccacacgucauagaagaaguuaugaacauaguacuaauagcuuuaucucuacuagccauacuaaaaggaauauauaacguagcaacaugcggacuauucggucuagucucauuccuacuauuaugcggcagaucaugcucuacaacauauaaaggcguauacgaacuccaaacauuagaauuagacauggccucauuaaauaugacaaugccccuauccuguaccaaaaacaacucacaccacuauauaaugguagguaacgaaaccggacuagaacuaacccuaacaaauacaucaauaauaaaccacaaauucugcaauuuaucugacgcacacaaaaaaaacuuauaugaucaugcacuaaugucaauaauaucaacauuccacuuaucuauacccaacuucaaucaauacgaagcaaugucaugcgacuucaacggaggaaaaauuuccguacaauauaaucucagccacaccuucgccguagacgcagcaaaccacugcggaaccauugcaaacggaguacuacaaacauucaugagaauggccuggggaggauccuacauagcccuagacucuggaaaaggaagcugggacugcauaaugacaucauaucaauacuuaaucauacaaaacacaacaugggaagaucacugucaauuuagcagaccaucaccaauaggauaccuaggccuacuaucccaaagaacaagagauauauacauuucuagaagacuacuagguacauucaccuggacacucucagacuccgaaggaaacgaaacaccuggagguuacuguuuaacaagauggaugcuuauagaagccgaacuuaaauguuuuggaaauacagcagucgcaaaauguaaugaaaaacaugacgaagaauucugugacaugcuaagacucuucgauuucaauaaacaagcaauaagaagauuaaaaacugaagcucaaaugaguauacaacuaauaaacaaagccguaaacgcauuaauaaaugaccaauuaauaaugaaaaaccacuuacgagauauaaugggcaucccauacuguaauuacuccaaauacugguaucuaaaccauacagucacuggaaaaaccucauuaccaagauguuggcuagucucaaacggcucauaccuaaaugaaacacauuuuuccgacgacauagaacagcaagcagacaacaugauaacagaacuacuacaaaaagaauauauggaccgacaaggaaaaacaccacugggauuaguagaccuauucguauuuuccacaucauucuauuuaauauccauauucuuacaucuaguaaaaauacccacacacagacauauaauuggaaaaccaugcccuaaaccacacagacuaaaucacaugggaauauguucaugcggcuuauacaaacaucccggaguaccaguaaaauggaaaagauaa

SEQ ID NO: 1866 - RNA, 1473 nt, Artificial Sequence
  derived and/or modified protein sequence (opt6) from LASV(Lassa virus/H.sapiens-wt/NGA/2016/ISTH_1123;Clade II)__AVO03645__GPC
augggacaaauaaucacuuucuuucaagaaguaccacacguaauagaagaaguaaugaauauaguacuaauagcccuaagucuuuuagccaucuuaaaaggcauauacaauguagcaacauguggacuauuuggacuaguaagcuuuuuauuacucugcggacgcucaugcucuacaaccuauaaaggagucuacgaacuacaaacccuagaauuagacaugggaucacuaaauaugacaaugcccuuaucuuguacaaaaaacaacagucaccacuauauaauggucggaaacgaaaccggauuagaacuaacacuaacaaacacaucaauaauaaaccacaaauucugcaacuuaucagacgcacauaaaaaaaaccuauaugaccacgcuuuaaugucaaucauauccacuuuucacuuaucaauuccaaacuucaaccaauacgaagcaaugucaugugacuucaauggaggcaaaauaucaguacaauauaaucuaucacacgcauacgcaguagacgccgcaaaccacugcggaacaauagcaaacggaguacuacaaacauuuaugagaauggcauggggaggauccuauaucgcacuagacucuggaaaaggauccugggauugcauaaugacaucuuaucaauacuuaauaauacaaaacacguccugggaagaccacugucaauuuucaagaccaucaccaauuggauaucuuggauuacuaucacaaagaacucgagacauauauauaucaagaagacuauuagguacuuucacauggacacuaagcgacucugaaggcaaugaaacaccaggagguuacugucucacacgauggauguuaauugaagcagaauuaaaauguuucggaaacacagccguugcaaaaugcaaugaaaaacaugacgaagaauucugcgacaugcuacgauuauucgacuucaacaaacaagcaauacgaagauuaaaaaccgaagcacaaauguccauacaacucauaaauaaagccguaaacgcacuaauaaacgaccaacuaaucaugaaaaaccaucuuagagacauaaugggaauaccauacuguaacuacucuaaauacugguacuuaaaccauacagucaccggaaaaacaucacuacccagaugcuggcuaguuuccaauggaucuuaccuaaaugaaacacacuuuuccgaugacauagaacaacaagcagauaacaugauaacagaacuauuacaaaaagaauacauagacagacaaggaaaaacaccacuaggcuuaguagauuuauuuguauucucaacuuccuucuaucuaauauccauauuccuacaucuagucaaaauaccaacccacagacacguuauaggaaaaccaugcccaaaaccacaccgauuaaaucacaugggaaucugcucaugcggauuauauaaacacccaggaguccccguuaaauggaaacgauaa

SEQ ID NO: 1867 - RNA, 1473 nt, Artificial Sequence
  derived and/or modified protein sequence (opt6) from LASV(Lassa virus/H.sapiens-wt/NGA/2016/ISTH_1150;Clade II)__AVO03627__GPC
augggacaaguuauaaccuucuuucaagaaauaccccacguaauagaagaaguaaugaauauagucuuaaucacacuaucacuauuagcaauacuaaaaggaauauauaacguagcuacaugcggacuauucggacuaauuagcuuucuauuauuauguggacgaucauguuccacaacauacaaaggcguauacgaacuacaaacauuagaauuagacauggcaaauuuaaauaugacaaugccacuaucaugcacaaaaaacuccucacaccacuacaucaugguaggaaacgaaacaggacucgaauuaacccuaacaaacacuucaaucauuaaucacaaauucugcaaccuaucagacgcacacaaaaaaaaccuauacgaucacgcucuaauguccauaaucuccacuuuucaccuaucaauacccaacuucaaccaauacgaagcaaugucaugcgacuuuaacggaggcaaaaucuccguacaauacaaucuaucacaugcauacgcagucgaugccgcaaaccauugcggaacaauagcuaauggaguucuacaaacauucaugagaauggcaugggguggcucauacauagcacuagauagcggcaaaggaaacugggauugcauaaugacaucauaccaauacuuaauuauacaaaacacaacaugggaagaccacugccaauucucccgcccaucaccaauagguuaccucggauuacucucacaacgcacacgagauauauacauaucaagacgacuucuaggaaccuucacauggacauuauccgauucagaagguaacgaagcaccaggcggauacugcuuaaccagauggauguuaauugaagcagaauuaaaaugcuucggaaacaccgcaauagcaaaaugcaacgaaaaacacgacgaagaauucugcgacauguuaagacuauucgauuuuaacaaacaagccauaagaagacuaaaaacagaagcucaaaaauccauccaacuaauuaacaaagcaguaaaugcuuuaauaaacgaccaauuaauuaugaaaaaccacuuacgugacauuaugggaauuccauauuguaauuacucaaaauauugguacuuaaaccacacaguaacaggaaaaacauccuuaccaaaauguuggcuuauuucaaacggaucauaccuaaacgaaacccacuucucagacgauaucgaacaacaagccgacaacaugauaacagaacuauuacaaaaagaauauauggacagacaaggaaaaacaccacucggccuuguagaccuauuuguauucucaacaagcuuuuaccuaauaucaauauuccuacaccuugucaaaaucccaacacacagacacauaguaggacgacccuguccaaaaccacacagauuaaaccacaugggaauauguucaugcggauuauauaaacacccagguguucccguaaaauggaaaagauaa

SEQ ID NO: 1868 - RNA, 1473 nt, Artificial Sequence
  derived and/or modified protein sequence (opt6) from LASV(Lassa virus/H.sapiens-wt/NGA/2016/ISTH_1174;Clade II)__AVO03555__GPC
augggacaaauaauaacauucuuccaagaaguaccacauguaauagaagaaguaaugaauaucguacuaaucgcacucucacuauuagcaauauuaaaaggaauauacaacguugccacaugcggauucuucggauuagucucauuucuacuacucugcggcagauccugcuccacaauauacaaaggaguauaugaauuacaaacacuagaacuagacauggccucucuaaacaugacaaugccacuaucuuguacuaaaaauaauucccaccacuacauaauggucggcaaugaaaccggacuagaauuaacauuaaccaacacauccauaauuaaucacaaauucugcaaccuauccgacgcacacaaaaaaaacuuauaugaccacgcauuaaugucaauaauaagcacauuccaccuaucaauaccacauuuuaaucaauaugaagcaaugucaugcgauuucaacggaggaaaaauauccguacaauacaaccuaucucauacauacgccgucgacgcagcuaaccauuguggaaccauagcaaacggaguuuuacaaaccuuuaugagaauggccuggggcggauccuacauagcucuugacucaggcaaaggaucaugggacuguaucaugacaucauaccaauaucuaauaauacaaaacaccacaugggaagaccacugucaauucucucgaccauccccaauaggauaccuaggacuacucucacaaagaacaagagacauauauauaucucguagauuacuaggaacauuuaccuggacccuauccgacucagaaggaaacgaaacaccaggaggauacugucuaacaagauggauguuaauagaagccgaauuaaaaugcuucgguaauacagcagucgcuaaaugcaacgaaaaacacgaugaagaauucugugauaugcuucgucucuucgacuuuaauaaacaagcuauacgcaaauuaaaaaccgaagcacaaaugucaauacaacucauaaacaaagcaguaaacgcacuaauuaacgaccaauuaauuaugaaaaaccaucuaagagacauaaugggaauccccuacugcaauuacucaaaauacugguaccuaaaccacacaguaacagguaaaaccucccuaccaagauguugguuaguauccaacggauccuaccuaaaugaaacacacuucucugacgauaucgaacaacaagcugauaacaugauuacagaacuauuacaaaaagaauacauggacagacaaggaaaaaccccacucggauuagucgaucucuucguauucucuacuucuuucuaccuaauuuccauauuccuacaucuaguuaaaauaccaacacauagacacguaauaggcaaaccuuguccaaaaccacaccgacuaaaccacaugggaauaugcucaugcggccuauacaaacaccccggaguaccugucaaauggaaaagauaa

SEQ ID NO: 1869 - RNA, 1473 nt, Artificial Sequence
  derived and/or modified protein sequence (opt6) from LASV(Lassa virus/H.sapiens-wt/NGA/2016/ISTH_1207;Clade II)__AVO03599__GPC
augggacaaauuauaacuuucuuccaagaaguaccacacguaaucgaagaaguaaugaacauaguacuaauagcacuaucacuucuagccaucuuaaaaggaauauacaauguugcaacuugcggccucuucggucuagucuccuucuuauuacuaugcggcagaucuugcucaacaaccuacaaaggcgucuaugaauuacaaacauuagaacuagacaugacaucacucaacaugaccaugccacuaucaugcacaaaaaacaauucacaccacuauauaaugguaggaaacgaaaccggucucgaauuaacauuaacuaauacuucaaucauaaaucauaaauucugcaauuuaucugacgcccacaaaaaaaaccuauaugaccaugcacucaugucaauaauaucuaccuuccaucucucuauaccgaacuuuaaccaauaugaagcaaugucaugcgauuucaauggaggcaaaaucucaguccaauacaauuuaucccacaccuaugcaguagaugcagccaaucauugcggaacaaucgccaacgguguauuacaaaccuucaugcgaauggcauggggaggaucauacauugcacuagacucuggaaaaggauccugggauugcauaaugaccucauaucaauaucuaauaauacaaaacacaacaugggaagaccacugucaauucuccagaccaucaccaauaggcuaccuaggauuauuaucacaaagaacaagagacauauacauaucacgaagacuacucggaacauuuacauggacucucucagauucagaagguaacgauacaccaggcggauacugucucacacgauggauguuaauagaagcagaacuaaaaugcuucggaaacacagcaguagcaaaaugcaacgaaaaacaugacgaagaauuuugcgacaugcuacgauuauucgauuuuaacaaacaagcaauaagacgauuaaaaacagaagcacaaaugucaauacaacuaauaaacaaagccguaaacgcauuaauaaacgaucaacuaauaaugaaaaaccauuuaagagacauaauggguauaccauacuguaauuauuccaaauacugguaccuaaaucacaccgucacaggaaaaaccucauuaccucgaugcugguuaguuucaaacggcuccuaccucaacgaaacucacuucucagaugacauagaacaacaagcagacaauaugauaaccgaacuauuacaaaaagaauauauagaucgacaaggaaaaacuccgcuuggacuaguagauuuauucguauucucaacauccuuuuacuuaauaagcauauucuuacacuuaguaaaaauaccuacccauagacauguaauaggaaaacccuguccaaaaccccaccgacuaaaccauaugggaauauguucaugcggacuauacaaacacccaggaguacccgucaaauggaaaagauaa

SEQ ID NO: 1870 - RNA, 1473 nt, Artificial Sequence
  derived and/or modified protein sequence (opt6) from LASV(Lassa virus/H.sapiens-wt/NGA/2016/ISTH_1306;Clade II)__AVO03623__GPC
augggacaaauaauaacuuucuuccaagaaguaccacacguaauagaagaaguaaugaacaucguucuaauagcccucagucuacuagcaauauuaaaaggcauauauaauguagcaacauguggauuauucggacuugucucauuuuuacuacucugcggaagaucuugcucuacaacauacaaaggaguuuacgaacuucaaacccucgaauuagacauggcaucccuaaacaugacaaugccauuauccugcacaaaaaauaauucccaccauuacauaaugguaggaaaugaaaccggacuagaauuaacauuaacaaacaccucaauaauaaaucauaaauucugcaaccuaucagacgcacacaaaaaaaaccuauacgaccacgcacuaaugucgauaauaucaacauuucaccuaucaaucccaaacuucaaccaauacgaagcaaugucaugugacuuuaacggaggcaaaauaucaguacaauauaacuuaucucacacauacgcaguagaugcagcuaaccacugcgguacuguagcaaauggaguacuacaaacguuuaugcgaauggcuuggggaggaucauacauugcauuagauucagguaaaggaucaugggauugcauuaugacuuccuaucaauacuuaauaauacaaaauaccacaugggaagaccacugccaauucuccagaccaucaccaauagguuacuuaggucuacucucacaaagaacaagagacaucuacauaucccgacgauuacuaggcacuuucacuuggacucuaucagauagugaaggcaaugaaacaccaggaggauacugucuuacacgauggaugcuaauagaagcagaacuaaaaugcuucggaaacaccgcaguagccaaaugcaacgaaaaacaugaugaagaauucugugauaugcuaagacuauuugauuuuaauaaacaagccauaagaagauuaaaaacugaagcccaaaugucaauacaacuaauuaacaaagcaguaaacgcauuaauuaacgaccaacuaauaaugaaaaaccauuuaagagacauaaugggaauuccauauuguaauuacucuaaauacugguacuuaaaccacacaguaacaggaagaacaucacuaccacgaugcugguuaguaucaaaugguucauaccuaaacgaaacacauuuuucagacgacauagaacaacaagcagacaauaugauaacugaacuauuacaaaaagaauacauagaucgacaaggaaaaacaccccuaggucuaguagaccuauuuguauucuccacuucauuuuaucuaauaucuaucuucuuacaccuagucaaaauaccaacucacagacacgucaucggaaaaccaugcccaaaaccacacaggcuaaaccacaugggcaucugcucauguggccuuuacaaacacccaggaguaccaguaaaauggaaacgauaa

SEQ ID NO: 1871 - RNA, 1473 nt, Artificial Sequence
  derived and/or modified protein sequence (opt6) from LASV(Lassa virus/H.sapiens-wt/NGA/2016/ISTH_1311;Clade II)__AVO03575__GPC
augggacaaauaguaaccuuuuuccaagaaguaccacacguuauugaagaaguaaugaacauaguccuuauagcacuaagucuacuagccauacuaaaaggcauauacaacguugcaacaugcgguuuauucggacuaauaucauucuuacuacucuguggacgauccugcucaacaacauacaaaggcguauacgaacuacaaacacuagaacucgauauggcaaaucucaacaugacaaugccauuaucuugcacaaaaaauaacucacaccacuacauaauggucggaaacgaaacagguuuagaacuaacacuaacaaacaccucaaucauaaaucacaaauuuuguaacuuaucagacgcucacaaaaaaaaccuauacgaccaugcccucaugucaauaauuuccacauuccaccuaucaauaccaaauuucaaccaauaugaagcaaugucaugugacuucaacggaggaaaaauaucaguacaauacaaccuuucacacgcauacgcaggcgacgcagcuucacacugcggcacaauagccaacggaguacuccaaacauuuaugagaauggcauggggaggaucuuauauugccuuagauucaggaaaaggcaacugggauugcaucaugacaucuuaccaauaucuaauaauacaaaacaccacaugggaagaccacugccaauucucacgacccagcccaaucggauacuuaggccuauugucacaaagaacacgagacaucuacauaucaaggagauuacuuggaaccuucacauggacacuaucagacucagaaggcaacgacgccccaggaggauacugucuaacaagauggaugcuuauagaagcagaacuaaaauguuucggaaacacagcaauagcaaaauguaacgaaaaacacgacgaagaauucugcgacauguuaagauuauuugauuucaacaaacaagcaauaaaaagacuaaaaacagaagcccaaaugucaauacaauuaauaaacaaagcuguaaacgccuuaauaaacgaccaauuaauaaugaaaaaccaucuaagagacaucaugggaauacccuacugcaacuauucaaaauacugguacuuaaaccacaccacaacaggaaaaacaucauuaccaaaauguuggcuaauaucaaacggauccuaucuuaaugaaacacacuucucagacgacauugagcaacaagccgacaacaugauaaccgaacuacuccaaaaagaauacuuagauagacaaggaaaaacaccacucggacuaguagaucucuucguauuuucuacaucauucuaucuaaucucuauauuccuacaccuaauaaaaauaccaacacacagacacauuguaggaagaccaugcccaaaaccucacagacuaaaccacaugggaauaugcucaugcggacuauauaaacacccuggaguaccaguaaaauggaaacgauaa

SEQ ID NO: 1872 - RNA, 1473 nt, Artificial Sequence
  derived and/or modified protein sequence (opt6) from LASV(Lassa virus/H.sapiens-wt/NGA/2016/ISTH_1423;Clade II)__AVO03577__GPC
augggccaaaucguaacauucuuccaagaaguuccacacgucauagaagaagucaugaacauugucuuaauugccuuauccuuauuagcaauacuaaaaggcauauacaacguugccacauguggacuauucggauuagucucauucuuacuauuaugugguagaucaugcucaacaacauauaaaggaguauacgaacuacaaacacuagaacucgauauggcaaacuuaaacaugacuaugccccuaucuugcacuaaaaacaacucacaccacuauauaaugguaggaaacgaaacaggacuugaauuaacauuaacaaacacuucaaucauaaaccacaaauuuugcaaccuuucugacgcucacaagaaaaacuuauacgaccaugcauuaaugucuauaauaucaacauuccaucuauccaucccaaacuucaaccaauaugaagcaauguccugugacuuuaacggcggaaaaaucagcguccaauauaaccuaucacacucauaugcagucgacgcagcaaaccacuguggcaccguagcaaauggaguccuccaaacauucaugcgaauggcauggggaggcucauacauagcauuagacuccggaaaaggaucaugggauuguauuaugacaucauaccaauaccuaauaauacaaaauauuacaugggaagaccacugucaauucucaagacccucaccaauaggcuacuuaggauuauuaucacaaagaacaagagacauauacauaucuagacgacuacuaggcacauuuacauggacauuaucagacucugaaggaaaagaaacaccaggagguuacugccuaaccagauggauguuaauagaagcagaacuuaaaugcuucggaaacacagcaguugcuaaaugcaacgaaaaacaugacgaagaauuuugugacaugcuaagacuauucgacuucaacaaacaagcaauccgaagacuaaaaacagaagcacaaaugucaauacaacucauaaauaaagcuguaaacgcacuaauaaacgaccaacucauaaugaaaaaccaccuaagagauauaaugggaauaccauacugcaacuacucaaaauauugguaucuaaaccacacagucaccggaaaaacaucucuuccaagaugcuggcuuguaucaaacggauccuacuuaaacgaaacccauuucucagacgacauagaacaacaagcagacaauaugaucacagaauuacuccaaaaagaauacauagacagacaaggaaaaacacccuuaggccuaguagaccuauucgucuuuuccacaucuuucuacuuaauaucaauauuccuacacuuagucaaaauacccacacaucgccacauacuaggaaaaccaugcccaaaaccacauagauuaaaucacaugggaauaugcucauguggauuauauaaacauccaggcguuccuguaaaauggaaaagauaa

SEQ ID NO: 1873 - RNA, 1473 nt, Artificial Sequence
  derived and/or modified protein sequence (opt6) from LASV(Lassa virus/H.sapiens-wt/NGA/2016/ISTH_1462;Clade II)__AVO03587__GPC
augggucaaauaaucaccuuuuuccaagaaguaccccaugucauagaagaaguaaugaacauaguacuaauagcacuaucauuacuagcuauacuaaaaggaauauacaacguagccacauguggauuauucggucuaguaucauuuuuauuacuaugcggaagaucaugcucaacaacuuauaaaggagucuaugaacuccaaacauuagaacucgacauggcaaguuuaaauaugaccaugccacuaucauguaccaaaaauaauucacaccauuacaucaugguaggaaacgaaacaggacuagaacuaacacuaacaaacacaucaauaauaaaucacaaauucuguaacuuaucugaugcacacaagaaaaaucucuacgaccaugcacuaauguccaucauauccacauuucaccuauccauaccaaacuuuaaucaauaugaagcaauguccugcgauuucaacggaggaaaaauauccguacaauacaacuugucacacacauacgcugucgaugcagcaaaucacugcgguacaauugcaaacggaguacuacaaacauucaugagaauggcauggggcggaucauacauagcauuagauuccggaaaaggauccugggauugcaucaugacauccuaucaauaccucauaauacaaaacacaacaugggaagaccacugccaauucucacgcccaucccccaucggguaccuaggccuucuaucucaaagaacaagagacauuuacauaucaaggagacucuuaggaaccuucacauggacacuaucagacagcgaaggcaacgaaacuccuggaggauauugccuaacacgauggaugcuaauugaagccgaacuaaaauguuucggaaauaccgcagucgcaaaauguaaugaaaaacacgaugaagaauuuugcgauaugcuacgacuauucgacuucaacaaacaagccauaagaagacuaaaaacagaagcacaaaugucuauacaauuaauaaacaaagcuguaaacgcccuaauaaaugaccaacuaauaaugaaaaaucaucuaagagacaucaugggaauaccauacugcaauuauucuaaauacugguaccuaaaccacacaguaacuggaagaacaucacuaccaagaugcuggcuugucucaaacggaucauacuuaaaugaaacacauuucucagacgacauugaacaacaagcagauaacaugauaacagaacuauuacaaaaagaauacaucgaacgacaaggaaaaacaccuuuaggccuaguagacuuauucguauucucaacaucauuuuacuuaaucuccauauuuuuacauuuaauaaaaauccccacccacagacacguaauaggaaaaccuugcccaaaaccacacagacuaaaccacaugggaauaugcucaugcggacuauacaaacaccccgguguccccguaaaauggaaacgauaa

SEQ ID NO: 1874 - RNA, 1473 nt, Artificial Sequence
  derived and/or modified protein sequence (opt6) from LASV(Lassa virus/H.sapiens-wt/NGA/2016/ISTH_1472;Clade II)__AVO03605__GPC
augggacaaauaauaaccuucuuucaagaagucccccacguaauagaagaaguaaugaauaucguccuaauagcauuauccuuacuagcaauccucaaaggaauauacaacguagccaccugcggauuauuuggccuaguaucuuuucucuuauuaugcggaagaucaugcucaacuacauacaaaggagucuacgaacuacaaacacuagaauuagacauggccucauuaaacaugacaaugccacuuucuugcaccaaaaacaacucccaucauuacauaauggucggcaaugaaacaggacuagaacuuacacuaacaaauacaucaauaaucaaucauaaauucuguaauuuaucagacgcucacaaaaaaaacuuauacgaccaugcauuaaugucaauaaucucaacauuucacuuaucuauuccaaacuucaaucaauacgaagcaaugucuugcgacuucaacgguggaaaaaucaguguucaauacaacuuaucccacaccuacgcaguagaugccgccaaucacugcggcacuaucgccaacggaguacuacaaacauucaugagaauggcaugggguggaucauacauugcauuagauucuggaaaaggaucaugggacugcaucaugacauccuaccaauaccuaauaauacaaaacacaacaugggaagaccacugccaauuuucaagaccuaguccaauaggcuaccuaggccuacuaagccaacguacuagagauaucuacauaucaagacgacuauuaggaacauuuaccuggacauuauccgacucagaaggaaacgaaacaccaggcggauacugccuaacuagauggaugcucauagaagcagaacuaaaaugcuucggaaauacagcaguagccaaaugcaacgaaaaacacgaugaagaauucugugacaugcucagacuauucgacuucaauaaacaagcuauuagaagauuaaaaacugaagcccaaaugagcauacaauuaauaaauaaagcaguaaaugcccuaaucaacgaccaacuaauaaugaaaaaucauuuaagagauauaaugggaauccccuacugcaauuacucaaaauacugguauuuaaaccauacaguaaccggcagaacaucauuaccacgaugcuggcuaguuuccaaugguagcuaucuaaacgaaacacacuucucagacgauauagaacaacaagcagacaauaugauaacugaauuauuacaaaaagaauacauagacagacaaggaaaaacaccauuaggccuaguagacuuauucguauucucuacaucauucuaccuaaucucaaucuuuuuacauuuaauaaaaauaccaacacaccgacacgucaucggaaaaccaugcccaaaaccacaccgacucaaccacaugggaauaugcucaugcggacucuacaaacaccccggaguaccaguaaaauggaaaagauaa

SEQ ID NO: 1875 - RNA, 1473 nt, Artificial Sequence
  derived and/or modified protein sequence (opt6) from LASV(Lassa virus/H.sapiens-wt/NGA/2016/ISTH_1474;Clade II)__AVO03613__GPC
augggccaaauaauaacauuuuuccaagaaguaccccacguaauugaagaaguaaugaauauaguucuaauagccuuaucccuccuagcaauacuaaaagguauauacaacguagcaacaugcggacuauuuggauuaguuucauuccuacuacucugcggaagaucaugcucaacaacauacaaaggcguauacgaacuacaaacauuagaauuagauauggcaucauuaaacaugacaaugccacuaucaugcacaaaaaacaacucacaucauuacaucauggucggaaacgaaacaggauuagaauuaacacuaacaaacaccucaauaauucaucacaaauucuguaacuuaucagacgcacacaaaaaaaaccuauacgaucaugcuuuaaugucaaucauauccaccuuucaccuaucaauacccaauuucaaccaauaugaagcaauguccugcgacuucaauggaggaaaaaucucaguacaauacaaccuaucacacacauaugccguagacgcagcuaaccacugcggaacaauagcaaacggcguauuacaaacauucaugagaauggcauggggagguucauacaucgcacuugacuccggaaaaggaucaugggauugcauuaugacaucauaucaauaccucauaauccaaaauaccacaugggaagaccacugccaauucagcagaccaucaccaauaggauaccuaggacuuuuaucacaaagaacaagagauauauauauaucccgaagacuccuaggaacauucacauggacucuaucagacucagaaggaaaugaaacaccaggaggauauugccuaaccagauggaugcuuauagaagcagaacucaaauguuucggcaacacagcaguagcaaaaugcaacgaaaaacaugacgaagaauuuugugacauguuacgacuauuugauuuuaauaaacaagccauaagaagauuaaaaacagaagcacaaaugaguauacaacuaauaaacaaagcaguaaaugcauuaauaaacgaccaacuaauaaugaaaaaucauuuaagagauauaaugggaauacccuacugcaauuacuccaaauacugguaucucaaccacacaguaacaggcagaacaucacuuccaagaugcugguuaguaucaaacggaucauaccucaacgaaacccacuuuuccgacgacauugaacaacaagcagacaauaugauaacagaauuacuucaaaaagaauacauagaccgacaaggaaaaacuccccuaggacucguugaucuauucguauuuucuacuucauuuuaccuaauauccauauucuuacacuuaauaaaaauacccacacaucgacauguaauaggaaaaccaugcccaaaaccacacagacuaaaccacaugggcauauguucaugcggucuauauaaacauccaggaguaccaguaaaauggaaaagauaa

SEQ ID NO: 1876 - RNA, 1476 nt, Artificial Sequence
  derived and/or modified protein sequence (opt6) from LASV(Lassa virus/H.sapiens-wt/NGA/2016/ISTH_1496;Clade II)__AVO03579__GPC
augggacaaauaaucaccuuuuuccaagaaguaccacacguaaucgaagaagucaugaacauaguacuuauagcauuaucccuauuagcaauacuaaaaggaguuuacaacguagcaacaugcggacucuuuggccuagucucauucuuacuuuuauguggaagaucaugcuccacaacaaucuacaaagguguauacgaacuucaaacacuagaauuagacauggcaucauuaaauaugacaaugccauuaucauguaccaaaaacaauucacaccacuacauuaugguuggaaacgaaacaggacuagaacuuacacuuacaaacacaagcauuauuaaccauaaauuuugcaacuuauccgacgcacauaagaaaaaccuuuacgaccaugcauuaaugucaauuauaucaaccuuccaucuaaguauaccuaacuucaaccaauaugaagcaaugucaugugacuuuaacggaggaaaaauaucaguacaauacaaccuaucccacgccuaugccguagacgcagcaaaccacugcggaacaaucgcaaacgguguuuugcaaacauucaugagaauggcauggggaggaucauauauagcauuagacucuggaaaaagaucaugggauugcauaaugacaucuuaccaauacuuaauaauacaaaauaccacaugggaagaucacugucaauucaguagaccaucacccaucggauaccuuggucuacuuucacaacgaacacgcgacauauacaucucaagaagauuauuaggaacauucacauggacacuaucagacucagaaggaaacgaaacaccuggaggauacugccuaacccgauggauguuaauagaagcagaacuaaaaugcuuuggaaauacagcaguagccaaaugcaacgaaaaacacgacgaagaauuuugugacauguuaagacuauucgacuuuaacaaacaagcaauaagaagauuaaaaacagaagcacaaauguccauucaacuaauaaauaaagcugucaacgcccuaaucaacgaucaacuaauaaugaaaaaccaccuacgagacauaaugggaaucccuuauugcaauuacaguaaauauugguaccuaaaccacacaguaacagguaaaaccucucucccaagauguugguuaguaucaaauggaucauaccuaaacgaaacucacuuuagcgacgacauagaacaacaagccgacaauaugauaacagaacugcuccaaaaagaauacauagauagacaaggcaaaacaccauuaggauuaguagaucuauucgucuucucaacaucauuuuaccuaauaucaauauuccuacaccuaguaaaaauaccaacacacagacacguaaucggaaaaccauguccaaaaccucacagauuaaaucacaugggaauauguucaugcggauuauauaaacacccaggaguaccaguuaaauggaaaagauaa

SEQ ID NO: 1877 - RNA, 1473 nt, Artificial Sequence
  derived and/or modified protein sequence (opt6) from LASV(Lassa virus/H.sapiens-wt/NGA/2016/ISTH_1541;Clade II)__AVO03553__GPC
augggacaaaucguaaccuucuuucaagaaguaccacacguaauagaagaaauaaugaauauaguacuaaucacauuaucacuacuagcaguauuaaaaggaauauauaauuuugcaacaugcggacuaauaggccuaauaacauuucuauucuuaugcggaagaucaugcuccacaauauauaaaggcaauuaccaacuacaaacacuagaauuaaacauggaaacacuaaauaugacaaugcccuuaucauguaccaaaaacaauucccaccacuacauaagaguaggaaaugaaacaggacuugaacucacauuaacaaauguaucuaucauaaaccaccgcuucugcaaccuauccgacgcacacaaaagaaaucuauacgaucauacacuaaugucaauaaucagcacauuccaucuuucaauacccaauuucaaucaauacgaagcaaugucuugcgacuucaacggcggaaaaauaucaguucaauauaaccuaucacacggauacgccguagacgcugcaaaacacuguggaacaguagcaaauggaguauuacaaacauucaugagaauggcauggggcggaucauacauagcacuagacuccgguaaaggaaacugggacugcauaaugacaucauaucaauaccuaaucauacaaaacacaacaugggaagaucauugccaauucucucgacccucaccaauaggauaccucggauuacuaucacaacguacaagagacauauacauuucaagaagacucuuaggaacauucacauggacccuaucugacuccgaaggaagagaaacacccggaggauauuguuuaacaagauggaugcuaauagaagcagaauuaaaaugcuucggaaacacagcugucgcaaaaugcaacgaaaaacacgacgaagaauuuugugacaugcuaagacuauucgacuucaauaaacaagccauacaacgauuaaaaacagaagcacaaaugucaauacaacuaauaaacaaagcuguaaacgcacucaucaaugaccaacuaaucaugaaaaaccaccuacgcgacauaaugggaauaccauacugcaacuacucaaaauacugguaccuaaaucacaccacuacaggaaaaacaucccucccaaaauguuggcuaguaacaaauggaucauauuuaaacgaaacucacuucucugacgacauagaacaacaagccgacaacaugaucacagaaauguuacaaaaagaauacauagaucgacaaggcaaaaccccauuaggucucguagaccuauucguauuuuccacaucuuucuacuuaauaucaauuuuccuacacuuaauaaaaauaccaaaccacagacauauagucggcaaaccaugccccaaaccacaucgacuaaaccacaugggaaucugcucauguggauuuuacaaacaaccaggagucccaguacgauggaaaagauaa

SEQ ID NO: 1878 - RNA, 1473 nt, Artificial Sequence
  derived and/or modified protein sequence (opt6) from LASV(Lassa virus/H.sapiens-wt/NGA/2016/ISTH_1546;Clade II)__AVO03537__GPC
augggacaaauagucacauuuuuccaagaaauaccacacguaguagaagaaauaaugaauauaguacuaauuacccucucgcuauuagcaauauuaaaaggacuauacaacuuugcaacaugcggauuaaucggacuaauaacauuccuauuccuauguggaagaucauguucaacaauauacaaaggaucauaccaacuccaagcacucgaacugaacauggaaacauuaaacaugacaaugccacuaucaugcacuaaaaacaacagccaucacuacaucagagucggaaacgaaaccggacuagaacuaacccuaacaaauacaucaauaauaaaccacaaauuuuguaaucuaucagacgcacauaagaaaaaucuauaugaccacacacuaaugucaaucauauccacauuccaccuaucaaucccaaauuucaaccaauacgaagcaaugucaugugauuuuaauggaggaaaaauaucaguacaauauaaucuuucccauuccuaugcaggagacgcagcacgacauugcggcaccguagcaaauggaguucuccaaacauucaugagaauggcauggggaggaucauacauagcacuagacucaggcaaaggcaacugggacugcauaaugaccucuuaccaauacuuaauaauacaaaacacuacaugggaagaccacugccaauucucccgacccucaccaauaggcuaucuaggacuacuaucacaaagaacaagagacauauacauaucaagaagacuccucggaacauucacauggacacuauccgacucagaaggaaaagaaaccccaggcggauacugucucacuagauggaugcuaauagaagcagaacuaaaaugcuucggaaacacagcaguagcaaaauguaacgaaaaacaugacgaagaauuuugugacaugcuuagacuuuucgacuucaauaaacaagcaauacaaagauuaaaaacagaagcacaaaugucaauacaacuaaucaacaaagcagucaacgcucuaauaaacgaccaauuaauaaugaaaaaucaccuaagagacauaaugggaauaccauacugcaacuauucaaaauauugguaccuaaaccacacaacaacuggaaaaacaucucucccaagaugcuggcucguaagcaauggaucauaucuaaacgaaacacauuucucagaugacauagaacaacaagccgacaacaugaucacagaaaugcuacaaaaagaauacauagacagacaaggaaaaacaccacuaggccuaguagacuuauucguauucucaacaucauucuaccuaauaagcauauuucuacaccuaauuaaaauaccaacucacagacacaucguaggaaaaucuugcccaaaaccacacagauuaaaccacaugggaauuuguucaugcggauuauacaaacaaccuggaguaccaguaaaauggaaaagauaa

SEQ ID NO: 1879 - RNA, 1473 nt, Artificial Sequence
  derived and/or modified protein sequence (opt6) from LASV(Lassa virus/H.sapiens-wt/NGA/2016/ISTH_1591;Clade II)__AVO03647__GPC
augggacaaauuauaacauucuuccaagaagucccgcacgucauagaagaaguuaugaauauaguccuaauagcacuaucacuacuagcaauacuaaaaggcaucuacaacgucgcuacaugcggacuauuuggauuaguaucauuccuccuauuauguggaagaucaugcucaacaacuuauaaaggcguauacgaauuacaaacucuagaacuagacauggcaucacuaaacaugacaaugccauuaagcuguaccaaaaacaacucacaucacuacauaaugguagguaacgaaacaggacuugaauuaacacuaacaaacacaucaauaauacaacacaaauuuugcaaccuuagcgaugcacauaagaaaaaucuuuacgaccacgcacuaaugucaauaguuucaacauuucacuuauccaucccaaacuuuaaccaauaugaagcaaugucaugcgacuucaauggaggaaaaauaacaguacaauacaacuuaucucacuccuaugcaauagacgcagcaaaucauuguggcacaguagcaaacggcguucuacaaacauucaugagaauggcauggggaggaucuuauauagcauuagacucaggcagaggaucuugggauugcauuaugacaagcuaucaauaucuaauaauccaaaauaccacaugggaagaccacugccaauuuucaagacccucacccauaggauaucuaggacuauuaucccaaagaacaagagacauauauauauccagaaggcuacuaggcacauucacauggacucuaucagacucagaaggcaaugaaacacccggaggcuacugucuaacaagauggaugcucauagaagcugaacuaaaaugcuucggcaacacagcaguagcaaaauguaaugaaaaacacgacgaagaauuuugugauauguuacgacuuuucgacuucaauaaacaagcaauaagacgcuuaaaagcagaagcacaaaugucaauacaauuaauaaacaaagcaguaaaugcacucauaaacgaucaacuuauaaugaaaaaccaccuaagagacauaaugggaauaccauacugcaauuacuccaaauacugguaccuaaaccacacagucacuggacgcaccucacuaccuagaugcuggcuagucucaaauggcucauaucuaaaugagacucauuuuucagacgacaucgaacaacaagcagacaauaugauaacagaauuacuccaaaaagaauacauggacagacaaggaaaaacaccauuaggcuuaguagauuuauuuguauuuucaacaucauuuuaccuaauaucgauauuccuacacuuaguuaaaauaccaacacauagacauauaauaggaaaaccaugcccaaaaccacauagacuaaaccauaugggaguuugcucaugcggauuauacaaacacccuggaguaccaguaaaauggaaaagauaa

SEQ ID NO: 1880 - RNA, 1473 nt, Artificial Sequence
  derived and/or modified protein sequence (opt6) from LASV(Lassa virus/H.sapiens-wt/NGA/2016/ISTH_1604;Clade II)__AVO03541__GPC
augggacaaauaguaacuuuuuuucaagaaguuccacacguaauagaagaaauaaugaacauaguauuaauaacauuaucacuacucgcaauauuaaaaggaguauacaaucuugcaacauguggccuaauaggacuaauaacauuucuauucuuaugcggccgaucaugcucaaugacuuacaaaggaucauaucaacuugaaacauuagaauuaaauauggaaacacuaaacaugacaaugccauuaucaugcacgaaaaauacaucacaccacuacauacgaguaggaaacgaaacuggcuuagaacuaacauuaacaaauacaagcauaauaaaccacaaauuuugcaaccuaucugaugcacacaaaaaaaaccuauacgaccacucacuaauguccauaguaucaacauuccacuuaucaauaccaaacuucaaucaauacgaagcuauguccugcgacuuuaacggaggaaaaauaucaauacaauacaaccuaucgcacgcuuacgcaggagacgcagccaaacauugcggcacauuagcaaacggaguacuacaaacauucaugagaauggcgugggguggaucuuacauagcacuagauuccggccgcggaaacugggacugcauaaugacaucauaccaauauuuaauaauacaaaacaccacaugggaagaccacugccaauucucaagaccaucaccaauaggauaucuaggcuuauuaucacaaagaacgcgagaaauauauauaucaagaagacuacuaggaacuuucacauggacccucucagauuccgaaggaaacgaagcacccggaggauacugcuuaacaagauggaugcucauagaagcagaauuaaaaugcuuuggaaacgcagcaguagccaaaugcaacgaaaaacacgacgaagaauuuugcgauaugcugagauuauucgacuuuaacaaacaagccauacaaagacuaaaaaccgaagcacaaauguccauacaauuaauuaacaaagcaguuaaugcccucauaaacgaccaacuaauaaugaaaaaccaccucagagacauaaugggaaucccauacugcaauuauuccaaauacugguaccuaaaucauacaacaaccggacgcacaucucuaccaagauguuggcuaguaucuaacggaucauaucucaacgaaacccauuucucagaugacauagaacaacaagcagauaacaugaucaccgaaaugcuacaaaaagaauauaucgaccgacaaggaaaaacaccacuaggacuaguagaucucuucguauucucaacaucauucuaccuaauaagcaucuucuuacacuuaguaaaaauaccaacacacagacacauaguaggaaaaucaugcccaaaaccacauagacuaaaucacauggguauauguaguugcggacuuuauaaacaaccaggagucccaguacguuggaaaagauaa

SEQ ID NO: 1881 - RNA, 1473 nt, Artificial Sequence
  derived and/or modified protein sequence (opt6) from LASV(Lassa virus/H.sapiens-wt/NGA/2016/ISTH_1609;Clade II)__AVO03661__GPC
augggacaaaucguaacauucuuccaagaaauaccacacguaauagaagaaguaaugaacauaguacuaauaacucuuucacuacuagccguauuaaaaggaauauacaacuucgcuacaugcggacuaaucggacuuauaacauuccuauuccuauguggaaggucuugcagcacuauauacaaagguucuuaccaauuacaaaaacuugaacucaacauggaaacauuaaacaugacaaugccacuaucauguacaaaaaacuccucacaucacuauauaagaguaggcaacgaaaccggauuagaacucacccuaacaaacacuucaauaauaucacacaaauucugcaaucuaucugacgcccauaaaaaaaaucuauaugaccacgcguuaaugucuauaauaucaacauuucaccuaucuauccccaauuucaaucaauacgaagcaaugagcugcgauuucaacggagguaaaauaucaguacaauacaaccucagucauucauacgcaggagacgcagcaagacauugcgguacacuagcuaacggaguccuccaaaccuuuaugagaauggcuuggggcggaucuuauauagcacuagauagcggaaaaggcaacugggauugcauaaugacaucauaucaauuucucaucauacaaaacacaacaugggaagaccauugccaauucucaaggccaucaccaaugggauacuuaggauuauuaucucaaagaacacgagauauauauauuucacguagacuauuaggaacauuuacauggacacuauccgauucagaaggaaaagaaacuccaggcggauauugccuaacaagauggaugcuaauagaagccgaacuaaaaugcuucggaaacacagccguagcaaaauguaacgaaaaacaugaugaagaauucugcgacaugcuaagacucuucgacuucaacaaacaagcaauacaaaggcuaaaaacagaagcacaaauguccauccaacuaaucaauaaagcaguaaacgcacuaauaaacgaccaacuaaucaugaaaaaccaucuaagagacaucaugggcauaccauacugcaauuacucacaauacugguacuuaaaccacacaauaacaggaaaaacaucccuaccaaaaugcuggcuaguaucaaaugguucuuaucucaacgaaacacacuucucagacgacauagaacaacaagcagauaacaugaucacagaaaugcuacaaaaagaauauauagaucgacaaggcaaaaccccauuaggacuagucgaccuauuugucuucucaacaucauucuaccuaauaucuauauuucuacaccuaauaaaaauaccaacacacagacacaucguagguaaaucaugcccaaaaccccacagacuaaauagaaugggcaucugcucuuguggacucuacaaacaaccaggaguaccuguaaaauggaaaagauaa

SEQ ID NO: 1882 - RNA, 1473 nt, Artificial Sequence
  derived and/or modified protein sequence (opt6) from LASV(Lassa virus/H.sapiens-wt/NGA/2016/ISTH_1610;Clade II)__AVO03603__GPC
augggacaaauaaucacauucuuccaagaaguaccccacgucauagaagaaguaaugaacauaguauuaauagcacucucccuacuagcaauacuuaaaggaaucuacaacguagcaaccuguggacuauucggauuaguuucauuccuauuucuaugcggacgaucaugcucaacaacauacaaaggcguauacgaacuacaaacauuagaacuugacauggcaucucuaaacaugacaaugccucuaucauguacaaaaaacaacucacaucacuacauaaugguaggaaacgaaacuggacuagaacuuacacuaaccaacacaucaauaaucaaucacaaauuuugcaauuuaucugaugcccauaaaaaaaaccuauacgaccaugcauuaaugucaauaauaucaacauuucaccuaucaauacccaacuuuaaccaauaugaagcaaugagcugugacuucaacggaggaaaaauaucaguacaauacaaccuaucacauacauaugcaauagaugcagcuaaccacugcggcacuaucgcaaacggaguccuacaaacauuuaugcgaauggcuuggggaggaucauauauugcauuagauuccggaagaggauccugggacugcauaaugacauccuaccaauaccuaauaauccaaaacacaacaugggaagaucacugccaauucucacgcccauccccaauaggauauuuaggucuauuaagccaaagaaccagagacauauauauaucuagaagauuacuaggcacuuucacauggacacuaucagacucagaaggaaacgaaaccccaggagguuacugucuaacaagauggaugcuaauagaagcagaauuaaaaugcuuugguaacacagccgucgcaaaauguaacgaaaaacacgacgaagaauuuugugacaugcuaagauuauucgacuucaauaaacaagcaauaagaagauuaaaagcugaagcccaaaugaacauacaacuuauaaacaaagcaguuaacgccuuaauaaacgaucaacuaauaaugaaaaaucaccucagagauauaaugggaaucccauacuguaacuacucuaaauacugguaccuaaaucauacaguaaccgguagaacaucucuacccagauguuggcuugucucaaacggaucauaucuaaacgaaacacacuuuucagaugacaucgaacaacaagcagacaauaugauaaccgaacuacuacaaaaagaauacauggaccgacaaggaaaaacaccauuaggcuuaguagaccuauuuguauuuucuaccucauucuaccuaauaucaauauuccuacacuugauaaaaauccccacucacagacauauuguaggcaaaccauguccuaaaccacauagacuaaaccauaugggaauaugcucauguggacuauacaaacacccaggaguaccaguaaaauggaaaagauaa

SEQ ID NO: 1883 - RNA, 1473 nt, Artificial Sequence
  derived and/or modified protein sequence (opt6) from LASV(Lassa virus/H.sapiens-wt/NGA/2018/ISTH_0959;Clade II)__AVV65099__GPC
augggccaaauuauaacauucuuccaagaaguaccacauguaauagaagaaguaaugaacaucguauuaauugcacucucauuauuagcuauacucaaagguaucuacaacgucgucacaugcggacuauucggccuaguuucauucuuacuccuuuguggaagaucaugcagcacaacauacaaaggaguauacgaacuacaaaccuuagaacuagauauggcaucacuaaacaugacaaugcccuuauccugcacaaaaaauaacucacaccauuacauaauggucggaaacgaaacaggauuagaauuaacauuaacaaacacauccauaauaaaucauaaauucuguaaccucucagacgcacauaaaaaaaaucuauaugaucacgcauuaaugucaaucaucucaacauuccaccuuucaauaccaaauuucaaccaauacgaagcaaugucaugcgacuucaacgguggaaaaauaucuguacaauacaauuuaucacacgccuaugcaauagaugcagcaaaucacugcggaacaaucgccaacggaguauuacaaacauucaugagaauggcauggggaggaucauacauugcacuagacucaggcaaaggaucuugggacuguaucaugacaucauaucaauacuuaauaauacaaaacacaacaugggaagaccacugccaauucucacgaccaucacccauaggauacuuaggacuacuaucacaacgaacacgagacauauacauaucaagacgacuauuaggaacauuuacuuggacacuauccgacucagaaggaaacgaaaccccugguggauauugucuaaccagauggaugcucauagaagcagaacuaaaaugcuuuggaaacaccgcaguagccaaaugcaacgaaaaacacgacgaagaauucugcgacauguuacgacuauucgauuuuaacaaacaagcaauacgaagacuaaaaacagaagcacaaaugucaauacaacuaauaaacaaagcaguaaacgcacuaauaaacgaccaacuaauaaugaaaaaccacuuacgagacauaaugggaauacccuacugcaacuacucaaaauacugguauuuaaaccacacaguaaccggaaaaacaucacuaccccgauguugguuaguauccaacggaucauaucucaacgaaacacacuucucagaugacauagaacaacaagcagacaacaugauaacagaacuccuucaaaaagaauacauagauagacaaggaaaaacaccucuaggacuaguagacuuauucguauucuccacuucauucuaucuaauaaguauuuucuuacaucuuguuaaaauaccaacacacagacacguuauaggaaaacccuguccaaaaccacacagacuaaaccauaugggcaucuguucaugcggacuauacaaacacccaggaguacccguuaaauggaaaagauaa

SEQ ID NO: 1884 - RNA, 1473 nt, Artificial Sequence
  derived and/or modified protein sequence (opt6) from LASV(Lassa virus/H.sapiens-wt/NGA/2018/ISTH_1024;Clade II)__AVV65105__GPC
augggccaaauaaucaccuucuuccaagaaguaccucacgucauagaagaaguaaugaacaucguacuaauagcccuaaguuuacuugcaauacuaaaaggaguuuacaacguagcaaccugcggacuauucggccuaguaucauuccuauuacuuuguggaagaucuuguagcacaacauacaaaggaguauaugaauuacaaacacuagaacuagacauggcaaacuuaaacaugacuaugccuuuaucaugcacuaaaaacaacucacaccauuacaucagaguuggaaacgaaacaggacuagaauuaacacucacaaacaccucaauaauaaaccacaaauucuguaaccuaucagaugcacacaaaaacaaucuauacgaccacgcauuaaugucaauaauaucaacauuccaucuuuccauaccuaacuuuaaucaauacgaagcaauguccugcgacuucaacggaggaaaaauaucaguacaauacaaccuaucacaugcauacgcaguagaugccgcaaaccacuguggaacaaucgcuaacggaguccuacaaacauucaugcgaauggcauggggaggauccuacauagcacuagacucaggacgaggaucuugggacugcauuaugacaagcuaccaauaccucauaauacaaaacacaaccugggaagaccacugccaauucucaagaccauccccaauaggauacuuaggcuuauuaucacaacgaacaagagauauauacauaucucgaagacuauuaggaacauucacuuggacacucagcgacucugaaggcaacgaaacaccaggaggauacugccuaacaagauggaugcuaauagaagcagaacucaaauguuucggcaacacagcaguugcaaaauguaaugaaaaacaugacgaagaauuuugcgacauguuacgacuauucgacuucaacaaacaagcaauacgaagacucaaaacagaagcacaaaugucaauccaacuaauaaacaaagcaguaaacgcccuaaucaaugaccaauuaauaaugaaaaaccacuuaagagacauuaugggaaucccauacugcaacuauucaaaauacugguaccuaaaccacaccguaacaggaaaaacaucacuaccacgcugcuggcucguauccaauggcacauaccuaaacgaaacucauuucucagaugacauagaacaacaagcagauaauaugauaacagaacuauuacaaaaagaauacauggacagacaagguaaaacaccacuaggucuaguagacuuauucgucuucucaacuucauucuaucuaauaucgauauuuuuacauuuaguaaaaauaccaacucacagacauguaaucggcaaaccuugcccaaaaccacacagauuaaaccacaugggaaucugcucaugcggauuauauaaacacccuggaguacccgucaaauggaaaagauaa

SEQ ID NO: 1885 - RNA, 1473 nt, Artificial Sequence
  derived and/or modified protein sequence (opt6) from LASV(Lassa virus/H.sapiens-wt/NGA/2018/ISTH_1079;Clade II)__AVV65107__GPC
augggacaaauaauaacauuuuuccaagaaguuccacacguaaucgaagaaguaaugaauauaguacuaaucgcauuaucauuauuagccauacuaaaaggaauauacaacguagcaacaugcggucucuucggcuuagucgccuuccuauuacuaugcggccgaucaugcuccacaaccuauaaaggaguuuacgaauuacaaacauuagaauuagacauggccucacuaaacaugacuaugccauuaagcugcaccaaaaauaacucucaccacuacauaaugguaggcaacgaaaccggacuagaauuaacccuaacaaacacaagcauaauaaaccacaaauucugcaaccuaucagacgcacacaaaaaaaauuuauaugaucacgcacuuaugucaauaauaucaacauuccaucuaucaauaccaaacuucaaccaauacgaagcaaugucaugcgauuuuaauggaggaaaaauaucuguccaauacaaccuaucccauaccuacgcaguagacgcugcaaaucauugcggaacaauagcaaacggaguccugcaaacuuuuaugagaauggccugggguggaucauauauagcacuagacucaggaaaaggaucaugggauugcaucaugacaucauaccaauaccuaauaauccaaaacaccacuugggaagaucauugccaauuuuccagaccaucaccuauaggauaucuaggacuacuaucacaacgaacaagagacauauacauaucaagaagacuacucgguacauucacauggacauuaucugacucugaaggaaaugaaacaccuggcggauacugucuaacaagauggaugcuaauagaagcagaacuaaaaugcuucggaaauacagcaguagcaaaaugcaaugaaaaacacgaugaagaauuuugcgacaugcucagacuauuugauuucaacaaacaagcaauccgaagacuaaaaacagaagcacaaaugucaauacaacucauaaauaaagcaguaaacgcacuaauaaacgaccaacuaauaaugaaaaaccauuuaagagacauaaugggaauaccauacugcaacuacucaaaauacugguacuuaaaucacacaguaacaggaagaacaucauuaccaagaugcuggcuuguaucaaacggaucauacuuaaaugaaacucacuucucagaugauauagaacaacaagccgacaacaugaucacagaacuacuacaaaaagaauacauggauagacaaggcaaaacaccacucggacuaguagauuuauuuguauuuucaacaucauuuuaucuaauaucaauauucuuacauuuaauaaaaauaccaacacacagacaugucauaggcaaaccaugcccaaaaccacauagacucaaccacaugggaaucugcucauguggauuauacaaacacccaggaguaccaguaaaauggaaaagauaa

SEQ ID NO: 1886 - RNA, 1473 nt, Artificial Sequence
  derived and/or modified protein sequence (opt6) from LASV(Lassa virus/H.sapiens-wt/NGA/2018/ISTH_1177;Clade II)__AVV65101__GPC
augggccaaauaauaacauucuuucaagaaguuccacacguaauagaagaaguaaugaacaucguuuuaauugcccuaucauuauuagcaauacuaaaaggaaucuacaacguagcaacaugcgguuuauucggacucguaucauuccuuuuauuaugcggacgaaguugcucuacaacuuauaaaggaguauaugaacuucaaacacuagaacuagacauggcaucacuaaauaugaccaugccauuaagcuguacaaaaaacaacucucaucacuacaucagaguaggaaacgaaacaggacuagaacuaacacucacaaacacaucaauaauagaccacaaauucugcaaucuaucugaugcacacaaaaaaaauuuauacgaucaugcacuuaugucaaucauaucaacauuucacuuaucaauucccaauuuuaaucaauacgaagcaaugucaugcgauuucaacggaggaaaaaucuccguacaauacaacuuaucacacaccuacgccguagacgcagcaaaucacugcggaacaauagccaacggaguacuacaaacuuucaugcgaauggcauggggaggaucauauauagcucuagauucuggaaaagguuccugggacugcauaaugacauccuaucaauaccuuauaauacaaaauaccacaugggaagaucacugccaauucucacgaccaucaccaauuggauauuuaggacucuuaucacaaagaacaagagacauauacauaucaagaagauuauuagguaccuucacauggacacuaucagauuccgaaggaaaugaaacaccaggcggauauuguuuaaccagauggaugcuaauagaagcagaacuuaaaugcuuuggaaauaccgcaguugcaaaaugcaacgaaaaacacgacgaagaauucugugacaugcuaagauuauucgauuuuaacaaacaagcuauaagaagacucaaaaccgaagcucaaaugagcauacaauuaauaaacaaagccgucaacgccuuaaucaaugaccaauuaauaaugaaaaaucauuuaagagacauaaugggaauaccauacuguaacuauucaaaauacugguaccuaaaccacacaauaacagguagaacaucauuaccaagaugcugguuaguuuccaauggauccuaccuaaacgaaacacacuuuuccgaugacauagaacaacaagcugacaacaugauaacagaauuauuacaaaaagaauacauggauagacaaggaaaaacaccacuaggccucguagaucucuuuguauuuucaacaucauucuaccucauaucaauuuuccuacaccuaguaaaaaucccaacacacagacacguaaucggaaaaccaugcccaaaaccacacagacucaaccacaugggaauaugcucaugcggacuauauaaacacccaggaguaccaguuaaauggaaaagauaa

SEQ ID NO: 1887 - RNA, 1473 nt, Artificial Sequence
  derived and/or modified protein sequence (opt6) from LASV(Lassa virus/H.sapiens-wt/NGA/2018/ISTH_1375;Clade II)__AVV65115__GPC
augggacaaauaauaacauucuuccaagaagucccccacgucauagaagaaguaaugaacauaguacuaauagcacuuagccuacucgcaauacuuaaaggaauauacaacauagcaacaugcggacuauucggacuaguaucuuuccuacuccucugcgguagaucauguucaacaacauacaaaggcguauacgaauuacaaacccuagaauuagacauggcaucacuaaauaugacaaugccuuuaucauguacaaaaaauaacucacaccauuacauaaugguaggaaacgaaacaggccuagaacuuacucuuacuaauacaucaauaauaaaccaucgauucugcaauuuaucagacgcacauaaaaaaaaccucuacgaccacgcacuaaugucuauaaucucaacauuucaccuaagcauaccaaacuucaaccaauacgaagcaaugucuugugacuucaacggaggcaaaauaucaguacaauauaaccuaucacaugccuacgccguagacgcugcaaaucacugcggaaccauugcaaauggaguacuacaaaccuucaugagaauggcauggggaggcucauauauagcacucgauucuggaaaaggaucaugggacugcauaaugaccuccuaccaauaccucauaauacaaaacacuacaugggaagaccauugccaauucuccagaccaucaccaaucggauaccucggacuauuaucccaaagaaccagagacauauacauaucacgaagacuacuuggaacauucacauggacccuaucagauagugaaggaaacgaaacacccggaggauacugucuaacuagauggaugcuaauagaagccgaacuaaaauguuucgguaacacagcaguagcuaaaugcaacgaaaaacaugacgaagaauucugcgauaugcuuagacuauucgacuucaacaaacaagcaaucagaagauuaaaaacugaagcacaaauguccauacaacuaauaaacaaagcaguaaacgcacuaauaaaugaccaacuaauaaugaaaaaucaucucagagacaucaugggaauuccauauuguaauuacuccaaauauugguaucuuaaccauaccguaaccggaaaaacauccuuaccaagauguugguuaguaucaaacggaucauacuuaaacgaaacacauuucucagacgacauagaacaacaagcagacaacaugauaacagaacuacuucaaaaagaauacaucgacagacaaggaaaaacaccacucggacuaguagaccuuuucguauucucaaccucauuuuaccuaauauccauuuucuuacaucuuguaaaaauaccuacacacagacacguaaucggaaaaccaugcccaaaaccucaucgauuaaaccacaugggcauaugcucaugcggauuauacaaacacccuggaguuccaguaaaauggaaacgauag

SEQ ID NO: 1888 - RNA, 1473 nt, Artificial Sequence
  derived and/or modified protein sequence (opt6) from LASV(Lassa virus/H.sapiens-wt/NGA/2018/ISTH_1381;Clade II)__AVV65111__GPC
augggacaaauaguaacauuuuuucaagaaguuccacacguaauagaagaaguaaugaacaucguacuaaucgcauuaucacucuuagcuauauuaaaaggaauuuacaauguagccacauguggucuauucggccuaguaucauucuuacuucuaugcggaagauccugcucaacaacauacaaaggaguauacgaacuacaaacacuagaacucgauauggcaucacucaauaugacaaugcccuuaucauguacuaaaaauaacucacaccacuacauaaugguaggaaacgaaacaggacuagaacuaacauuaacaaacacuucaauaauaaaccauaaauucugcaaccuaucagaugcacacaaaaaaaacuuauacgaccacgcacucaugucuaucauauccacuuuccaccucucaaucccaaauuucaaucaauaugaagcaaugucaugcgacuuuaacggagguaaaauaucuguccaauacaaucuaagucacacauacgcaguagacgcagcaaaucauugcggaacuauugcaaacgguguacuacaaacauucaugagaauggccuggggcggcuccuacauagccuuagauuccgguaaagguuccugggauuguauaaugaccucauaccaauaucucauaauacaaaauacaaccugggaagaccauugucaauuuucaagaccaucacccauagguuacuuagguuuauuaucccaaagaacaagagauauauacaucucaagaagacuuuuagguacauucaccuggacccuuucagacuccgaaggaaacgaaacuccuggaggauacugcuuaacuagauggaugcuaauagaagcagaacuaaaaugcuucggaaauacugcaguagccaaaugcaacgaaaaacacgaugaagaauucugcgacaugcucagacucuuugacuucaacaaacaagcaauccgcagacuuaaaacagaagcccaaaugucaauccaauuaauuaacaaagcugucaacgcacuaauaaacgaccaacuuaucaugaaaaaccauuuacgagacauaauggguauucccuacugcaauuauucaaaauacugguaccuuaaccacacgguaacaggaaaaacaucauuaccacgaugcuggcuaguauccaacggaucuuaccuaaaugaaacacacuucucagacgauauagaacaacaagcagauaacaugauaaccgaacucuuacaaaaagaauauauggacagacaaggaaaaacaccauuaggacuaguagacuuauucguauuuaguacaucauucuaccuaauaagcauuuuucuacacuuaguaaaaauaccaacacacagacacguaguaggaaaaccaugcccaaaaccacacagacucaaccacaugggaaucugcuccugcggacuauauaaacacccaggaguaccaguaagauggaaaagauaa

SEQ ID NO: 1889 - RNA, 1473 nt, Artificial Sequence
  derived and/or modified protein sequence (opt6) from LASV(Lassa virus/H.sapiens-wt/NGA/2018/ISTH_1643;Clade II)__AVV65119__GPC
augggacaaaucauuacauucuuccaagaaguuccacacgucauugaagaaguaaugaacauaguauuaauagcccuuucacuauuagccauacucaaaggaaucuacaauguagcuacaugcggauuauuuggacuaguaucauuccuacuacucugcggaagaucaugcucaacaacauacaaaggcguauaugaauuacaaacauuagaacucgacauggcaucuuuaaauaugacaaugccacuaucauguacaaaaaacaauagucaccacuacauuaugguaggaaaugaaacaggacuagaacuaacacucaccaauacauccauaauaaaccauaaauucugcaauuuauccgacgcacauaaaaaaaacuuauaugaucacgccuuaaugucaauaauaucaacauuccaccuaucaauaccaaacuucaaccaauaugaagccaugucaugcgacuuuaacggaggcaaaauuucaguacaauacaacuuaucccacaccuaugcaguagaugcagccaaccauuguggaacaaucgcaaacggaguacuccaaacuuucaugcgaauggcauggggaggaucauacauagcacuugacucuggaaaaggaucaugggauugcaucaugaccagcuaccaauauuuaauaauacaaaauacauccugggaagaccacugccaauucucacgaccuucacccaucggauaccuaggucuacuaucacaaagaacacgugacauauacauaucacgacgacuacuagguacauucacauggacacuaucugacucagaaggaaacgaaacaccaggcggcuacugccuaacaagauggaugcuaauagaagccgaacuaaaaugcuucggaaauacagcaguagcaaaaugcaacgaaaaacacgaugaagaguucugcgauauguuaagauuauucgacuucaacaaacaagcaauacgaagauuaaaaacagaagcacaaaugucaauccaacuaauaaacaaagcaguaaaugcucuaaucaacgaucaacuaauaaugaaaaaccaccucagagauauuaugggaauaccauacugcaauuacuccaaauauugguaucucaaucacacaguuacgggaaaaacaagucuaccacgcuguuggcuaguaaguaauggaacauaucuaaacgaaacacacuuuuccgacgauauagaacaacaagcagauaacaugauaacagaacuacuacaaaaagaauacauagaucgacaaggaaaaacaccacuaggauuaguagaccuauucguauucucuacaucauucuaucuaauaucaauuuuccuacaccuaguaaaaauaccaacccacagacaugucauaggaaaaccaugccccaaaccacauagauuaaaccacaugggaauaugcuccugcggcuuauacaaacauccaggaguaccaguuaaauggaaacgcuaa

SEQ ID NO: 1890 - RNA, 1473 nt, Artificial Sequence
  derived and/or modified protein sequence (opt6) from LASV(LASV003-NIG-2008;Clade II)__AIT17580__GPC
augggacaaauaauaacauucuuccaagaaguaccacauguaauagaagaagucaugaacauaguacuaauagcuuuaucauuacuagcaauacuaaaaggcauauacaacguugcaacaugcggauuauucggauuaguuuccuucuuacuacuauguggaagaucauguucaacaacauauaaaggagucuacgaacuccaaacacuagaauuagacauggcaagucuaaauaugacaaugccauuaucaugcaccaaaaacaacucacaccacuacauuauggucggaaacgaaacaggacucgaacucacacuaacaaacaccucuauaaucaaucacaaauucugcaaccuaucggaugcccacaagaaaaaucuauacgaucacgccuuaauguccauuauaucaacauuccaucucucaauaccaaacuucaaucaauacgaagcaaugucaugugauuucaacgguggcaaaauaucaguacaauacaauuuaucccauacauacgccguagacgcagcaaaccauugcggaacgauagccaacggcguauuacaaaccuucaugagaauggcuuggggaggaucauauauagccuuagacucaggaaaaggauccugggacugcauaaugacaucauaccaauauuuaauaauacaaaacacaaccugggaagaccauugccaauucaguagaccaucacccauaggcuacuuaggauuauuaucacaaagaacucgagacauauacauaaguagaagacuacuaggaacauucacauggacacuaucagauagugaaucaaaugaaacaccaggaggauauugccuaacaagauggauguuaauagaagcagaacuaaaaugcuuuggaaauacagcaguagccaaauguaaugaaaaacaugaugaagaauuuugugauaugcuaagacuuuucgacuucaacaaacaagcuauucgaagauuaaaagcagaagcacaaauguccauacaauuaauaaacaaagcaguuaacgcuuuaauaaacgaccaacuuauaaugaaaaaccaccuaagagacauaaugggaauaccauacuguaacuacuccaaauacugguaccuaaaccacacagucacaggaagaaccaguuuaccacgaugcuggcuaguaucaaacgguagcuaucuaaaugaaacucacuucucagacgacaucgaacaacaagcagacaacaugauaacagaauuauuacaaaaagaauacauggauagacaaggaaaaacaccacuaggauuaguugaccuauucgucuuuuccacaaguuucuaucuaauauccauauuucuacaccucguaaaaauuccuacacacagacauguaauaggcaaacccugcccaaaaccccauagauuaaaccacaugggaauaugcuccugcggauuauacaaacacccaggaguaccuguaaaauggaaaagauaa

SEQ ID NO: 1891 - RNA, 1473 nt, Artificial Sequence
  derived and/or modified protein sequence (opt6) from LASV(LASV006-NIG-2008;Clade II)__AIT17584__GPC
augggccaaaucauaacuuucuuucaagaaguaccacaagucaucgaagaagucaugaacauaguauuaauugcauuaucauuauuagcaauuuuaaaaggaauauacaacguagcaaccugcggauuauucggacuagucucuuuccuacuauuaugcggaagauccugcucaacaacauacaaaggaguuuaugaguuacaaacacuagaauuagacauggcaucacuaaacaugacaaugccacuaucaugcacaaaaaacaauagccaccacuauauuauggucggaaacgaaacaggacucgaacuaacauuaacaaaccaaucuauaauuaaucacaaauucugcaaucuaagcgacgcacauaaaaaaaacuuauacgaccacgcacuuaugucaaucauaucaacauuccaucuuucaauaccaaacuuuaaucaauaugaagcaaugucuugcgacuuuaauggaggaaaaauaaguguacaauacaaucuaucacacucauuugcuguagacgcagcaaaccacugcggaacaauagcaaacggaguucuacaaacuuucaugagaauggcauggggaggaaguuacauagcauuagauucaggaaaaggaucaugggauugcauaaugacuucauaccaauaucuaauaauccaaaacacaacaugggaagaccacugccaauucuccagaccaucaccaauaggcuaccuuggauuacucucacaaagaacaagagacauuuauauaucaagacgacuccucggcaccuucaccuggacauuaucagacucagaaggaaacgaaacaccuggagguuacugccuaacaagauggaugcuuauagaagccgaauuaaaaugcuucgguaacacagcaguagcaaaaugcaacgaaaaacaugaugaagaauucugcgacaugcuaagacuauuugacuuuaauaaacaagcaauuagaagauuaaaaacagaagcacaaaugucuauacaacuaauaaacaaagcaguaaacgcauuaauuaacgaccaacuaauuaugaaaaaccaccuacgagacauaaugggaauaccauacuguaacuacucaaaauacugguacuuaaaccacacaaaaaccggaaaaacaucacuaccaagaugcuggcuuguaucaaauggcuccuaucuaaaugaaacucauuucuccgacgacauagaacaacaagcagacaacaugauaacagaauuacuacaaaaagaauacauggauagacaaggaaaaaccccauuaggcuuagucgacuuauucguauucucaacauccuucuaccuuauaucaauauuccuucaccuaguaaaaauacccacacauagacacgucauaggaaaaccaugcccaaaaccacaccgauuaaaccacaugggcauauguucaugcggucuauacaaacacccugguguaccaguaaaauggaaaagauaa

SEQ ID NO: 1892 - RNA, 1473 nt, Artificial Sequence
  derived and/or modified protein sequence (opt6) from LASV(LASV035-NIG-2009;Clade II)__AIT17588__GPC
augggucaaauaauaaccuuuuuucaagaaguaccacacguaauagaagaaguaaugaacauaguacuaauagcacucucccuauuagcaauacucaaaggcauuuacaacguagcaacuuguggacuauuuggauuaguaucuuuucuacuauuauguggaagauccugcucaacaaccuauaaagguguauacgaacuacaaaccuuagaauuagauauggcaucacuaaacaugacaaugcccuuaucaugcacaaaaaacaacucgcaccauuauauaaugguaggaaaugaaacgggauuagaacuaacccuaacaaauacaucaauaauaaaccacaaauuuuguaacuuaucugacgcacacaaaaaaaaucucuaugaccaugcacuaaugucaauaaucucaaccuuucacuuauccauaccaaauuucaaucaauacgaagcaaugucaugcgacuucaacggcggaaaaauauccguucaauacaauuuaucacacgcauacgccguagacgcagcuaaccacugcggcacaauagcaaauggaguacuacaaacauucaugagaauggcauggggaggcuccuacauagcacuagauucagguaaaggaucaugggacugcauuaugacaucauaccaauacuuaauaauacaaaauacaacaugggaagaucacugccaauucucaagaccauccccaauaggcuaucucggacuacuaagucaaagaacaagagacauauacauaucacgcagacuauuaggaaccuucacauggacuuuaagugacagcgaaggaaacgaaacaccaggagguuacugucuaaccagauggauguuaauagaagcagaauuaaaaugcuuuggaaacacagcaguagcaaaaugcaacgaaaaacaugacgaagaauucugugacaugcuacgacuauuugacuuuaacaaacaagcaauaagaagacuaaaagcagaagcacaaaugucaauacaacuaaucaacaaagcaguuaaugcucugauaaacgaccaacucaucaugaaaaaccaccuacgagacauaaugggaauacccuacugcaacuacucaaaauacugguaccuuaaucacacgguuacaggcaaaacuucacuaccaagaugcugguuaguauccaacggaucauaucuaaacgaaacacauuuuuccgacgacauagaacaacaagcagacaauaugauaacagaacuauuacaaaaagaauacauagauagacaagguaaaacaccacuaggacuaguagauuuauucguauucaguacauccuuuuacuuaauaucaauuuuccuccaucuaguaaaaaucccaacacaccgacacguaauaggaaaaccaugcccaaaaccccacaggcuaaaccacaugggaauaugcaguugcggauuauacaaacauccugguguaccuguaaaauggaaaagauaa

SEQ ID NO: 1893 - RNA, 1473 nt, Artificial Sequence
  derived and/or modified protein sequence (opt6) from LASV(LASV042-NIG-2009;Clade II)__AIT17592__GPC
augggacaaauaauaacauucuuccaagaaguaccacauguaauagaagaaguuaugaauaucguacucauagcauuaucauuacucgcaauacuaaaaggaaucuauaacguagcaacauguggccucuuuggccucgucuccuuccuacuacuaugcggaagauccugcucaacaacauacaaaggaguauacgaacuacaaacauuagaacuagacauggcaucacucaacaugacuaugccacuuucaugcaccaaaaacaauucucaccauuacauaauggucggaaacgaaacgggacuugaacucacacuuacaaauacaucaauaauaaaucacaaauuuugcaacuuaucugaugcucauaaaaaaaaucuauaugaucacacauuaaugucaauaauaucaacauuucacuuauccauaccaaacuucaaucaauacgaagcaaugagcugcgauuuuaacggaggacgaauaucaguacaauacaaccuaagccacgccuacgcaguugacgcagccaaucacugcgggaccauagcaaacggaguauuacaaaccuuuaugagaauggccuggggaggcucauauaucgcacuagauucaggcaaaggaucaugggauugcauaaugaccucauaccaauaccuaaucauacaaaacacaacaugggaagaccacugccaauucuccagacccucacccauaggauaccuaggacuacuaucacaaagaaccagagauauauauauaucaagaagacuacuaggaacauucacauggacacuaucugacucagaagguaacgaaacaccaggcggauacugucuaacaagauggauguuaauagaagccgaacuaaaaugcuucgguaauacagccguagcaaaaugcaacgaaaaacaugacgaagaauuuugcgacauguuaagacucuuugacuucaacaaacaagcaaucagaagacucaaaacagaagcacaaaugucaauacaauuaauaaacaaagccguaaacgcauuaauaaaugaccaauuaauaaugaaaaaucaccuaagagauauaaugggaauaccuuauuguaauuacucaaaauacugguaucuuaaucauaccauaacaggaaaaacaucacuaccaagaugcuggcuaguuuccaacggcucauaucuaaacgaaacacacuucucagaugauauagaacaacaagcagacaauaugauaacagaacuuuuacaaaaagaauacaucgaccgacaaggaaaaaccccauuaggauuaguugacuuauuuguuuucucaacaucauucuaccuaauauccaucuuccuacacuuagucaaaauaccaacacacagacacguaguaggaaaaccaugcccaaaaccccaccgauuaaaccacaugggaauauguucauguggauuauacaaacauccaggaguaccaguaaaauggaaacgauaa

SEQ ID NO: 1894 - RNA, 1473 nt, Artificial Sequence
  derived and/or modified protein sequence (opt6) from LASV(LASV045-NIG-2009;Clade II)__AIT17596__GPC
auggggcaaauaaucacauuuuuucaagaaguuccacacgucauagaagaaguuaugaacauaguauuaauugcauuaucccuccucgccaucuuaaaaggaaucuacaauguagcaacaugcggacuauucggacuaguauccuuccuacuauuaugcggaagaucaugcucaacaacauacaaaggaguauaugaacuacaaacauuagaacuugacauggcaucacuaaacaugacuaugccauuaucuugcacaaaaaacaauucacaccacuauauaaugguagguaacgaaacaggauuagaacuaacauuaaccaacacaucgauaauaaaccacaaauucugcaacuuauccgaugcacacaaaaaaaaccuauaugaccaugcacuuauguccauaauaucaaccuuccacuuaucaauaccaaacuucaaccaauacgaagcaaugucuugugacuucaauggcggaaaaauaucaguacaauacaaccuaucccacaccuacgcaguagacgcagcaaaccauuguggaaccauugcaaacggcguacuacaaacauucaugagaauggccuggggcggaucauacaucgcacuagauucuggaaaaggcuccugggacuguauaaugacuucuuaccaauacuuaauaauucaaaauacaucuugggaagaccacugccaauucucacguccaucaccaauaggcuaccucggauuauuaagucaacgaacacgagauauauacauaucucguagacuauuaggaacauucacauggacuuuauccgauuccgaagguaaugaaacaccuggaggauacugcuuaacacguuggaugcuaauagaagcugaacucaaaugcuucggaaacacagcaguagcuaaaugcaaugagaaacacgaugaagaauuuugcgauauguuaagauuauucgauuucaacaaacaagcaauuagaagacuaaaaacagaagcucaaauguccauacaacuaauaaacaaagcagucaaugccuuaauaaacgaccaauuaauaaugaaaaaucauuuacgugacaucaugggaauacccuacugcaauuacucaaaauacugguaucuaaaucacacaguuacaggaaaaacuucucuacccagauguuggcuaguaucaaacgguuccuacuuaaacgaaacacacuucagcgaugacauagaacaacaagcagacaacaugauaacagaauuacuacaaaaagaauauauagauagacaaggaaaaacaccauuaggauuaguagacuuauucguauucucaacaucauuuuaccucauaucuauauucuuacaccuagucaaaauacccacacacagacacguaaucggaaaacccugccccaaaccacacagauuaaaccacaugggcauauguucuugcggacuauacaaacacccuggaguaccaguaaaauggaaaagauaa

SEQ ID NO: 1895 - RNA, 1473 nt, Artificial Sequence
  derived and/or modified protein sequence (opt6) from LASV(LASV046-NIG-2009;Clade II)__AIT17600__GPC
augggacaaauaauaaccuuuuuccaagaagucccacauguaauagaagaagucaugaacauagucuuaauagcauuaucacuacuagcaauccuaaaaggcauauauaacguagcaacaugcggauuauuuggauuaguaagcuuccuccuacuaugcggcagauccuguucaacaacauauaaaggcguauaugaauuacaaacccuagaacuagacauggcaagccuaaacaugacaaugccacucuccugcacaaaaaacaacucacaucauuacauaaugguaggaaacgagacaggcuuagaacuaacacuaacaaacacaagcaucauaaaccacaaauuuugcaaccuauccgacgcacacaaaaaaaacuuguacgaucaugcacuaaugucaauaauaucaacauuucaucuauccauaccaaacuucaaccaauacgaagcaauguccugcgauuucaacggcggaaaaauaucaguucaauacaaccuaucacacgcauacgcaggagacgcagcaaaccacugcggaaccaucgcaaacggagucuuacaaacauucaugcguauggcauggggcgguucauacauagcucuagacucaggaaaaggauccugggacuguauaaugaccucauaccaauacuuaauaauacaaaacacaacaugggaagaccacugucaauucucaagaccaucacccauaggauaccuaggcuuacuaucacaaagaacaagagacauauacauaucucgaagauuacuaggaaccuuuacauggacauuaucagacucagaaggaaacgaaacacccggaggauacugccuaacaagauggaugcuaaucgaagcugaacuaaaauguuuuggaaacacagcaguagcaaaaugcaaugaaaaacaugacgaagaauuuugugauauguuaagacuauuugacuuuaauaaacaagcaauaagaagacuaaaaaccgaagcacaaaugucaauacaacucauaaacaaagcuguaaaugcacucauaaacgaccaacucauaaugaaaaaccacuuaagagacauaaugggaaucccauacugcaauuauaguaaauacugguacuuaaaccacacaguaaccggcaaaacgucacuaccucgcuguuggcuaguaucaaauggcucauaccuaaacgaaacccacuucucugacgauauagaacaacaagccgacaauaugauaacagaauuacuacaaaaagaauacauagaccgacaaggaaaaacaccauuaggauuagucgaucuuuucguauuuucaaccucauuuuaccuaauaucaauauuccuccaccucguuaaaauaccuacccacagacauguaauaggaaaaccauguccaaaaccacacagauuaaaucauaugggaauaugcuccugcggauuauacaaacacccaggaguacccguuaaauggaaaagauaa

SEQ ID NO: 1896 - RNA, 1473 nt, Artificial Sequence
  derived and/or modified protein sequence (opt6) from LASV(LASV049-NIG-2009;Clade II)__AIT17604__GPC
augggacaaauuauaacauucuuucaagaaguaccacacgucauagaagaaguuaugaacaucguacuaauagcacuuucauuauuagcaauccuaaaaggaauauacaacguagcaacaugcggccuauucggacuugucucuuuccuacuauuaugcgguaggucauguaguacaacauauaaagguguuuacgaacuacaaacacuagaauuagacaugacuucacucaauaugacuaugcccuuaucauguacaaaaaacaacucacaccacuacauaaugguaggaaacgaaacugggcuagaacuaacacuaaccaacacaucaauaauaaaucauaaauucugcaacuuaagugacgcucauaaaaaagacuuauacgaucacgcacuaaugucaauaaucucaaccuuccaccuauccauacccaacuucaaucaauacgaagcaaugucaugcgacuucaauggaggaaaaauauccguacaauacaaccuaucccacacauacgcaguagaugcagcaaaacauugcggcaccauagcaaacggaguauuacaaaccuucaugagaauggcauggggcggaagcuacauagcuuuagacuccggaaaaggauccugggacuguauaaugacaucauaccaauauuuaaucauacaaaauaccacaugggaagaucacugccaauuuucuagaccaucaccaguaggauacuuaggauuauuaucccaaagaacaagagacauauauauaucaagacgccuuuuagguaccuuuacauggacuuuaucagauucugaaggaaacgaaacaccuggcggauacugucuaacaagauggaugcucauagaagcagaacuaaaaugcuucggaaacaccgcaguagccaaauguaacgaaaaacacgaugaagaauuuugugauaugcuaagacucuucgacuucaauaaacaagcaaucagacgucugaaaacagaagcacaaauguccauacaauuaauaaacaaagcaguaaacgcacuaauaaacgaccaauuaaucaugaaaaaccacuuaagagauauaaugggaauaccauacugcaacuacucaaaauacugguauuuaaaccacaccguaaccggaaaaacaagccuaccaagaugcuggcucguaaguaacggaucauaccuaaacgaaacacacuucucagacgacauagaacaacaagccgacaacaugauaaccgaacuauuacaaaaagaauaccuagauagacaagguaaaacaccacucggacuaguagacuuauucguauucucuacaucauucuaucuaauauccauauucuuacaucuaguaaaaauaccaacacacagacacgucauaggaaaaccaugccccaaaccacacagacuaaaucacaugggaauaugcucaugcggacucuauaaacacccaggaguaccagucaaauggaaaagauaa

SEQ ID NO: 1897 - RNA, 1473 nt, Artificial Sequence
  derived and/or modified protein sequence (opt6) from LASV(LASV052-NIG-2008;Clade II)__AIT17608__GPC
augggccaaauaauaacauucuuucaagaaguaccacacguaauagaagaaguaaugaauauagucuuaaucgcacuaucccuacuagcaauacuuaaaggaauuuacaacguagcaacauguggccuauuugguuuagucucauucuuauuacuauguggaagaucauguaguacaaccuauaaaggagucuacgaacuacaaacauuagaacuagacauggcuucccucaacaugacaaugccacuauccugcacuaaaaacaacucccaccauuauauaaugguaggcaacgaaacaggauuagaacuaacacuaacaaauacaucaauaauaaaccacaaauucugcaaccuaucagacgcccauaaaagaaaccuuuauaaccacgcauuaauguccauaauuucaacuuuccaucuaucaauucccaacuucaaccaauacgaagccauguccugcgacuucaauggcggcaaaauaucaguacaauacaacuuaucccauacauacgcaguagacgcagcaaaccacugcggaaccauagcaaauggaguccuacaaaccuucaugagaauggccuggggaggcucauacauagcauuagacucaggcaaaggaucaugggauugcauaaugaccucuuaucaauaccuaauuauacaaaacacaaccugggaagaucacugccaauuuucaagacccucaccaaucggcuaccucggacuacuuucccaaagaacaagagauauauacauaucacgaagauuacuaggaacauucacauggacucucucagacucagaaggaaacgaaacuccaggcggauacugccuaacaagauggaugcuaauagaagcagaacuaaaauguuuuggcaauacugccguagcaaaauguaaugaaaaacaugaugaagaauuuugugacaugcuaagauuauucgacuucaauaaacaagcaauuagaagacuaaaaacagaagcacaaaugucaauccaacuaauuaacaaagcaguaaaugccuuaaucaaugaccaauuaauaaugaaaaaccaccuaagagacauaaugggaauaccuuacugcaacuacucaaaauacugguacuuaaaccacacaguaacaggaaaaacaucucuaccuagaugcugguuagucucaaacggauccuacuuaaaugaaacccauuucuccgaugacauagaacaacaagcagacaauaugauuacagaacucuuacaaaaagaauauaucgacagacaaggaaaaacaccacuaggccuaguugauuuauuuguauucucuacaucauucuacuuaauaucuauauuccuacaucuugucaaaauaccaacacaccgccacaucauaggcaaaccaugcccaaaaccucacagauuaaaucacaugggcauauguucaugcggacucuacaaacaccccggagucccaguaaaauggagaagauaa

SEQ ID NO: 1898 - RNA, 1473 nt, Artificial Sequence
  derived and/or modified protein sequence (opt6) from LASV(LASV056-NIG-2008;Clade II)__AIT17612__GPC
augggacaaauaauaacauucuuucaagaaguaccccacguaauagaagaaguaaugaauauuguauuaauagcacuaucauuacuugcaauacuaaaagguauauauaacguagcaacaugcggacuguucggacuugucuccuuccuacuacuaugcggaagaucuuguuccacaacuuauaaaggcguuuacgaauuacaaacauuagaauuagacauggcaucucuaaauaugacaaugccacuaagcugcacaaaaaauaacucacaccacuacauaagaguaggaaacgaaacaggacuagaacuuacauuaacaaacacuucaauaauaaaccacaaauuuugcaacuuaucugacgcccacaaaaaaaaccuauaugaucacagccuaaugucaaucauaucaacuuuccaccuauccaucccaaacuucaaccaauacgaagcaaugucaugugacuucaauggaggaaaaaucuccguacaauacaaccuaucccauacauaugcaguagaugcagcaaaccacuguggaacaauagcaaauggaguucuacaaacauuuaugcgaauggcauggggaggauccuacauagcacuagacagcggaaaaggcaacugggauuguauaaugacauccuaucaauaccuuauaauacaaaacacaacaugggaagaccacugccaauucucacgaccauccccaauaggauaucuaggauuacuaucgcaaagaaccagagauauauacauaaguagaagacucuuaggaacauuuaccuggacucuaucugacuccgaagguaacgaaacacccggcggauacugccuaacacguuggaugcuaaucgaagcagaauuaaaaugcuucggaaauacagcaguagccaaaugcaacgaaaaacacgacgaagaauucugugacauguuacgauuauucgacuuuaauaaacaagcaauucgccgauuaaaaacagaagcacaaaugucuauacaacuaauaaacaaagcaguaaacgcauuaauaaacgaucaacuaauaaugaaaaaccauuuaagagacauaaugggcauaccauauugcaauuauuccaaauacugguaucuaaaucauacagucacaggaaaaacaucacuaccaagaugcugguuaguaagcaacggaucuuaccucaacgaaacacacuucucagaugauauagaacaacaagcagauaauaugauuacagaacuacuccaaaaagaauacauugacagacaaggaaaaacaccucuaggacuaguagaucuauucguauucucuacaucauucuaccuaauaucaauauuccuacaucuaguaaaaaucccaacacacagacauguaguaggcaaaccaugcccaaaaccacauagacucaaucauaugggaauauguucauguggacuauacaaacaccccggaguuccaguaaaauggaaaagauaa

SEQ ID NO: 1899 - RNA, 1473 nt, Artificial Sequence
  derived and/or modified protein sequence (opt6) from LASV(LASV058-NIG-2008;Clade II)__AIT17616__GPC
augggacaaauaauaacauucuuccaagaaguaccacacguaauugaagaagucaugaacaucguccuuauagcacuaucccuccuagcuauauuaaaaggaauauacaauguagcaacaugcggauuauucggacucguaucauuucuauuacucugcggacgcucaugcucuacaaccuauaaaggaguauacgaacuccaaacauuagaauuagacauggcaucauuaaauaugacaaugccccuauccugcaccaaaaauaacucacaccacuacauaaugguaggcaacgaaacaggauuagaacuuacauuaacaaauacaucuauuauaaaucacaaauucugcaacuuaagcgacgcacacaagaaaaacuuauacgaucaugcacucauguccauaauaucaacauuucauuuaucaauacccaauuuuaaccaauacgaagccauguccugcgacuucaacggaggcaaaauaucaguacaauacaacuuaucacaugcauaugcaguagacgcagcaaaccauuguggaacaauagcaaacggagucuuacaaacauucaugcguauggcuuggggaggauccuauauagcauuagacucaggaaaaggcucaugggacugcauaaugacuucuuaccaauauuuaauaauacaaaacaccacaugggaagaccacugccaauucucuagaccuucaccaaucggauauuuaggacuccucucccaaagaacaagagacaucuacauuucaagaagauuauuaggcacauucacauggacauuaucagacucagaaggaaacgaaacaccaggcggauacugcuuaaccagauggaugcucauagaagcagaacuaaaaugcuuuggaaauacagccguugcuaaaugcaacgaaaaacacgacgaagaauuuugugacaugcuaagacucuucgacuucaacaaacaagccauaagaagacuaaaaacagaagcucaaauguccauucaauuaaucaacaaagcaguaaaugcacuaauaaacgaucaacuuauaaugaaaaaccaccuaagagacauaauggguauucccuacugcaacuacucaaaauacugguaccuaaaccacacuguaacaggaaaaacaucucuaccaagauguuggcucguaucaaacggcucuuaucuaaaugaaacccacuucucagaugacauagaacaacaagcagauaauaugaucaccgaacuacuacaaaaagaauauaucgacagacaaggaaaaacaccccuaggucuaguagaccucuucgucuuuucaacuucauuuuaucuaauaucaauauuccuccaucuaguaaaaauaccaacacacagacacguaauaggaaaaccauguccaaaaccacacagacuaaaccauaugggaauauguucaugcggacucuauaaacaucccggaguaccaguaaaauggaaaagauaa

SEQ ID NO: 1900 - RNA, 1473 nt, Artificial Sequence
  derived and/or modified protein sequence (opt6) from LASV(LASV063-NIG-2009;Clade II)__AIT17620__GPC
augggacaaauuauaacauucuuucaagaaguuccacauguaauagaagaaguuaugaacauaguauuaauagcccuaucacuccuagcuauacuaaaagguauauauaacguagcaacauguggauuauuuggcuuaguuucauucuuacuacuaugcggaagaucuugcucaacaacauacaaaggcguauacgaauuacaaacacuagaacuagacauggcaucacucaacaugacaaugccacuaucaugcaccaaaaauaacucacaccauuacaucauggucggcaaugaaaccggacuagaacuaacacuaacuaauacauccauaauaucacacaaauucugcaaccuaucagacgcacacaaaaaaaacuuauacgaucaugcauuaaugucaauuaucucaacauuccaccuaucaauacccaacuuuaaucaauacgaagcaaugucuugcgacuucaacggaggaaaaauaucaguacaauacaaccuuagucaugccuaugcaauagaugccgcaaaccauugcggcacagucgccaacggaguacuacaaacauuuaugagaauggcauggggcggaucauacauagcauuagauucagguaaaggaucuugggacuguauaaugaccucauaucaauacuuaauaauacaaaauacaacaugggaagaccacugccaauucucccgaccaucuccaauaggauacuuaggucuacuaagccaaagaacaagagauauauacauauccagaagacuauuaggcacauuuacauggacccuaucagacucagaaggaaacgaaacacccggaggauacugccuuacccgauggaugcuaauagaagcagaacuaaaaugcuucggcaacacagccguagcaaaaugcaaugaaaaacaugacgaagaauucugcgacaugcuccgucuauucgacuucaacaaacaagcaauaagaagacuaaaagcugaagcacaaaugucaauacaauuaauaaacaaagcaguaaacgcacuaauaaacgaccaacuaauaaugaaaaaucacuuaagagauauaaugggaauaccauauugcaacuacucaaaauauugguaccucaaccacacagucacaggaaaaacaucacuaccaagauguuggcuaguuucaaauggaucauaucuaaacgaaacacacuucucagacgacauagaacaacaagcugacaacaugauaacagaauuacuucaaaaagaauacauggaucgacaaggaaaaacaccacuaggacuuguagauuuauucguauuuucaaccucauuuuaccuaauaucuaucuucuuacaucuuguaaaaauuccaacucaccgacacgucauaggaaaaccuugcccuaaaccacaccgacuaaaucacaugggaauaugcaguugcggacuauacaaacacccuggcguaccaguaaaauggaaacgauaa

SEQ ID NO: 1901 - RNA, 1473 nt, Artificial Sequence
  derived and/or modified protein sequence (opt6) from LASV(LASV1000-NIG-2009;Clade II)__AIT17782__GPC
augggacaaauaauaacauucuuccaagaaguaccucacguaaucgaagaagucaugaauauuguccuaauagcacucucauuacuugcaauacuaaaaggaauauauaacguugcaacaugcggucuauucggcuuaguaucuuuuuuacuacuauguggcagaucuugcuccacaacguacaaaggaguauaugaacuacaaacauuagaauuagacauggcaucacuaaauaugacaaugccauuaucaugcacuaaaaacaacucacaccacuacauuauggucggcaacgaaacaggauuagaacuaacccuaacaaacacaucaauaauaaaccauaaauucuguaaucuaucagaugcacacaaaaaaaacuuauacgaccacgcuuuaaugucaauuauaucuacauuccauuuaucaauacccaauuuuaaccaauacgaagcaaugucaugcgacuucaacggaggaaaaaucucaguacaauauaauuuaucccacaccuacgcaguagaugccgcaaaccauugcggcacaauagcaaauggaguccuacaaacauuuaugcgaauggcaugggguggcucauacauagcccuugacucaggaaaaggaucaugggauugcauaaugacauccuaccaauauuuaauaauacaaaacacaacuugggaagaucacugccaauuuucaagacccaguccaaucggauacuuaggacuauuaucacaaagaacacgagauauauacaucagcagaagauuauuaggaacauucacauggacacuaucagauucagaaggcaaugaaaccccaggaggcuacugccuaacaagauggaugcucaucgaagcagaauuaaaaugcuuuggaaauacagcaguagcaaaauguaacgaaaaacacgacgaagaauucugcgacaugcuacgauuauuugacuucaacaaacaagccauaaaaagacuaaaaacagaagcacaaaugucaauacaauuaauaaacaaagccguaaacgcacuaaucaacgaucaauuaaucaugaaaaaucaccuuagagacauaaugggaaucccauauugcaacuacucaaaauacugguacuuaaaucacaccguaacuggaaaaacaucauuaccaagaugcuggcuaguaucaaauggcucauaccucaaugaaacccacuucucagacgacaucgaacaacaagcugacaacaugauaacugaacuauuacaaaaagaauacauugaccgacaaggaaaaacaccauuaggauuaguagaccucuuuguauuuucaacaucauucuaccuaaucucaauauucuuacauuuaguaaaaauuccaacacacagacacguaguaggaaaaccaugcccuaaaccccacagauuaaaccacaugggaauauguagcugcgguuuauacaaacacccaggaguaccaguuaaauggaaaagauaa

SEQ ID NO: 1902 - RNA, 1473 nt, Artificial Sequence
  derived and/or modified protein sequence (opt6) from LASV(LASV1008-NIG-2009;Clade II)__AIT17786__GPC
augggacaaauaauaaccuucuuccaagaagucccacacguaauagaagaaguaaugaauauaguacuaauagcacucucauuacuagcaauccucaaaggaaucuacaacguagcaaccugcggauuauuuggauuaguauccuucuuacuuuuaugcgguagauccuguuccacgacauacaaaggcguauacgaauuacaaacacuagaacuugacauggcaucacucaacaugacaaugcccuuaucaugcacuaaaaacaacucucaccacuacauaaugguaggaaacgaaacgggccuagaauuaacauuaacuaauacaucaauaauaaaccacaaauucuguaaucuaucagacgcacauaagaaaaaccuauaugaccaugcacuaauguccauaauuucuacauuccauuuaucaauacccaacuucaaccaauacgaagccaugucaugugacuucaacggaggaaaaauaucaguacaauacaacuuaucccacgcauaugcaauagacgcagccgaucacugcgguaccauagccaacggaguauuacaaacauuuaugagaauggccuggggagguucauacauagcacuagacucaggcaaaggauccugggauugcaucaugaccaguuaccaauaccuaauaauacaaaacacaaccugggaagaccauugccaauuuucacgaccauccccaauaggcuacuuaggauuacuaucacaaagaacucgagauauauauauauccagaagauuacuuggaacauuuacauggacauuaucagacuccgaaggaaacgaaacaccaggaggauacugccuuacacgauggauguuaauagaagcagaauuaaaauguuucggaaacacagcaguagcaaaaugcaaugaaaaacacgaugaagaauuuugcgauauguuaagacuauucgauuucaacaaacaagcuauuagacgucuaaaaacagaagcacaaaugucaauacaacuaauaaacaaagcaguuaacgcacuaauuaacgaccaacucauaaugaaaaaccacuuaagagacaucauggguauacccuacugcaacuacucaaaauauugguacuuaaaccauacuguaaccggcaaaacaucauuaccucgaugcugguuagucucaaacgguucauaccuaaacgaaacacauuucucagaugacauagaacaacaagccgacaauaugaucacagaauuauuacaaaaagaauauauggauagacaaggaaaaacaccacuaggacucguagaucuuuucguauuuucaacaucauucuaccucauaucaauauuucuacacuuaguaaaaauacccacacaccgccauauaacagguaaaccauguccaaaaccacacagacuaaaucauauggguauauguucaugcggauuauacaaacacccaggaguacccguaaaauggaaaagauaa

SEQ ID NO: 1903 - RNA, 1473 nt, Artificial Sequence
  derived and/or modified protein sequence (opt6) from LASV(LASV1011-NIG-2009;Clade II)__AIT17790__GPC
augggacaaaucauaacauucuuccaagaaguaccacaugucauagaagaaguaaugaauauagucuuaauagcacuaucauuacuagcaauauuaaaaggaaucuacaacguagccacaugcggauuauucgguuuaguauccuuuuuacuacuaugcggacgaucaugcagcacaacauauaaagguguauacgaauuacaaacauuagaauuagacauggccagcuuaaacaugacaaugccacuaucaugcacaaaaaacaacucacaccacuacauaaugguaggaaacgaaacaggccuagaacuaacauuaaccaacacaucaauaauaaaccacaaauucugcaaucuaucagaugcacacaaaaaaaaccuauaugaucacgccuuaaugagcauaauaucaacauuucaccuaucaaucccaaacuucaaccaauacgaagccauguccugcgacuucaacggaggaaaaauaucuguccaauauaaccuaucccacacauacgccguagacgcagcaaaucacugcggaacaauagcaaauggaguacuacaaacauuuaugagaauggcauggggcggcucauacauagcacuagauuccggcaaaggcucaugggacugcauaaugacaucuuaucaauaccuaauaauacaaaacacaacaugggaagaccauugccaauucucacgaccaucaccaauaggcuaucuaggacuacuaagucaaagaaccagagacaucuacauaucccgacgacuacuagguacauucacauggacacuaucugauucagaaggcaacgaaacacccggaggauacugccuaacaagauggaugcuuauagaagcagaacucaaauguuucggaaacacagcagucgcaaaaugcaacgaaaaacacgacgaagaauuuugcgauauguuaagacuauucgauuuuaacaaacaagcaauacgaagauuaaaaacagaagcacaaaugucaauacaauuaaucaacaaagcaguuaacgccuuaauaaacgaccaacuaauaaugaaaaaucacuuacgagacauaaugggaauucccuauugcaacuacaguaaauauugguacuuaaaccacacaguaaccggaaaaacaucuuuaccaagauguugguuaguuuccaacggauccuaccuaaaugaaacacauuuuucugacgacauagaacaacaagcagacaacaugauaacagaauuauuacaaaaagaguacauggaucgacaaggaaaaacaccauuaggacuaguugacuuauuuguauuuuccacaucauucuauuuaauaucaauauuccuacaccuaguaaaaauacccacacacagacacauaacaggaaaaccaugcccuaaaccacacagacuaaaccacauggguauaugcuccugcggauuauacaaacauccaggcguaccuguaaaauggaaaagauaa

SEQ ID NO: 1904 - RNA, 1473 nt, Artificial Sequence
  derived and/or modified protein sequence (opt6) from LASV(LASV1016-NIG-2009;Clade II)__AIT17798__GPC
augggacaaauaauaacauuuuuccaagaaguaccacacguaauagaagaaguaaugaacauagucuuaauugcauuaagcuuacuagccauauuaaaaggaauauauaacguagccacaugcggacuauuugguuuaguuuccuucuuacuauuaugcggaagaucauguuccacuacuuacaaaggagucuacgaauuacaaacacuagaacuagauauggcuucauuaaacaugacaaugccacuaucauguacaaaaaacaauucacaccacuacauaaugguaggaaacgaaaccggccuagaacuaacauuaacaaacacuucuauaaucaaccacaaauucuguaaccuaucagaugcucacaaaaaaaaccuuuacgaucacgcacuaaugucaauaaucuccacauuccaccuaucaauacccaacuuuaaucaauacgaagcgaugucuugcgauuucaacggaggaaaaauaucaguccaauacaacuuaucacacacauacgcaguagacgcagcaaaccacugcgguacaauagccaacggaguucuacaaaccuuuaugcguauggcauggggcggaucauacaucgcauuagacucaggaaaaggaucaugggacugcauaaugacaucauaucaauaucuaauaauucaaaauacaaccugggaagaccacugccaauucucaagaccauccccaauaggcuaucuaggacuacucucucaacgcacaagagacauauacauaucaagaagacuucuaggaacuuucacauggacacuaucagauucugaaggaaacgaaacaccaggaggauauugccucacacgauggaugcuaauagaagcagaacuaaaaugcuuuggaaauacagcugucgcaaaaugcaaugaaaaacacgacgaagaauucugcgauaugcuucgacucuucgauuuuaacaaacaagcaauaaugcgauuaaaaacagaagcccaaauguccauacaacucauaaauaaagcaguaaacgcacuaauaaacgaccaauuaaucaugaaaaaucaucuaagggauauaauggguauaccauacugcaacuacucaaaauacugguaccuaaaccacacaguaaccggaaaaacaucacuacccagaugcuggcuagucucuaacggaagcuaucuaaacgaaacacacuucucugaugauauagaacaacaagcagacaacaugauaaccgaaaugcuucaaaaagaauaucucgacagacaaggaaaaacaccacucggauuagucgaucuauuugucuuuucaacaucauucuacuuaauauccauauuuuugcaccucguaaaaauaccaacacaucgacauauaauaggaaaacccugcccaaaaccccacagauuaaaccacaugggcauaugcucauguggcuuauacaaacauccaggaguccccgucaaauggaaacguuaa

SEQ ID NO: 1905 - RNA, 1473 nt, Artificial Sequence
  derived and/or modified protein sequence (opt6) from LASV(LASV221-NIG-2010;Clade II)__AIT17624__GPC
augggacaaaucauaaccuuuuuccaagaaguaccacacguaauugaagaaguaaugaauauaguacucaucgcccuaucacuacuagcaauacuaaaaggaauauacaacgucgcaacaugcggauuauuuggacuaguaucuuuucuauuacuaugcggcagaucaugcucaacaacauacaaaggcgucuacgaauuacaaacacuagaacuagauauggcaucucucaacaugacaaugccacuaucaugcacaaaaaauaacucccaccacuacauaaugguaggaaacgaaacuggacuagaacuaacucuaacaaacacuucaauuauaaaccacaaauucugcaaccuaucagacgcacacaaaaaaaaccuauaugaccaugcccuuauguccauaauaucaacauuccaccuaucaauaccuaacuuuaaccaauacgaagcaaugucuugcgacuucaauggagguaaaauaucaguacaauauaaccuaucacacacuuaugcaauagaugccgcaaaccacugcggaacuauagcaaacgguguauuacaaacauucaugagaauggcauggggcggaucauauaucgcacuagauucaggaaaaggcucuugggacuguaucaugacaucuuaccaauaccuaauaauacaaaacaccacaugggaagaccacugucaauucucacgacccucacccauaggauaccuuggacuacuaagccaaagaacacgcgauauauacauaucaagacgucuacugggaacauuuacauggacacuaagugauucagaaggaaacgaaacaccaggcggauacugcuuaacuagguggaugcuaauagaagcagaacuaaaauguuuuggcaauacagcaguagcaaaaugcaacgaaaaacacgacgaagaauuuugcgacaugcuaagauuauucgacuucaauaaacaagcaauacgaagauuaaaaacagaagcacaaaugucuauucaacuaaucaauaaagcaguaaaugcacuaauaaacgaccaacucauaaugaaaaaccauuuaagagacauaaugggaauaccauacugcaacuauuccaaauacugguacuuaaaccacacaguaaccggaaaaacaucacucccaagauguugguuaguaucaaacggauccuaccuuaaugaaacacauuuuucagacgauauagaacaacaagcagauaacaugauaacagaaaugcuccaaaaagaauacauggauagacaaggaaaaacaccacucggacuagucgaucuuuucguauucucuacaucauucuacuuaauaucaaucuucuuacaucuugucaaaaucccuacucaccgacacguuaucggaaaacccugcccaaaaccacaucgauuaaaccacaugggaauaugcuccugcggacuauacaaacacccaggaguaccagucaaauggaaaagauaa

SEQ ID NO: 1906 - RNA, 1473 nt, Artificial Sequence
  derived and/or modified protein sequence (opt6) from LASV(LASV224-NIG-2010;Clade II)__AIT17626__GPC
augggacaaaucauaacauuuuuccaagaaguaccacauguaauagaagaaguaaugaauauaguacucauagcucucucauuacuagcaauacuaaaaggcgucuacaacguugcaacaugcggccuauucggccucguaucauuccuauuauuaugcggaagauccugcucaacaacauacaaaggcguauaugaacuacaaacacuugaacuagacauggcuucacucaacaugaccaugccauuauccugcaccaaaaauaacucacaccauuacauuaugguugguaaugaaacaggacuagaacuaacauuaacaaacacaucaaucauacaacacaaauucuguaaucuaucugacgcacacaagaaaaaccuauacgaccacgcacuuaugucaauaauaucaacauuccaucuaucaauacccaacuucaaccaauacgaagcaaugucuugugauuuuaacggaggaaaaauaacaguacaauauaauuuaucacacucauacgccauagacgcugcaaaucauuguggaacaauagcaaacggaguccuacaaacauucaugcguauggcauggggaggaucauauauagcccuagacuccggcaaaggaucaugggacugcauaaugacaucuuaccaauaccuaauuauacaaaacacuacaugggaagaccauugucaauucucccgaccaagccccaucggauacuuaggacuauuaucacaaagaacaagagauauuuacauuucaagaagauuacuaggaacauucacauggacacuaucagacucugaaggcaacgaaacaccaggcggauacugccuaacaagauggaugcucauagaagcagaacuaaaaugcuucggaaacacagccguagcaaaaugcaacgaaaaacacgacgaagaauuuugcgacaugcuaagacuauucgacuucaacaaacaagcaauuagacgauuaaaaaccgaagcucaaaugucaauacaacuaauaaacaaagcaguaaaugcauuaauaaacgaccaauuaauaaugaaaaaucaucuaagagauauaauggguauaccauauugcaauuauucaaaauacugguaucuuaaccauacuguaacaggacguaccucccuaccaagaugcuggcuaguaucuaauggaucauaccuaaacgaaacacacuucucugacgacauagaacaacaagcagacaacaugaucacagaacuacuacaaaaagaauacauggacagacaaggaaaaaccccacuaggucuaguagaccuauucguauucucaaccuccuucuaccucauaucaaucuuuuuacaucuaguaaaaauacccacacacagacacauaauaggcaaaccaugucccaaaccacacagauuaaaccacaugggaguaugcuccugugguuuauauaaacaucccggaguuccaguaaaauggaaaagauaa

SEQ ID NO: 1907 - RNA, 1473 nt, Artificial Sequence
  derived and/or modified protein sequence (opt6) from LASV(LASV225-NIG-2010;Clade II)__AIT17630__GPC
augggucaaauaaucaccuucuuccaagaaguaccacauguuauagaagaaguaaugaauauaguucuaauagcccuaucacuacuagccauacuaaaaggaaucuacaacguagccacauguggauuauucggauuacucuccuuccuccuacuaugcggacgaucuugcucaaccacauauaaaggaguuuaugaauuacaaacacuagaacuugacauggcaucauuaaacaugacaaugccucuaucaugcaccaaaaacaacagccaccacuacauaauggugggaaaugaaacaggauuagaacuaacacuaacaaauacaucaauaauaaaucauaaauucugcaacuuauccgaugcacacaagaaaaacuuauacgaccaugcucuaaugucaaucauaucaaccuuccaucuaucaauaccuaacuuuaaccaauacgaagcaaugagcugugauuucaauggagguaaaauaucaguucaauacaauuuaucccaugccuacgcaguagacgcugcagaacacuguggaacaauagcaaacggaguacuacaaacauuuaugagaauggcauggggaggcagcuauauagcacucgacucaggaaaaggaagcugggacugcguaaugacuagcuaccaauaccucaucauacaaaauaccuccugggaagaccacugccaauucucacgcccaucaccaauaggauaccuaggacuccuaucccaaagaacaagagacaucuauaucuccagaagacuacuaggaacauucacuuggacccuaucagauuccgaaggaaacgaaacaccaggaggauacugccuaacaagauggauguuaauagaagcagaacuaaaaugcuuuggcaacacagcaguagcaaaaugcaacgaaaaacacgacgaagaauuuugcgacaugcuaagacuauucgauuucaauaaacaagcaauaagaagacuaaaaacagaagcacaaauguccauacagcuaauaaauaaagcaguaaacgcacuaaucaacgaccaacuaaucaugaaaaaucacuuaagagauauaauggguauuccauacugcaacuauucaaaauauugguaccuaaaucacacagucacuggaaaaacaucacucccaagauguuggcuaguaucaaacggauccuacuuaaaugaaacccauuucuccgaugacauagaacaacaagcagacaacaugaucacagaacuacuacaaaaagaauauauagauagacaaggaaaaacaccauuaggccuaguagacuuauucguuuucucuaccucauucuaccuaauauccauuuuccuacaccuagucaaaauaccaacacacagacauguaaucggaaaaccauguccaaaaccacacagauuaaaccacaugggaauauguucaugcggucuauacaaacacccuggaguaccaguaaaauggaaaagauaa

SEQ ID NO: 1908 - RNA, 1473 nt, Artificial Sequence
  derived and/or modified protein sequence (opt6) from LASV(LASV229-NIG-2010;Clade II)__AIT17634__GPC
augggccaaauaaucacuuuuuuccaagaaguaccccacgucaucgaagaaguaaugaauauaguccuaauagcauuaucccucuuagcaauauuaaaaggcauuuauaacguagccacaugcggccuguucggacuaguaucuuuccuacuccuauguggcagaucaugcucaacaauauacaaagacguauaugaacuacaaacacuagaacucgacauggcaucacuaaauaugacaaugccucuuucaugcacaaaaaacaauucccaucacuauaucaugguaggaaaugaaaccggauuagaauuaacacuaacaaacacaucaauaauaaaucacaaauucugcaacuuaagugacgcacacaaaaaaaaucuauacgaucaugcacuaaugucaauaauaucaacauuccaucugucaauacccaacuucaaucaauacgaagcaaugucaugcgacuucaauggaggaaaaauaucaguacaauauaaccuaucacacaccuacgcaauagacgcagcaaaucauugcggaacuauagcaaacggaguacuacaaacauucaugcgaauggcauggggagggucauauauagcauuagacucaggaaaaggaucaugggacuguaucaugacuucauaccaauaucucauaauacaaaacacaacaugggaagaucacugccaauucucaagaccaucucccauaggauauuuaggcuuauuaucacagcgaaccagagacauauacauaucaagacgccuacucggaacuuucacauggacacucucagacuccgaaggaaaugaaacaccaggaggauauugcuuaacacgauggaugcuaauagaagcagaacuuaaaugcuucggcaacacagcugucgcaaaaugcaacgaaaaacaugacgaagaauucugcgauaugcuuagacucuucgacuucaacaaacaagcaauaagaagacucaaaacagaagcccaaaugucuauacaacuaauaaacaaagccgucaacgcacuaauaaacgaccaacuaauaaugaaaaaccauuuacgugacauaaugggcauaccauauuguaacuacucccgauauugguaccuaaaccauacaguaacaggaagaacuucacucccaagaugcugguuaguaucaaacggaucauaccuuaaugaaacucauuucagcgaugacauagaacaacaagccgauaacaugauaacagaauuacuacaaaaagaauacauggaccgucaaggaaaaacaccauuaggacuaguagaccuauucguuuuuaguacaucuuucuaucuaauauccauauuccuacacuuaguaaaaaucccaacacaccgacauguaauaggaaaacccuguccaaaaccacacagacuaaaccacaugggaauaugcucaugcggacuauauaaucaccccggaguaccagucaaauggaaaagauaa

SEQ ID NO: 1909 - RNA, 1473 nt, Artificial Sequence
  derived and/or modified protein sequence (opt6) from LASV(LASV237-NIG-2010;Clade II)__AIT17638__GPC
augggucaaaucauaaccuucuuucaagaaguuccacaugucaucgaagaaguaaugaacauaguacuaauagcauuauccuuacuagcaauauuaaaaggaaucuacaacguagcaacuugcggcuuauucggacuagucuccuucuuacugcuauguggcagaucauguucaacaacuuacaaaggagucuacgaacuacaaacauuagaacuagacauggcaaguuuaaacaugacaaugccacuaucuugcaccaaaaauaauucccaucacuacauaauggucggcaacgaaacaggacuagaacucacacuaacaaauacaucaauaauuaaccacaaauuuugcaaccucucagaugcacacaaaaaagaccuauacgaccacgcacuaauguccauaauaucaacauuucauuuaucuauaccaaacuucaaccaauacgaagcaaugucuugcgauuucaauggaggaaaaauaucaguacaauacaaccuaucccacacauaugccguagacgcagcuaaccauugcggaacaauagcaaauggaguacuacaaacauucaugagaauggcauggggaggaucauacaucgcacucgacuccggaaaaggaucuugggacugcaucaugaccucuuaccaauaccuaauaauucaaaauacaaccugggaagaccauugccaauucucaagacccucaccaauaggauaucuaggacuacuaucacaaagaaccagagacauauacauaucccgacgacuacuaggaacauucacauggacauuaucagauucagaaggaaacgaaacaccaggaggcuauugcuuaaccagauggaugcuaauagaagcagaacucaaaugcuucggaaacacagcaguugcaaaaugcaacgaaaaacacgacgaagaauuuugugacauguuaagauuauuugacuucaacaaacaagcaauacgaagauuaaaaacagaagcacaaaugucaauacaacuaaucaacaaagcaguaaacgcacuaauaaacgaccaauuaauaaugaaaaaccauuuacgagauaucaugggcauaccuuacugcaauuacucaaaauacugguaccuaaaccacacaguaacaggaaaaaccucccuaccaagauguugguuaguaucaaacggcuccuauuuaaaugaaacacacuucucagaugacauugaacaacaagcagacaacaugauaacagaacuacuucaaaaagaauacauggacagacaagguaaaacaccacucggucuaguagacuuauucguauuuagcaccucguucuaccucauaucaauauuccuacaccuuauaaaaaucccaacacacagacauauaacaggaaaaccuugcccaaaaccacacagauuaaaccauauggguaucugcucauguggacuauacaaacacccaggcguuccaguaaaauggaaacguuaa

SEQ ID NO: 1910 - RNA, 1473 nt, Artificial Sequence
  derived and/or modified protein sequence (opt6) from LASV(LASV239-NIG-2010;Clade II)__AIT17642__GPC
augggacaaauaauaacauucuuccaagaaguaccacacguaauagaagaaguaaugaauauaguacuaauagccuuaucacuauuagcaauacuaaaaggaguauacaauguagcaaccuguggauuauucggacuagucucauuccuacuacuauguggaagaucuugcucaaccacauauaaaggaguauaugaauuacaaacccucgaauuagacauggcaucucuaaauaugaccaugccacucuccugcacaaaaaacaacucccaucauuacauuaugguaggcaacgacacaggauuagaacuaacacuaaccaacaccuccauaaucaaucacaaauucugcaacuuaucagacgcucacaaaaaaaaccuauacgaccaugcacuuaugucaauaauuucuacauuucaccuauccauccccaacuuuaaucaauacgaagccaugucaugcgacuuuaacggaggcaaaaucucaguacaauacaacuuaagccacgcauaugccguagaugcagcaagccauugugguaccaucgcaaacggaguccuccaaacauuuaugagaauggcuuggggaggauccuacauagcccucgauucuggaaaaggaucuugggacugcauaaugacgaguuaucaauaccuaauaauacaaaacacuacaugggaagaccacugccaauuuagcagaccaucaccaaucggauaucuaggacuauuaucacaacgaaccagagacauauauauaucacgacgccuacuaggaacauucacauggacacuuucagauucagaaggaaacgaaacaccuggaggauacugcuuaaccagauggaugcucauugaagcagaacuaaaaugcuuuggaaauacagcuguagcaaaaugcaaugaaaaacaugacgaagaauucugcgauaugcuaagacuauucgacuucaacaaacaagcaauacgucgacuaaaaacagaagcacaaauguccauucaacucauuaauaaagcaguaaacgcacuaauaaacgaucaacuaauaaugaaaaaccacuuaagagauauaauggguauaccauauugcaacuauucaaaauacugguacuuaaaucacacaguaacagguaaaacaucacuaccaagaugcuggcuaguaucaaacggaucuuaccuaaaugaaacgcacuucucagaugacauagaacaacaagcagacaacaugauaacagaacuauuacaaaaagaauauauggaccgacaaggaaaaacaccucuaggacuaguagaucucuucgucuucucaaccucauuuuauuuaauaucaauuuuucuacauuuaguaaaaauacccacacauagacacaucauaggaaaaccaugucccaaaccucaucgacucaaccacaugggaauaugcuccugcggcuuauacaaacacccaggcguaccaguuaaauggaaaagauaa

SEQ ID NO: 1911 - RNA, 1473 nt, Artificial Sequence
  derived and/or modified protein sequence (opt6) from LASV(LASV241-NIG-2011;Clade II)__AIT17646__GPC
augggacaaauaauaacauuuuuccaagaaguaccacauguaauagaagaaguaaugaacauaguacuaauagcacucucucuccuagccauauuaaaaggaauauacaacguagccacaugcggacuauuuggacuuguaucauuuuuauuauuaugcggcagaucaugcucaacaacauacaaaggaguauaugaauuacaaacacuagaacuugauauggcaucacucaauaugaccaugccacuaucuugcacaaaaaacaacucacaccacuacauaaugguaggaaaugaaacaggacucgaauuaacccuaacaaacacaagcauaaucaaccacaaauucugcaacuuaucagacgcacacaaaaaaaaucuuuacgaccacgcauuaaugucaaucauaucaaccuuucaccuaucaauaccaaacuuuaaccaauaugaagcuaugucaugcgacuucaauggcggcaaaauuucaguucaauauaacuuaucacaugccuaugcagucgacgcugcaagccacuguggaacaguagcaaacggcguuuuacaaacauuuaugagaauggccuggggaggcucauauauagcacuugauuccggcaaaggaucuugggauugcauaaugacauccuaucaauaccuaauaauacaaaacacaacaugggaagaccacugccaauucagcagaccuuccccaauaggauaccuaggacuacuaagucaaagaacaagagacauauacaucucaagaagauuauuaggcaccuuuacauggacacuaucagauuccgaagguaacgaaacaccaggaggauacugucucacacgauggaugcucauugaagcagaacuaaaaugcuuuggcaacacagcagucgcaaaauguaacgaaaaacacgacgaagaauucugugacaugcuaagauuauuugacuucaauaaacaagcaauaagaagauuaaaaacagaagcacaaaugucaauacaacuaauaaauaaagcaguuaacgcauuaauaaaugaccaauuaauaaugaaaaaucaucuaagagauauaauggguauaccauacugcaauuauucaaaauacugguaucuaaaucauacaguaacaggcaaaaccucacuuccuagaugcuggcucguaucaaacggcagcuaccuuaaugaaacacacuucucagacgacaucgaacaacaagcagauaacaugauaacagaacuccuacaaaaagaauauauggacagacaaggaaaaacaccacuaggacuaguagacuuauuugucuucucgacaucguucuaccuaauaagcauauuccuccaucuaguaaaaauaccaacacacagacaugucauaggaaaaccauguccuaaaccacauagacucaaucacaugggcauuugcucaugcggcuuauacaaacacccaggcguaccaguaaaauggaaaagauaa

SEQ ID NO: 1912 - RNA, 1473 nt, Artificial Sequence
  derived and/or modified protein sequence (opt6) from LASV(LASV242-NIG-2010;Clade II)__AIT17650__GPC
augggacaaauaauaacauuuuuccaagaaguaccacacguaaucgaagaaguaaugaacauaguacuaauagcacuaucauuauuagccauacuaaaaggaauuuacaacguagcaaccugcggacuauucggauuagucagcuuccuacuauuauguggaagaucgugcucaacaacauacaaaggaguauacgaacuccaaacacuagaacuagauauggcaucacuaaacaugacaaugccauuaucauguaccaaaaauaauucacaccacuauauaaugguaggaaaugaaacaggacuagaauuaacauuaacaaacauaucaauaauaaaucacaaauucugcaaccucucagacgcccacaagaaaaauuuauacgaccacgcacucaugucuauuauaucuacauuccaccuaucaauucccaacuuuaaccaauacgaagccaugucuugcgauuucaauggaggcaaaauauccguacaauauaaucuaucacacacauacgcagucgacgccgcaaaccacugcggaacaauagcaaacggaguacuacaaacauuuaugagaauggcuuggggaggauccuauauagcacucgacuccggaaaaggcucaugggacugcaucaugacaucauaccaauaccuaauaauacaaaauacaacaugggaagaccauugccaauucuccagaccaucaccaauaggauaccuaggauuacuaagccaaagaacaagagacauauauauuucaagaagacuacuagguaccuucacguggacacuaucagauagugaaggaaaugaaacacccggaggcuacugccuaacaagauggaugcuaauagaagcagaacuaaaaugcuucggaaacacagcaguagccaaauguaacgaaaaacacgacgaagaauuuugugauauguuacgacuuuucgacuucaacaaacaagcaauacgaagacuaaaagcagaagcacaaauguccauacaacucaucaacaaagcaguaaaugcacuuauaaaugaccaauuaauaaugaaaaaucaucuaagagacauaauggguauuccauacugcaacuacagcaaauacugguauuuaaaucauaccguaaccggaagaacaucacuaccaagaugcuggcucguauccaauggaucauaccuaaaugaaacacacuucucagacgauauagaacaacaagcagacaacaugauaacagaauuacuacaaaaagaauacaucgaucgccaaggaaaaacaccacugggucuaguagaccuuuucguauucucuacaucauuuuaucuaauauccauauucuuacacuuagucaaaauccccacacaccgacacauaauaggaaaaccauguccaaaaccacacagauuaaaccauaugggaauaugcuccugcggauuauacaaacauccaggaguaccaguaaaauggaaaagauga

SEQ ID NO: 1913 - RNA, 1473 nt, Artificial Sequence
  derived and/or modified protein sequence (opt6) from LASV(LASV246-NIG-2010;Clade II)__AIT17658__GPC
augggccaaaucauaacauuuuuccaagaaguaccacacgucauagaagaaguaaugaauauaguucuaauagcauuaucauuacuagcaauauuaaaaggaguauacaacguugccaccugcggacuauucggacuaguaagcuuccuacuacuaugcggaagaucuuguucaauaacauacaaaggagucuacgaacuccaaacacuagaacuagauauggcaaaccuaaauaugaccaugccacuaucauguacaaaaaacaacucucaucauuauauaaugguuggaaacgaaacaggacuagaacuaacacuaacaaacaccucaauaauaaaccacaaauuuugcaaccuaucagacgcacacaaaaaaaacuuauacgaccacgcacuaaugucaauaauauccacauuccaccuaucaauaccaaacuuuaaucaauacgaagcaaugucaugcgacuucaacggcggaaaaauaucuguccaauacaaccuaucacauacauacgcaggagacgcagcagaccauugugguacaauagcaaacggaguauuacaaacauucaugagaauggcauggggaggaucauacauugcacucgacucaggaaaaggcucaugggacugcaucaugacauccuaccaauacuuaauuauucaaaacaccacaugggaagaccacugccaauucaguagacccuccccaaugggauaccuaggacucuuaucucaaagaacccgagacauuuauauaucaagaagacuacucggaacauucaccuggacauuauccgacucagaaggaaacgaaacccccggagguuacugcuuaaccagauggauguuaauagaagcagaauuaaaauguuuuggcaacacagcaguagcaaaauguaacgaaaaacaugaugaagaauucugcgacaugcucagacuauucgacuucaauaaacaagccauaagaagacuaaaaacagaagcacaaaugucaauacaacuaauaaauaaagccguaaacgcacucauaaacgaucaacuaauaaugaaaaaccacuuaagagacauaauggguauaccauauugcaacuacucaaaauauugguaucuaaaccauacaauaacaggaaaaacaucuuuaccacgaugcugguuaguaucaaacggaucauauuuaaacgaaacacacuuuucagaugacauagaacaacaagcagauaacaugauaaccgaauuacuucaaaaagaauacauagauagacaagguaaaacaccauuaggucuaguagaccuauucguauucucaaccucuuuuuauuuaaucucaauauuccuucaccucgucaaaaucccaacacauagacacauaacaggaaaaccaugcccaaaaccacaccgauuaaaucauaugggcaucugcucauguggccuauacaaacacccaggaguaccaguacguuggaaaagauaa

SEQ ID NO: 1914 - RNA, 1473 nt, Artificial Sequence
  derived and/or modified protein sequence (opt6) from LASV(LASV251-NIG-2010;Clade II)__AIT17666__GPC
augggacaaauaguaacauucuuccaagaaguaccucauguaauagaagaaguaaugaacauaguccuaauagcauuaucuuuacuagcaauacuuaaaggaaucuacaacguagcaacaugcggauuauuuggacuaguaucauuccuauuauuaugcgguagaucuugcuccacaacauauaaaggaguauacgaacuucaaacuuuagaauuagacauggcaucuuuaaacaugacuaugccauuaucaugcacaaaaaacaacucacaccacuauauaaugguaggaaacgaaaccggacuagaacuuacauuaacaaacacaucaauaauaaaccacaaauucugcaacuuaucagaugcacacaaaaaaaauuuauacgaccaugcacuaaugucaauaauaucaacauuccaccuaucaauaccaaacuuuaaccaauacgaagccaugucaugcgacuuuaauggcggaaaaauuucuguacaauacaaccuaucucacacauacgcuguagacgccgcaaaccacugcggaacaauagcaaacggcguauuacaaacauucaugcgaauggccuggggaggaucauacauagcauuagacucaggaaaaggauccugggauuguaucaugacaucauaccaauaccucauaauacaaaacaccacaugggaagaccauugccaauucucuagaccaucaccuauuggauauuuaggauuauuaucacaaagaacaagagacauauacauauccagaagacuacuuggaaccuucacauggacauuaucagacuccgaagguaaugaaaccccaggaggauauugcuuaacacgauggaugcucaucgaagcugagcuaaaauguuucggaaauacagcaguagcaaaaugcaaugaaaaacaugacgaagaauucugugacauguuaagacuauucgacuucaacaaacaagcaauaagacgacucaaaaccgaagcucaaaugucuauacaacuaauaaauaaagcaguaaacgcacuaauaaacgaucaacuuauaaugaaaaaucaucuuagagauauaaugggaaucccauacuguaauuauucaaaauauugguaccuaaaucauacugucacgggaaaaaccucacuaccuagauguuggcuaguaucuaacggaucauaucuuaaugaaacacauuucucagaugacauagaacaacaagcagacaacaugauaacagaacuauuacaaaaagaauauauggaccgacaaggaaaaacaccacuaggacuaguagacuuauucguuuuuuccacaucauucuaucuaauaucaauauuccuacacuuaguaaaaauacccacacacagacacauaacugguaaaccauguccaaaaccccacagacucaaucauaugggcaucugcucauguggccuauacaaacacccagguguuccaguaaaauggaaacgauaa

SEQ ID NO: 1915 - RNA, 1473 nt, Artificial Sequence
  derived and/or modified protein sequence (opt6) from LASV(LASV253-NIG-2011;Clade II)__AIT17670__GPC
augggacaaauaauaacuuucuuucaagaaguaccccauguaauagaagaaguaaugaacauaguacuaaucgcccuauccuuacuagcaauacuaaaaggaauauacaacguagcaacaugcggauuauucggccuuguaucauuucuacucuuaugcggcagauccuguucaacaacauacaaaggaguauacgaacuacaaacacuagaacuagacauggcaucacuaaauaugacaaugccauuaagcugcacaaaaaacaacucucaccacuacauaaugguaggaaaugaaacaggacucgaacucacacuaacaaauaccucuaucauaaaccacaaauucugcaaucuaucagaugcccacaaaaaaaaccuauaugaucaugcauuaauguccauaauaucaacauuccaucuaucaauucccaacuuuaaccaauacgaagcaaugucaugcgacuuuaacggcggaaaaauaucuguacaauauaaucuaucccacacuuaugcagucgaugccgcaaaucacugcgguaccauagcaaauggaguacuccaaacauucaugcgcauggcuuggggcggaucauacaucgcacuagauuccggaaaaggaucaugggacugcauaaugacaucuuaccaauaucuuaucauacaaaauacuaccugggaagaucacugccaauuuucaagaccgucaccaauaggauaucucggauuacuaucacaacgaaccagagacauauauauaucaagaagacuacuaggaaccuucacauggacauuaagcgauucugaaggaaaugaaacuccagguggauauugccuaacaagauggauguuaauagaagccgaauuaaaaugcuucggaaauacagcaguugcaaaauguaacgaaaaacaugacgaagaauucugugacaugcuaagauuauucgacuucaacaaacaagcaauaagaagacuaaaagcagaagcacaaaugucaauacaacuaauaaauaaagcaguaaaugcucuaauaaaugaccaauuaauaaugaaaaaccaccuuagagacauaaugggaauacccuacuguaacuacucaaaauacugguaccuaaaccacacagucacaggacgcacgucacuaccccgaugcuggcuaguaucaaacggcucuuaccuaaacgaaacacacuucagcgacgacauagaacaacaagcagacaacaugaucaccgaauuauuacaaaaagaauacauagacagacaaggaaaaacaccacuaggccuaguagaccucuuugucuucucaacaucauuuuaccuaauaucaauauuccuacauuuaguuaaaauacccacccauagacacaucauaggaaaacccugccccaaaccacaccgacuaaaccacaugggaauaugcucaugugguuuauacaaacaucccggaguaccaguaaaauggaaaagauaa

SEQ ID NO: 1916 - RNA, 1473 nt, Artificial Sequence
  derived and/or modified protein sequence (opt6) from LASV(LASV254-NIG-2011;Clade II)__AIT17674__GPC
augggacaaauaaucacauucuuucaagaaguaccacauguaauagaagaaguaaugaacauaguucuuauagcacucucauuacuagcaauauuaaaaggaauauacaacguagcuacaugcggccucuuuggacuaguaucauuccuccuccuaugcggaagaucuugcucaacaacauacaaagguguauacgaacuacaaacauuagaauuagacaugacaaaucuuaacaugacaaugccacuauccuguaccaaaaauaacucccaccacuauauuaugguaggaaaugaaacaggacuagaacucacacuaacaaacacaucaauaauaaaccacaaauuuugcaaccuaucugaugcccacaaaaaaaacuuauacaaccacgcacuaaugucaauaauaucaacauuccacuuaucaauaccaaauuuuaaccaauaugaagcaauguccugcgacuucaacggaggaaaaaucucaguacaauauaaccuaucccacucauacgcaguagacgcagcaaaucauugcggaacaauagcaaacggaguccuacaaacauuuaugcgcauggcauggggaggaucuuacaucgcauuagacuccggaaaaggaaauugggacuguauuaugacaucuuaccaauaucuaaucauacaaaacacaacaugggaagaccacugccaauuuaguagacccucacccauaggauaccuaggauuacucucucaaagaacaagagauauauacauaucccgccgcuuacucggaaccuucacuuggacacucucagacucagaaggaaacgaaacaccaggaggauacugccuuacaagauggaugcuaauagaagcagaauuaaaauguuucggaaacacagcaguagcuaaaugcaaugaaaaacacgacgaagaauucugugacaugcuaagacuauucgacuucaacaaacaagcaauacgaagacuaaaaaccgaagcacaagcaaauauacaacucaucaacaaagcaguaaacgcacuuauaaaugaccaauuaauaaugaaaaaccaccucagagacaucaugggaauaccuuauugcaacuauucaaaauauugguaccuuaaccacacagucacagguaaaacaucccuaccaagauguuggcucgucucaaauggauccuaccuaaacgaaacccacuucucugacgauauagaacaacaagcagacaauaugauaacugaacuccuacaaaaagaauacauggacagacaaggaaaaacaccacuaggacucguagaccuauucguauuuucaacaucuuucuacuuaauauccauauuccuacaccuaguaaaaauaccaacccacagacacgucauaggaaaaccaugcccuaaaccacaucguuuaaaucacaugggaauauguucauguggauuauauaaacauccagguguaccaguaaaauggaaaagauaa

SEQ ID NO: 1917 - RNA, 1473 nt, Artificial Sequence
  derived and/or modified protein sequence (opt6) from LASV(LASV256-NIG-2010;Clade II)__AIT17678__GPC
augggacaaauaauaacauucuuccaagaaguaccccacguaauugaagaaguaaugaacauaguccuaauaacacuuucacuacuugcaauacuaaaaggcauauacaacauugcaacaugcggacuauucggacuagucucauuuuuacuguuaugcggcagaucauguuccaccacuuacaaaggaguauaugaacuucaaacauuagaauuagauaugacaucacuaaacaugaccaugccacuuucauguacuaaaaauaacucacaccacuacauaaugguaggaaacgaaacaggauuagaauuaacacuuaccaauacuucaauaaucaaccauaaauucugcaaccucagcgacgcacacaaaaaaaaccucuacgaccacgcacuaaugucaauaauaucaacauuccaccuaucaauaccaaacuucaaucaauacgaagcaaugucaugcgacuuuaauggagguaaaauaucaguucaauauaaccuaucacacaccuacgcaguagaugcagccaaccacugcggaacaauugcaaauggaguacuacaaacauucaugagaauggccuggggaggauccuacauagcacucgacuccggaaaagguucuugggacuguauaaugacaucauaccaauaucucauaauacaaaacaccacuugggaagaccacugccaauuuucaagaccaucaccaauaggauacuuaggccuacuaucacaaagaacuagagacauauacauaucacgaagauuacuaggaacauucacauggacccuuucagacuccgaaggcaacgaaacaccaggaggauauugucuaacucgauggaugcucaucgaagccgaauuaaaauguuucggaaacaccgccguagcaaaaugcaaugaaaaacacgacgaagaauuuugcgacauguuaagauuauucgauuuuaacaaacaagcaauacgaagacuaaaaaccgaagcccaaauguccauacaacucaucaauaaagcaguuaacgcccuaaucaaugaucaacuaauaaugaaaaaccaccuccgugacauaaugggaauaccauacuguaacuacuccaaauacugguaucuaaaucauacaguaacaggaaaaaccuccuuaccacgauguugguuaguaucaaacggaucauaccuaaacgaaacacacuuuuccgacgacauagaacaacaagcagacaacaugaucacagaauuacuacaaaaagaauacauagaucgacaaggaaaaaccccucuaggauuaguagaucuauucguauucucaaccucauucuaccuaauaagcauauuucuucaccuaguaaaaauaccaacacaucgccacauaaucggaaaaccauguccaaaaccacacagacuaaaccacaugggcauaugcucaugcggauuauacaaacacccagguauuccaguaaaauggaaaagauaa

SEQ ID NO: 1918 - RNA, 1473 nt, Artificial Sequence
  derived and/or modified protein sequence (opt6) from LASV(LASV267-NIG-2010;Clade II)__AIT17686__GPC
augggucaaauaauaacauuuuuccaagaaguaccacaugucauagaagaaguaaugaacauaguacuaauagcacuaucacuacucgcaauacuaaaagguauauacaacgucgcaacuugcggccucuucggauuaguauccuuccuauuacuaugcggaagauccugcucaacaacauauaaaggaguauacgaacuacaaacacuugaauuagacauggcuucuuuaaacaugacuaugcccuuaucuuguacaaaaaacaacucacaccauuauauaauggucggcaacgaaacaggacuugaauuaacacucacaaacacaucaaucauaaaccacaaauucugcaaccuaucagaugcacauaaaaaaaaccuauacgaccacgcacuaaugucaauaauaucaaccuuccaucuauccauaccaaauuuuaaccaauacgaagcaauguccugugacuucaacggaggaaaaauaucaguccaauacaacuuaucccacaccuacgcaguagacgcagcaaaucacugcggaaccauugcuaaugguguccuccaaacauuuaugagaauggcauggggaggaucauacauugcacuugacucaagaaaaggcucaugggacugcauaaugacaucauaccaauacuuaaucauacaaaacaccaccugggaagaucacugccaauucucaagaccaucuccaauaggauaccugggacuauuaucccaaagaacaagagauauauacauaucaagaagacuuuuaggaacuuucacuuggacccuaucagauucagaaggaaaugaaacaccuggaggauauugcuuaacuagauggaugcuaauagaagccgaacuaaaaugcuuugguaacacagcaguagcaaaaugcaacgaaaaacacgacgaagaauucugcgauaugcuacgccuauuugauuuuaacaaacaagcaauuagaagauuaaaaaccgaagcucaaaugucaauacaacuaauaaacaaagccguaaacgcucuaaucaacgaucaacuaauaaugaaaaaucaccuacgagauauaaugggaauaccauacugcaacuacucuaaauacugguaccuaaaccacaccgucacaggaaaaacaucccucccaagauguugguuaguauccaacggaucauaccuaaacgaaacacauuuuagugacgacauagaacaacaagcagauaacaugauaacagaacuauuacaaaaagaauauauggacagacaaggaaaaacaccccuaggacucguagaccuauucgucuuuucaacaucauucuacuuaauauccauauucuuacauuuaauaaaaaucccaacacaccgacacguaauaggaaaaccaugcccaaaaccacauagacucaaccacaugggcauauguucaugcggacuauauaaacacccaggaguaccuguaaaauggaaacgauaa

SEQ ID NO: 1919 - RNA, 1473 nt, Artificial Sequence
  derived and/or modified protein sequence (opt6) from LASV(LASV271-NIG-2010;Clade II)__AIT17690__GPC
augggacaaauaauaacauucuuucaagaaguaccccacguaauagaagaagucaugaacauaguacuaauagcacuaucccuauuagcaauacuaaaaggcauauacaacguagcaacaugcggacuauucggauuaguauccuuucuucuacuaugcggaagaagcugcucaacaacauauaaaggaguuuaugaacuacaaacauuagaacucgauauggcaucauuaaacaugacaaugccacuaucaugcacaaaaaacaacucacaccauuacaucaugguaggaaaugaaacaggccuagaauuaacacucacuaacaccucaauaauaaaccacaaauuuugcaaucuaucugacgcacacaaaaaaaaccuauacgaccacgcacuaaugucaauaauaucaacauuccaucuuucuauacccaacuucaaccaauacgaagccaugucaugugacuucaacgguggaaaaauaucaguucaauauaaccuaagccaugcauacgcaguagacgccgcaucccauugcgguacaguagcaaauggaguacuacaaacauuuaugagaauggcauggggaggauccuauauagcucucgacucuggcaaaggcucaugggacuguauaaugacaucauaccaauaucucauaauacaaaauacaacaugggaggaccacugucaauucucacgacccucaccaauaggauaucuaggacuacuaucacaaagaacucgagauaucuacauaucccgaagauuacuaggaacuuucacauggaccuuaucagacucagaaggcaaugaaacaccaggaggcuauuguuuaacaagauggaugcuaauagaagccgaauuaaaaugcuucggaaacacagcagucgcaaaauguaacgaaaaacaugaugaagaauucugcgacaugcuaagauuauucgacuucaauaaacaagccauaagacguuuaaaaacagaagcacaaauguccauacaauuaauaaacaaagcagucaacgcacuaauaaacgaccaauuaaucaugaaaaaucacuuaagagacaucaugggaaucccauauugcaacuacucaaaauauugguacuuaaaccacacagucaccggcagaaccucauuaccuagauguuggcucguuucaaacggauccuacuuaaacgaaacucacuuuucagacgacauagaacaacaagcugacaacaugauaacagaacuuuuacaaaaagaauacauggauagacaaggaaaaacaccacuaggacuaguagaccuauucgucuuuucaacauccuuuuauuuaauauccauauuucuccaccuaguaaaaaucccaacacauagacauguaauaggaaaacccugcccaaaaccacaccgacuaaaucacaugggcauaugcucaugcggacuauacaaacaccccggaguaccaguuaaauggaaacgauaa

SEQ ID NO: 1920 - RNA, 1473 nt, Artificial Sequence
  derived and/or modified protein sequence (opt6) from LASV(LASV274-NIG-2010;Clade II)__AIT17694__GPC
augggucaaauaauaacauuuuuccaagaagucccacacguaauagaagaaguaaugaacauaguacuaauagcccuaucacucuuagccauacuaaaaggcauauacaacgucgcaacaugcgguuuauuuggacuagucucuuuccuacuuuuaugcggacgauccuguucaacuauauacaaaggaguauaugaauuacaaacauuagaacuagacauggcaucauuaaacaugacaaugcccuuaucaugcacaaaaaauaacagccaccacuacauaaugguaggaaaugaaacaggacuagaacuaacauuaaccaacacaaguauaauaaaccacaaauucugcaacuuaucagaugcccacaaaaaaaacuuauacgaucaugccuuaaugucuauaaucagcacauuccaccuaucaauaccaaauuuuaaucaauacgaagcaaugucaugcgacuucaacggaggaaaaauaucaguacaauauaaucuaucacauacauacgcaguagacgcagcuaaccauuguggaacaauagccaacggcguauuacaaacauucaugcgaauggcauggggcggaucauacaucgccuuagacuccggaaaaggaucaugggacugcauaaugaccucauaucaauaccuaauuauacaaaacacaacaugggaagaccacugucaauucucaagaccauccccaauaggcuacuuaggacuacuaucacaacgaacaagagacauauacauaucccgacgacuauuaggaacauucacauggacacuauccgacucugaaggaaacgaaacaccaggaggauacugccuaacacgauggauguuaauagaagcagaacuaaaaugcuucggcaauacagcaguagccaaaugcaaugaaaaacaugacgaagaauucugcgauauguuaagacuauuugauuucaacaaacaagcaauacgaagacuuaaaacagaagcacaaaugucaauacaacuaauuaacaaagcuguaaacgcacuaauaaaugaccaacuaauaaugaaaaaucaccuacgcgacauaaugggaauaccauauuguaauuacagcaaauacugguaucucaaccacacagucacaggaaaaacuucauuacccagaugcuggcuagucagcaacggaagcuaucucaaugaaacccauuucucagacgauauagaacaacaagcagauaacaugauaacagaacuauuacaaaaagaauauauagaccgccaaggcaaaacaccacucggccuaguagaccuuuucguauucucaacuucauucuacuuaauaucaaucuucuuacauuuaguaaaaauacccacacacagacacguaguaggaaaaccaugcccaaaaccacacagauuaaaccauaugggaauauguucauguggacuauacaaacacccaggaguaccuguuaaauggaaaagauaa

SEQ ID NO: 1921 - RNA, 1473 nt, Artificial Sequence
  derived and/or modified protein sequence (opt6) from LASV(LASV719-NIG-2009;Clade II)__AIT17704__GPC
augggacaaaucauaacauucuuccaagaaguaccacacguaaucgaagaaguaaugaacauuguccuaauagcacuuuccuuacuagccauacuaaaagguaucuacaacguagcaacauguggacuauucggacuaguaucauuucuacuuuuaugcggcagauccugcucuacaacauauaaaggcguauaugaauuacaaacauuagaacuagacauggcuuccuuaaacaugacaaugccauuaucuugcacaaaaaauaauucacaccauuacauaauggucggcaaugaaacaggauuagaauuaacuuuaacaaauacauccauaauaaaccauaaauucugcaaccuaucagaugcacacaaaaaaaaucucuacgaccacgcacucaugucaauaauaucaaccuuccaucuaucaauaccaaacuuuaaccaauacgaagcaauguccugcgacuucaacggaggaaaaauauccguccaauacaaccucucacacacauacgcaguagacgcagcaaaucacugcggaaccauagccaauggaguccuacaaacauucaugagaauggcauggggcggaucauacauagcacuagacucaggaaaaggcucaugggacuguauaaugacaucauaccaauacuuaauaauucaaaacacaacaugggaagaccacugccaauuuuccagaccaucuccaauaggauaccuaggucuacuaucacaacgaacccgagacauuuauauaucccgaagauuacuuggaaccuucacuuggacauuaucugacucagagggaaacgaaacacccgguggauacugccuaacuagauggauguuaauagaagcagaauuaaaaugcuucggaaacacagcaguagcaaaaugcaaugaaaaacacgacgaagaauucugcgacauguuaagauuauucgacuucaacaaacaagcaauacgaagauuaaaaacagaagcccaaaugucaauacaacuaauaaacaaagcaguaaacgcauuaauaaacgaccaacucauuaugaaaaaucaccuaagagacauaaugggaauaccauacugcaacuauucaaaauacugguacuuaaaucacacuguaaccggcaaaacaucacucccacgauguuggcuuguuucuaacggaucauaucuaaaugaaacacauuucucagaugacaucgaacaacaagccgacaauaugauaacagaauuacuacaaaaagaauacauagaccgacaaggcaaaacaccacuuggauuagucgaucuauuuguauucuccacuucauucuacuuaaucucuauauuucuccauuuagucaaaauaccaacucauagacacguaauaggcaaacccuguccaaaaccccaccgacucaaccacaugggaaucugcucuugcggacucuauaaacaccccggugucccaguaaaauggaaaagauaa

SEQ ID NO: 1922 - RNA, 1473 nt, Artificial Sequence
  derived and/or modified protein sequence (opt6) from LASV(LASV738-NIG-2009;Clade II)__AIT17712__GPC
augggacaaauaaucacauucuuccaagaaguaccucacgucauagaagaaguaaugaauauaguccuaauagcauuaucauuacuagcaauacucaaaggcauauauaauguugcaaccugcggauuauucggacuaguaucauucuuacuauuaugcggucgcucaugcucaacaacauacaaaggagucuacgaacuacaaacucuagaacucgacauggcaucucuaaacaugacaaugccacucuccuguacaaaaaauaacucacaccacuacauaaugguuggaaacgaaacagguuuagaacuuacacuaacaaacacaucaauaauuaaccacaaauucugcaaucuaucagacgcacauaaaaaaaaccuauacgaccacgcauuaaugucuauaaucuccaccuuccaccuaucaauaccuaacuuuaaucaauaugaagccaugucaugcgauuucaacggagguaaaauuuccguacaauacaacuuaucacacacauacgcaguagacgcugcaaaucacugcgguacaaucgcaaacggaguuuuacaaacauucaugcgaauggcauggggaggaucauacauagcacuugauucaggaaaaggagcuugggauugcauaaugaccuccuaccaauacuuaaucauacaaaacaccaccugggaagaccauugccaauucagccgaccaucaccuauaggauaucucggauuauuaucacaaagaaccagagauauauauaucucaaggagauuacucggaacauucacauggacacuaucagacucagaaggaaacgaaaccccaggaggauacugucuaaccagauggauguuaauagaagccgaacuaaaaugcuuuggaaauacagccguagcaaaauguaacgaaaaacacgaugaagaauucugcgacauguuaagauuauuugauuucaacaaacaagcaauaaugagacugaaaacagaagcacaaaugucaauacaacuaauaaacaaagcaguaaacgcacuaauaaacgaccaauuaauaaugaaaaaucaccuccgagacaucaugggaauacccuacugcaauuauuccaaauauugguacuuaaaccacaccguaaccggcaaaacaucauuaccacguugcugguuaguaucaaaugguucauaucuaaacgaaacacauuuuucagaugacauagaacaacaagcugauaauaugauuaccgaaauguuacaaaaagaauacauagacagacaaggaaaaacaccacuaggauuaguagaccuauuuguauuuucaacaucauuuuacuuaaucucaauauuccuacaucuuguaaaaauaccuacccacagacacguaauaggaaaaccaugcccaaaaccccaucgacuaaaccacaugggcauauguucaugcggccuauacaaacacccaggaguaccaguaagauggaaaagauga

SEQ ID NO: 1923 - RNA, 1473 nt, Artificial Sequence
  derived and/or modified protein sequence (opt6) from LASV(LASV966-NIG-2009;Clade II)__AIT17718__GPC
augggacaaauaauaacauucuuccaagaaguaccacacguaauagaagaaguaaugaacauaguacuuaucgccuugucacuauuagcaauacuaaaaggaauauauaacguagcaacaugcggucuauuuggacuaguauccuuucuauuauuaugcggacgaagcugcucaacaacauacaaaggaguauaugaacuacaaacacuugaacuagauauggcaucuuuaaauaugacaaugccacuaucuugcacaaaaaacaauucucaccauuacauaagaguaggaaaugaaacaggcuuagaacuaacacucacaaacgcuaguauaauaaaccauaaauuuugcaaucuaagcgacgcacauaaaaaaaaccuauacgaccacgcacuuaugagcauaauaucuacauuccauuuaucaauaccuaacuucaaccaauaugaagcaaugucaugcgacuucaacggaggaaaaauaagcguacaauacaacuuaucacacgcauaugcaauugaugcagcuaaccauugcggaacagucgcaaacggaguauuacaaaccuuuaugagaauggcauggggaggaucauacauagcacuagacucaggaagaggaaacugggacugcauaaugacaucauaccaauaucuuauaauacaaaacacaaccugggaagaccacugccaauuuucaagacccucaccaauaggauaucucggauuacuuucacaacggacacgagauauauacauauccagaagacuacucggcacauucacauggacacuaucagacucagaaggaaaugaaacccccggaggguauugcuuaaccagauggaugcuaauagaagcagaacuaaaauguuucggaaacaccgcaguugcaaaaugcaacgaaaaacacgacgaagaauucugcgacaugcuaagacuuuucgacuuuaacaaacaggccauaagacgacuaaaaacagaagcacaaaugucaauacaacuaauaaauaaagcgguaaacgcauuaauaaacgaccaauuaauaaugaaaaaccacuuaagagacauaaugggaauaccauauugcaacuacucaaaauacugguaccuaaaccacacagucacaggaaaaacaucucuaccaagauguuggcuaguaucaaacggaaguuaucuaaacgaaacacacuucucagaugacauagaacaacaagcagacaacaugauaacagaauuauuacaaaaagaguacauggacagacaaggcaaaacaccccuaggucucguagaucuauuuguauucuccacaucauucuacuuaauauccauauuucuacaucuuguaaaaauaccuacacacagacacguaauaggaaaaccaugcccaaaaccacaccgacucaaccauaugggcauauguucuugcggauuuuacaaacaccccggagucccaguuaaauggaaaagauaa

SEQ ID NO: 1924 - RNA, 1473 nt, Artificial Sequence
  derived and/or modified protein sequence (opt6) from LASV(LASV969-NIG-2009;Clade II)__AIT17724__GPC
augggacaaauaauaacauucuuccaagaaguaccucacguaauagaagaaguuaugaauauaguacucauagcccuaagccuacuagcaauacuaaaaggcauauauaauguagcaacaugcggccuauuuggauuaguaucauucuuacuucuaugcggaagaucaugcucaacaacauacaaaggaguauaugaauuacaaacucuagaacuagauauggccaaucuaaacaugacaaugccacuaucuugcaccaaaaacaauucacaccauuacauaaugguaggaaacgaaacaggacuagaacucacacuaacaaacacaucaauaaucaaucauaaauuuugcaacuuaucagacgcccauaagaaaaaucuauacgaccaugcauuaaugucaauaauaucaacauuccaccucuccaucccaaacuuuaaccaauacgaagcaaugagcugugauuucaacggaggaaaaauaucuguacaauauaaucuaucacacacauacgcaguagacgcagcaaaccacugcggcacaguagcaaacggaguauuacaaacauucaugcgcauggcauggggaggaucauauauagcacucgauucaggaaaaggauccugggacuguauuaugacaucauaucaauaccuaauaauacaaaacacuacaugggaagaccacugucaauucuccagaccaucuccaauaggauauuuaggauuacuaucacaaagaacaagagauauuuacauaucaagaagacuauuaggaacauucacauggacacuaucggauuccgaagguaaugaaacaccaggaggauacugucuaacuagauggauguuaaucgaagcagaauuaaaaugcuuuggaaauaccgcuguagcaaaaugcaacgaaaaacacgaugaagaauuuugcgauauguuacguuuauucgauuucaacaaacaagcaauaagacgacucaaaacagaagcacaaaugagcauacaacuaauaaacaaagcaguuaacgcucucauaaacgaucaacuaauaaugaaaaaucaucuaagagacauaaugggcauaccauacugcaacuacucaaaauacugguaucuaaaccacacaguaaccggaaaaaccuccuuacccagaugcugguuaguaaguaaugguagcuaccuaaacgaaacacacuucagugacgacauagaacaacaagcagauaacaugauaacagaacuuuuacaaaaagaauauauggaccgccaaggaaaaacaccacuaggauuaguugaccuauucguauucagcacaucauucuacuuaauauccauuuuccuacacuuaguaaaaauaccaacacaucgacacauaaugggaaaacccugcccaaaaccacaccgucuaaaucacaugggaauaugcucaugcggauuauacaaacacccaggaguacccguaaaauggaaacgauaa

SEQ ID NO: 1925 - RNA, 1473 nt, Artificial Sequence
  derived and/or modified protein sequence (opt6) from LASV(LASV971-NIG-2009;Clade II)__AIT17728__GPC
augggacaaauuauaacauucuuccaagaaguaccccacgucauagaagaaguaaugaauauaguauuaauagcacucucauuauuagcaauauuaaaaggcauuuauaacguagcaaccugcggacuauucggauuaguauccuuccuacuauuauguggacgaucaugcucaacaacauacaaaggaguuuacgaacuacaaacacuagaacucgacaugggcucacuaaacaugacuaugccacuaucauguacuaaaaacaacucacaccacuauauaauggucggaaacgaaacaggccuagaauuaacacuaacaaauacaucaauaauaaaccacaaauucugcaaccuuucagaugcucacaagaaaaaucuauacgaccacgcacuaaugucaauaauaucaaccuuccaccuaucaaucccaaacuuuaaucaauacgaagcaaugucaugcgacuucaauggaggcaaaauaucaguacaguacaaucuaucucacacauacgcagucgacgcagcaaaucacuguggaacaauagcaaauggaguacuacagaccuucaugagaauggcauggggagguucauacauagcucuagacucuggaaaaggcucaugggacugcauaaugaccuccuaccaauaccuaauaauacaaaacacaacaugggaagaccauugucaauucuccagacccucaccaaucggauaccuaggacuauuaucacaacgaacuagagacauuuacauaucacgaagauuacuaggcaccuucacauggacccuaucagacuccgaaggaaacgaaacuccaggaggauacugcuuaacacgauggaugcucauagaagcugaacuaaaaugcuucggaaauaccgcaguagcuaaaugcaacgaaaaacaugacgaagaauuuugcgacaugcuaagacuauucgacuucaacaaacaagcaauacgaagauuaaaaacagaagcucaaauguccauacaacuaauaaacaaagcaguaaacgcauuaauaaacgaucaacuaauaaugaaaaaucacuuacgugauauaaugggcauuccauacugcaacuacucaaaauacugguaucuaaaccauacagucacaggaaaaaccucccuuccaagaugcuggcuaguuucaaauggauccuaccuaaacgaaacccauuuuucagacgacauugaacaacaagcagacaauaugaucaccgaacuacuccaaaaagaauacauggacagacaaggaaaaacaccucuaggauuagucgaccucuuuguuuucucaaccuccuuuuaccuaauaagcauauuccuacaucuaguuaaaauaccaacacauagacauguuaucggcaaaccauguccaaaaccacacagacucaaucacaugggaaucugcucauguggacuauauaaacacccaggagucccuguuaaauggaaacgauaa

SEQ ID NO: 1926 - RNA, 1473 nt, Artificial Sequence
  derived and/or modified protein sequence (opt6) from LASV(LASV975-NIG-2009;Clade II)__AIT17732__GPC
augggccaaauaauuacauucuuccaagaaguaccacauguaauagaagaaguaaugaacauaguacuaauugcacuuucauuacuagccauccuaaaagguaucuacaacguagcaacuugcggauuauucggacuagucuccuuucuauuacuaugcggcagauccugcuccacaacauauaaaggaguauacgaauuacaaacacuggaacuugacauggccuccuuaaacaugacaaugccacuuucaugcacaaaaaacaacagccaccacuacaucaugguaggcaacgaaacugguuuagaauuaacacuaacaaauacaucaauuauaaaccacaaauucugcaaccucuccgacgcccauaaaaaaaaccuauacgaucacgcacuaaugucaaucaucucaacauuccauuuaucaauacccaacuucaaucaauacgaagcaauguccugugacuucaacggaggaaaaaucucuguccaauacaacuuaucacacaccuacgcaguagaugccgcaaaccacugcggaacuaucgcaaauggaguacuacaaacauucaugagaauggcauggggcgguucuuacauagcacuagauucaggaaaaggaucaugggauugcauaaugacaagcuaucaauaucuaauaauacaaaauacuaccugggaagaccacugucaauucucuagaccguccccuaucggauaccuaggacuacuaucacaacgaacaagagacauauauauaucaagaagauuacuaggaaccuuuacauggacccuaucagacucagaagguaacgaaacaccaggaggauacugccuaaccagauggauguuaauagaagccgaacuaaaauguuucggaaacacagcuguugcaaaaugcaacgaaaaacacgacgaagaauucugcgauaugcuuagauuauucgauuucaacaaacaagcaauaagaagacuaaaaacagaagcucaaaugucuauacaacuaauaaacaaagcaguaaacgcacuaauaaacgaucaauuaaucaugaaaaaucaucuaagagauauaaugggcauuccauacugcaacuacucaaaauacugguaccucaaccauacuguaacuggaaaaacaucacucccacgaugcugguuagucuccaaugguucuuaucuaaacgaaacacacuuuucugaugacauagaacaacaagcagauaacaugaucacagaauuacuacaaaaagaauauauagauagacaagguaaaacuccauuaggcuuaguagaccuauucguauucuccaccuccuuuuaucuaauaucaauauucuuacaccuaguuaaaauaccaacacacagacauauaguaggaaaaccaugcccaaaaccacaccgacuaaaucacaugggaauaugcucaugcggauuauacaaacacccaggaguaccaguaaaauggaaaagauaa

SEQ ID NO: 1927 - RNA, 1473 nt, Artificial Sequence
  derived and/or modified protein sequence (opt6) from LASV(LASV976-NIG-2009;Clade II)__AIT17736__GPC
augggucaaaucguuacauucuuucaagaaguaccacaugucauagaagaagucaugaacauaguccuaauagcacuauccuuauuagccauacuuaaaggcaucuacaacguagcaacaugugguuuauuuggccucguuucauuuuuacuacuaugcggcagauccugcucaacaacauacaaaggcguauacgaacuccaaacauuagaauuagauauggcaucacuaaacaugacaaugccacuaucuuguaccaaaaacaacucacaccacuacauaaugguaggaaacgaaacaggauuagaacuaacacuaacaaauaccucuauaauaaaccauaaauuuuguaaccuuucagacgcccacaagaaagaccuauaugaccaugccuuaaugucaaucauaucaacuuuccaucuaucuauaccuaacuuuaaccaauacgaagccaugucaugcgauuucaacggaggaaaaauaucaguacaauacaacuuaucccacaccuacgcaguagacgcagcaaaucacuguggaacaauugcaaacggaguacuacaaacauucaugagaauggcauggggaggauccuacauagcacucgacucagguaaaggaucaugggacugcauaaugaccucauaccaauaucuaauaauacaaaacacaaccugggaagaucacugucaauucuccagaccauccccuauuggauaccuaggacuauuaucccaaaggacacgagacaucuauauaucaagacgauuauuaggaacauucacauggacuuuaucagauucagaaggaaaugaaacaccaggaggcuacugccuaacaagauggauguuaauugaagcagaacuaaaaugcuuuggaaauacagcuguagcaaaaugcaacgaaaaacacgacgaagaauuuugugacaugcuacgacuuuucgacuucaacaaacaagccaucaugagacuaaaaacagaagcacaaaugagcauacaacucauaaauaaggcaguuaacgcacucaucaacgaccaacuaauaaugaaaaaucacuuacgugauauaaugggcauuccauacugcaauuacuccaaauacugguacuuaaaccacacaguaacaggaaaaacaucacuaccaagaugcuggcucgucucaaacggauccuacuuaaaugaaacaagauucucagaugacauagaacaacaagcagacaacaugauaacugaaaugcuccaaaaagaauacuuagacagacaaggaaaaacaccauuaggccuaguagacuuauucguuuucucaaccucauucuaucuaauauccauauuccuacauuuaguuaaaauaccaacacauagacauauaauuggaaaaccaugcccuaaaccacacagacuuaaccacaugggaauaugcucauguggauuauacaaacacccaggaguuccaguuaaauggaaaagauaa

SEQ ID NO: 1928 - RNA, 1473 nt, Artificial Sequence
  derived and/or modified protein sequence (opt6) from LASV(LASV978-NIG-2009;Clade II)__AIT17744__GPC
augggucaaaucauaacauucuuccaagaaguuccacacguaauagaagaaguaaugaauauaguacuaauagcauuaucauuacuagcaauauuaaaaggaauauauaacguugcaacaugcgguuuauucggacuaaugucauucuuauuacuuuguggaagaucaugcucaacaacauacaaaggaguuuaugaacuacaaacauuagaauuagauauggcaaaccuaaauaugacaaugccacuuagcuguacaaaaaacaauucacaccacuacaucaugguaggaaaugaaacaggauuagaacuaacacuaacaaauacaucuauaaucaaucacaaauucuguaaccuaucagaugcucacaaaaaaaaccuauaugaccaugcacuaaugucuauaaucucaacauuucaccuuucuauacccaacuucaaccaauacgaagcaaugucaugcgauuucaaugguggcaaaauaucagugcaauacaaucuaucacaugcauacgcaguagacgcagcuaaccauugcggcacaauagccaacgguguccuacaaacauucaugagaauggcauggggaggauccuacauagcacuagauuccggaaaagguucaugggauugcauaaugacaucuuaccaauaccuaaucauccaaaauacuucaugggaagaucauugucaauucagcagaccaucccccauaggauaccuaggacuauuaucacaaagaacacgagacauauacauaucccgacguuuacuaggaacauucacauggacacuaucugauucagaaggcaacgaaacaccaggaggauacugcuuaacccgauggaugcuaauagaagcagaacuaaaaugcuucggcaacacagcaguagccaaaugcaacgaaaaacacgaugaagaauuuugcgacaugcuaagacucuuugauuucaauaaacaagccaucagacgauuaaaaacagaagcacaaaugucaauacaacuuauaaauaaagcagucaacgcacucauaaaugaccaacuaauaaugaaaaaccaccuacgagauaucaugggcauaccauauugcaacuacucuaaauauugguauuuaaaccacacaguuacaggaaaaacaucacuaccaagaugcuggcuaguaucaaacggaucauaccuaaaugaaacccacuuuucagacgauaucgaacaacaagcagauaauaugauaacagaacuauuacaaaaagaauauauugacagacaaggaaaaacaccacuaggauuaguagaucuauucguauucucaacaucauuuuacuuaauaagcaucuuccuacaccuagugaaaauaccaacccauagacacguaauaggaaaacccugucccaaaccacauagauuaaaccacauggguauauguucaugcggauuauacaaacacccaggaguaccaguaaaauggaaaagauaa

SEQ ID NO: 1929 - RNA, 1473 nt, Artificial Sequence
  derived and/or modified protein sequence (opt6) from LASV(LASV981-NIG-2009;Clade II)__AIT17752__GPC
augggacaaauaauaaccuucuuucaugaaguaccacacguaaucgaagaaguaaugaauaucguccuaauagccuuaucacuauuagcaauuuuaaaaggaauauacaauguagcaaccugcggccuauuugguuuaguauccuuccuucuauuaugcggaagaucaugcucaacaacuuacaaaggagucuacgaauuacaaacccuagaauuagacauggcaucacuaaacaugacaaugccacuaucuugcaccaaaaacaacucccaccauuacaucaugguagguaacgaaacaggacucgaacucacacuuacaaacacaucaauaauaaaucacaaauucugcaaccucucagacgcacacaagaaaaaccuauacgaccacgcacucaugucuaucauaucaacauuccaucuaucuauaccaaacuuuaaucaauacgaagcaauguccugcgacuucaaugguggaaaaauaucuguacaauacaaucuaucacacacuuaugccauagacgccgccaaccacuguggcacuauagcaaaugguguacuccaaacauuuaugcgaauggcauggggaggcucauacauagcauuagacuccggaagaggaucaugggacugcaucaugacuucauaccaauaucuaauaauacaaaauaccacaugggaagaccacugucaauucucaagaccaucacccauaggauaccuaggacuccuuucacaaagaacacgagacauauacauaucaagacgucuauuaggaaccuucacauggaccuuaucagauucagaaggaaaugaaacaccaggaggauacugcuuaacacgcuggaugcuaauugaagcagaacuuaaaugcuuuggaaacacagcaguagcaaaaugcaaugaaaaacacgacgaagaauuuugcgauauguuacgauuauucgacuucaacaaacaagcaauaagaagauuaaaaacugaagcacaaaugaguauccagcuuauaaacaaagccgucaacgcacuaauaaacgaccaacuaauaaugaaaaaccacuuacgagacauaauggguaucccauauuguaacuacucaaaauauugguacuuaaaccauacaguaacuggaaaaaccucacuaccacgcuguuggcuaguauccaacggauccuaucuaaacgaaacacauuuuucagaugacauagaacaacaagcagacaacaugauaacagaauuacuacaaaaagaauauauagauagacaagguaaaacaccauuaggccuaguagaccuauucgucuuuuccacaucauucuauuuaauaucuaucuuccuccacuuaguaaaaauaccaacccauagacaugucaucggaaaaccaugcccaaaaccacauagauuaaaucauaugggaauaugcucaugcggauuauauaaacaucccggaguaccaguaaaauggaaaagauaa

SEQ ID NO: 1930 - RNA, 1473 nt, Artificial Sequence
  derived and/or modified protein sequence (opt6) from LASV(LASV982-NIG-2009;Clade II)__AIT17756__GPC
augggacaaauaauaacauucuuccaagaaguaccccaugucauagaagaagucaugaacauuguucuaauagcccuaucacuacucgccauacuaaaaggaauauacaacguagcaacaugcggauuauucggucuugucucauucuuacuacucugcgguagaagcuguucaauaacauauaaaggaguauacgaacuacaaacccuagaacuagauauggccucacuaaacaugacuaugccacuaagcugcacuaaaaacaauucccaccacuauaucauggucggcaacgaaacaggccuugaacucacacuuacaaacacaucaauuauaaaccacaaauucuguaaccuaagugacgcacauaaaaaaaaccucuacgaccaugcauuaaugucaauuauaucaacauuccacuuaucaauaccuaacuucaaccaauacgaagcaaugucuugcgacuucaacggcggaaaaauaucaguacaauacaacuuaucccacacauacgcaguagacgcagcaaaccacugcggaacuauugcaaacgguguauuacaaacauuuaugagaauggcauggggaggcucauacaucgccuuagauuccggaagaggaucaugggacugcauaaugacuuccuaccaauaccuaauaauacaaaauacuacuugggaagaccacugccaauucucaagaccuuccccaauaggcuaccuaggauuacuaucacaaagaacaagagacauauacauaucacgaagauuacuaggcacauuuacauggacccuauccgacucagaaggcaacgaaacaccaggaggcuauugccuaacaagauggauguuaauagaagcagaacuaaaauguuucggcaacacugcuguagcaaaauguaacgaaaaacacgaugaagaauucugugacauguuaagacuauucgauuucaacaaacaagcuauaagaagacuaaaagcagaagcacaaaugucaauacaauuaaucaauaaagcaguaaacgcacuaauaaacgaucaacuuauaaugaaaaaccacuuaagagacauaaugggcauacccuacugcaacuacucaaaauauugguaucucaaccauaccguaacagguagaaccucucuacccagaugcuggcuaguauccaacggauccuaccuuaacgaaacucacuucucugacgauauagaacaacaagcagacaauaugauaacagaacuauuacaaaaagaauauauagaccgacaagguaaaacaccauuaggauuagucgacuuauuuguauuuuccacauccuucuaccucauauccauauuucuacaccuaguaaaaauaccaacacauagacauauaauaggaaaacccugcccaaaaccccacagacuaaaucauauggguauaugcucaugcgguuuauacaaacacccaggaguaccaguaaaauggaaaagauaa

SEQ ID NO: 1931 - RNA, 1473 nt, Artificial Sequence
  derived and/or modified protein sequence (opt6) from LASV(LASV988-NIG-2009;Clade II)__AIT17758__GPC
augggacaaaucauaacauucuuccaagaaguaccccaugucauagaagaaguaaugaacauaguucuaauagcacuaucauuacuagccauauuaaaaggaauauacaauguagccacaugcggauuauucggcuuagucagcuuccuccuauuaugcggaagauccuguagcacaacauauaaaggcguauacgaacuacaaacauuagaauuaaacauggcaagucuaaacaugacaaugccauuaucauguacuaaaaauaauucucaccacuacauaaugguaggaaaugaaacaggccuagaauuaacacuaacaaauacaucaaucauaaaucacaaauucuguaacuuaucagaugcccacaaaagaaaccuuuaugaccacgcacuaauguccauaauaucaacauuucacuuaucuauaccaaacuucaaccaauacgaagcuaugucuugcgacuucaacggaggcaaaauaucaguacaauauaauuuaagccauacauacgccgucgacgcagcaaaacacugcggcacaauagcaaacggaguucuacaaacauuuaugagaauggcuuggggaggaucauauaucgcacuagacuccggaaaaggcuccugggauuguaucaugaccucauaccaauaccuaauaauucaaaacacaacaugggaagaucacugcgaauuuucacguccaucaccaauaggauacuuaggacuauuaucacaaagaacaagagacauauauauaucaagaagauuacuaggaacauuuaccuggacauuaucagauucagaaggaaacgaaacaccaggaggauauugccuaacucgauggauguuaaucgaagcagaauuaaaauguuucggaaauacagccguagcgaaaugcaacgaaaaacaugaugaagaauuuugugacaugcuaagauuauucgacuucaacaaacaagcaauaagaagacuaaaagcagaagcacaaaugucuauccaauuaaucaacaaagcaguaaacgcccuuaucaacgaccaacuuauaaugaaaaaucaucuaagagacauaaugggcauuccauauugcaauuauucaaaauauugguaucuaaaucacacuguaaccggaaaaacaucauuaccaagauguugguuaguaucaaacggaucuuacuuaaacgaaacccacuucagcgacgauauagaacaacaagccgacaacaugauaacagaauuauuacaaaaagaauauauagaccgacaaggaaaaaccccauuaggccuaguagacuuauucguauucucaacauccuucuaccuaauaucaauauucuuacauuuaguaaaaauuccaacucauagacacguaauaggaaaaccaugccccaaaccacaucgacuaaaccacauggguauaugcagcuguggauuauacaaacacccaggcgucccaguaaaauggaaacgauaa

SEQ ID NO: 1932 - RNA, 1473 nt, Artificial Sequence
  derived and/or modified protein sequence (opt6) from LASV(LASV989-NIG-2009;Clade II)__AIT17762__GPC
augggccaaauaauaaccuucuuccaagaaguaccacauguuauagaagaaguaaugaacaucguacuaauagcauuaucacuacuagcaauacuaaaaggaauauacaacguagcaacuugcggacuauucggacuuguaucauuccuacuacuuugcggaagaucauguucuacaacuuacaaaggaguauacgaacuacaaacacuagaauuagauauggcaucacuaaacaugaccaugccacuaucaugcacuaaaaacaacucacaccauuacaucaugguaggaaaugaaacaggacuagaacuaacauuaacaaacacaucaauaaucucucacaaauucuguaauuuauccgacgcacacaagaaaaacuuauaugaccaugcacuaaugucuauaauauccacauuccaccucucuauaccuaacuucaaccaauacgaagccaugucaugcgacuucaacggaggaaaaauaucaguacaauacaaccuaucacacaccuacgccguagacgccgcaaaccauugcggaaccauagcaaacggaguacuacaaacauucaugagaauggcauggggcggaucguauauagcuuuagauuccggaaaaggaucaugggacugcaucaugacuucauaccaauacuuaauuauacaaaacacaacaugggaagaccauugccaauucagcagacccagucccaucggauacuuaggcuuacuuucucaaagaacucgugauauauauauaucaagacgucuauuaggaacauucacauggacacucucagacagcgaagguaacgaagcaccaggaggcuacugucuaacaagauggauguuaaucgaagccgaacuaaaaugcuuuggcaacacagcuguagcaaaaugcaacgaaaaacaugacgaagaauuuugcgacauguuaagauuauucgacuucaacaaacaagccauaagacgacucaaaacagaagcacaaaugucaauacaacuaaucaacaaagcuguaaacgcacucauaaaugaccaauuaaucaugaaaaaccaccuaagagacauaaugggcauacccuacuguaauuacucacgauauugguaccuaaaccacaccguaacaggaaaaacaucacuaccacgaugcuggcuagucuccaacgguucauacuugaaugaaacccacuucuccgacgacauagaacaacaagcagacaacaugauaaccgaacuccuucaaaaagaauacauggacagacaagguaaaaccccucuaggauuagucgaccuauucguuuucucaaccuccuucuaccuaauaucuauuuucuuacacuuaguaaaaauaccaacacaccgacaugucauaggaaaaccauguccaaaaccccacagacucaaccacauggguauuugcucaugcggauuauauaaacacccaggaguaccaguaaaauggaaaagauaa

SEQ ID NO: 1933 - RNA, 1473 nt, Artificial Sequence
  derived and/or modified protein sequence (opt6) from LASV(LASV991-NIG-2009;Clade II)__AIT17770__GPC
augggccaaauagucacauucuuccaagaaguaccacacgucauagaagaagucaugaauauaguacuaauagcuuuaucacuauuagcaauacucaaaggaauauauaacguagcaacuugcggccuauucggauuaguauccuuccuuuuacuaugcggcagaucaugcucuacaacauacaaagguguuuacgaacuccaagcauuagaacuugacauguccuccuuaaacaugacaaugccacuaucaugcacaaaaaacaacucucaucauuacaucaugguaggaaaugaaacaggacuugaacuaacauuaacaaacacaucaauaauacaccacaaauuuuguaaucuauccgacgcccacaaaaaagacuuauaugaucacgcacuaaugucaauaauaucaacauuccaucucuccauaccaaacuucaaccaauaugaagcaaugucaugcgauuucaauggaggcaaaauaucaguccaauacaaccuaucacauacauaugcaguagacgcagcaaaccacugcggaacaauagcaaauggaguauuacaaacuuucaugcgaauggcauggggaggaucauacauagcacuagacuccgguaaaggcggaugggacuguauaaugacuucauaucaauuccuuauaauacaaaauacaacaugggaagaucacugccaauucucucgcccaucaccaauaggauaucuaggauuacucucucaaagaacuagagacauauauauauccagaagacuacuaggaacauuuacauggacacuuucagauucagaaggaaacgaaacuccuggugguuacuguuuaacacgauggaugcuaauagaagcagaauuaaaaugcuucggaaacacagcaguagcaaaaugcaacgaaaaacaugaugaagaauucugcgauaugcuaagauuauucgacuuuaacaaacaagcaauuaaacgauuaaaaacagaagcucaaaugucaauacacuuaauaaauaaagcaguuaaugcacuaauaaaugaucaauuaauuaugaaaaaccacuuacgagauaucaugggcauaccauacuguaacuacaguaaauauugguaccuaaaccacacugucacuggaaaaacaaguuuaccaagaugcuggcuuguaucaaacggauccuaccucaaugaaacacacuucucagaugacaucgaacaacaagcugauaauaugauaacagaauuacuacaaaaagaauauauagacagacaaggaaaaacaccucucggacuaguagaccuuuucguauucucaacauccuuuuaccuaauaucaauauuccuacaccuaguaaaaauaccaacacauagacacguaauaggaaaaccauguccaaaaccacacagacuaaaccacaugggaauauguucaugcggacucuacaaacaccccggaguaccagucagauggaaaagauaa

SEQ ID NO: 1934 - RNA, 1473 nt, Artificial Sequence
  derived and/or modified protein sequence (opt6) from LASV(LASV993-NIG-2009;Clade II)__AIT17778__GPC
augggacaaauuauaaccuucuuccaagaagucccucauguuauagaagaaguuaugaauauaguacuuaucgcccuaucacuacuagcaauauuaaaaggaauauauaauguagcaacaugcggccuauuuggacuuguaaguuuccuacuacuaugcggacgauccuguagcacaacuuacaaaggaguauacgaauuacaaacacuagaacuagacauggcaaacuuaaacaugacaaugcccuuaucauguacuaaaaacaacucccaccacuacauuaugguaggcaacgaaacaggacuagaacucacucuaacaaacacauccauaauaaaucacaaauuuugcaaucuaucagacgcccacaaaaaaaaccuauaugaucacgcacuaauguccauaauaucuacauuccaccucuccauaccaaacuucaaucaauacgaagcaaugucuugcgacuucaacggcggaaaaauauccguacaauauaaccuaucacacaccuacgcccgagacgcagccaaccauuguggaacaauagccaacggaguacuacaaacauucaugcguauggccugggguggaucauauauagcucuagacucuggcaaaggcucaugggacugcauaaugacaucauaucaauaucuaauaauucaaaauacuacaugggaagaccacugucaauucucaagaccaucacccaucggauaucuaggccuacuuucccaaagaacgcgagacaucuauauauccagacgacuacugggcacuuucacuuggacauuaucagacucugaaggaaacgaaacaccaggaggauacugccuaacaagauggaugcuaauagaagcagaacuaaaaugcuucggaaacacagccgucgcaaaauguaacgaaaaacacgacgaagaauuuugugacaugcucagauuauuugacuuuaacaaacaagcaauacgaagacucaaaacagaagcacaaaugaacauacaacuaauaaacaaagcagucaaugcacucauaaaugaucaauuaaucaugaaaaaccaucuuagagacauaaugggcauaccauauuguaauuauucaaaauauugguaccuaaaccacacagucacaggaaaaacaucccuuccaagaugcugguuaguuucuaacggaaguuaccuaaacgaaacccauuuuucagacgacauagaacaacaagcagauaacaugauaacagaauuacuucaaaaagaauacauggacagacaaggaaaaacgccacuaggacuaguagacuuauucguauuuuccacaucauucuaccuaauauccauauucuuacacuuaguaaaaauaccaacacaccgacacguaaucggaaaaccaugcccaaaaccccauagacuaaaccacaugggaauuuguagcugcggacuauacaaacacccaggcguaccaguaaaauggaaaagauaa

SEQ ID NO: 1935 - RNA, 1473 nt, Artificial Sequence
  derived and/or modified protein sequence (opt6) from LASV(Nig08-04;Clade II)__ADU56610__GPC
augggacaaauaguaacauucuuucaagaaguuccacauguaauagaagaaguaaugaauauaguauuaauagcauuaucacuacuagcaauuuuaaaaggaauauacaacguagcaacaugcggacuauuuggacuaauauccuuuuuacuacuaugcggcagauccugcucaacaacauacaaaggaguauacgaacuacaaaccuuagaauuagacauggcaaaccuaaacaugaccaugccauuaagcugcaccaaaaacucaucacaccacuacaucaugguaggcaaugaaaccggucuugaacuaacauuaacaaauacaucaauaauaaaucauaaauucugcaaucuaucagaugcacacaagaaaaacuuauaugaccaugcacuaaugucaaucauauccacauuucacuuauccauaccaaauuuuaaccaauaugaagccauguccugcgacuuuaacggaggaaaaauaucaguacaauacaauuuaucacacgcuuaugcaguugacgcugccaaccacugcggaaccauagcaaacggaguacuccaaacuuucaugagaauggcuuggggaggauccuacauagccuuagacucaggaaaaggaaacugggacugcauaaugacaucauaccaauaucuaauaauacaaaacacaacaugggaagaucacugccaauuuucaagaccaucaccaauaggauaccuaggacuauuaucacaacgaacuagagauauauacauaucacgaagacuuuuaggaacauuuaccuggacacuauccgauucagaaggcaacgaagcaccaggcggauacugccuaacacgauggauguuaauagaagcagaauuaaaauguuucggaaacacagcaauagcaaaauguaacgaaaaacacgacgaagaauuuugugauaugcuacgguuauuugacuucaauaaacaagcaauaaaacgacuaaaagcagaagcucaaaugucaauacaauuaauaaauaaagcuguaaacgcacuaauuaacgaccaacucaucaugaaaaaccacuuacgagacaucaugggcauaccauauuguaacuauucaaaauauugguaucucaaccacacaguaacaggaaaaacaucacuaccacguuguuggcucauaagcaacgguucauaccuaaacgaaacacacuucucagacgacauagaacaacaagcagacaauaugaucacagaauuacuacaaaaagaauauauggauagacaaggaaaaacaccacuaggucuaguugaccuauuuguauucucaacaucauuuuaucuuauaagcauauuccuacaccuaguaaaaauaccaacucacagacauauaguaggaagaccaugccccaaaccucacagacuaaaccacaugggaauauguucauguggauuauacaagcacccuggaguucccgucaaauggaaaagauaa

SEQ ID NO: 1936 - RNA, 1473 nt, Artificial Sequence
  derived and/or modified protein sequence (opt6) from LASV(Nig08-A41;Clade II)__ADU56626__GPC
augggacaaauaauaacauuuuuccaagaaguaccacacguaauagaagaaguaaugaacaucguacuuaucgccuuaucauuacuugcaauccuaaaaggaaucuauaacguagcaaccugcggacuauucggccuaguauccuuucuacucuuauguggaagaucaugcucaacaacauacaaaggaguguacgaauuacaaacacuagaacuaaacauggcaagucuaaacaugaccaugccuuuauccugcacuaaaaacaacucacaccauuacauuaugguaggaaacgaaacaggauuagaauuaacacuaacaaacacuucaauaauaaaucacaaauucugcaaccuuagugacgcacauaaacgaaaucuauacgaucacgcccuaaugucaauaauaaguacauuucacuuauccauaccaaacuuuaaccaauacgaagcaaugucuugcgacuucaauggaggaaaaauaucuguccaauacaaccuaucucauacauaugcagucgacgcugcuaaacacugugguaccauagcaaauggaguacuacaaaccuucaugagaauggccuggggcggauccuacaucgcacucgauucaggaaaaggcucaugggacugcauaaugacuucauaccaauacuuaaucauacaaaacacaacaugggaagaucauugucaauucucacgcccaucaccaauaggauacuuaggauuauuaucacaaagaacaagagauauauacauauccagacgucuacuaggaacauucacauggacacuaucagacucagaaggaaaugaaacaccaggaggauacugcuuaacaagauggaugcuaaucgaagccgaacuaaaaugcuucggaaacacagcgguugcaaaaugcaacgaaaaacaugacgaagaauuuugcgacaugcuaagacuauucgacuucaacaaacaagcaaucagacgacuaaaagcagaagcacaaaugucaauacaacucauaaauaaagcaguaaacgcccuaauaaaugaccaauuaauaaugaaaaaccauuuacgagacauaaugggaaucccauauugcaacuacucaaaauacugguacuuaaaucacacuguaacaggcaaaacaucauuaccaagauguuggcucguaucaaacggcuccuaucuaaacgaaacacauuucucagaugacauagaacaacaagcagacaacaugauaacagaauuacuacaaaaagaauacaucgacagacaaggaaaaacaccccuaggccuaguagacuuauuuguauuuucaacaucuuucuaccuaauaucaaucuuucuacaucuaguaaaaauuccaacacauagacauguaaucggaaaaccaugcccaaaaccacacagacuuaaucauaugggaauaugcucaugcggauuauacaaacacccaggagucccaguaaaauggaaaagauaa

SEQ ID NO: 1937 - RNA, 1473 nt, Artificial Sequence
  derived and/or modified protein sequence (opt6) from LASV(Nig08-A47;Clade II)__ADU56630__GPC
augggacaaauaauaacauuuuuccaagaaguaccacacguaauagaagaaguaaugaacauaguacuuauagcacuaucccuucuagccaucuuaaaagguauauacaacguagcaacaugcggauuauucggccuaguaucauuccuauuacuaugcgguagauccugcucaacaacauacaaaggaguauacgaauuacaaacacuagaacuagauauggccuccuuaaacaugaccaugccacuaucaugcacaaaaaacaacucccaucacuacaucauggucggcaacgaaacagguuuagaauuaacacuaacaaacaccucuauaauaaaucauaaauucugcaaccuuucagacgcacacaaaaaaaacuuauaugaccacgcacuuaugucuauaauauccaccuuccaucuaucaauaccuaacuucaaccaauacgaagcaaugucaugcgauuucaacggaggcaaaauauccguacaauacaaccuaagccacgcauacgcagucgacgcagcaaaccacugcggaaccaucgcaaauggaguacuucaaacuuucaugagaauggcauggggaggcuccuacauugcucuagacagcggaaaaggaucaugggauugcauaaugaccuccuaccaauaucuaauaauacaaaacacaacaugggaagaccacugucaauucucuagaccaucuccaaucggauacuuaggauuacuaucacaaagaacccgagauauauauauauccagaagacuacucggaacauuuacauggacccuuucugacucagaaggaaacgaaacaccaggcgguuacuguuuaacaagauggauguuaaucgaagcagaacuaaaaugcuucggaaacaccgcaguagcaaaaugcaacgaaaaacacgacgaagaauucugcgacauguuaagacuuuucgauuucaacaaacaagcaauuagaagacuaaaaacagaagcucaaaugucaauacaauuaauuaauaaagcaguaaaugcccuaauaaaugaccaauuaauaaugaaaaaucaucuacgagauaucaugggaauacccuacuguaacuacuccaaauacugguaccuaaaucauacuguaacaggaaaaacuucacuaccaagaugcuggcuaguaagcaacgguuccuaucuaaaugaaacacauuucagcgacgauauagaacaacaagccgacaauaugauaaccgaacuacuacaaaaagaauauauggacagacaaggaaaaaccccuuuaggucuaguagacuuauucguuuuuucuacauccuucuacuuaauauccauuuuucuacaccuugucagaauaccaacccacagacacguuauaggaaaaccauguccaaaaccacauagacuaaaccacaugggaauuuguagcuguggauuauauaaacauccuggaguacccguaaaauggaaaagauaa

SEQ ID NO: 1938 - RNA, 1473 nt, Artificial Sequence
  derived and/or modified protein sequence (opt6) from LASV(CSF;Clade III)__AAL13212__GPC
augggacaaauaguaacauucuuccaagaaguuccacaugucauagaagaaauaaugaacauaguacuaauaacacuaucccuuuuagcaauacucaaaggaguauacaaccuagccaccugcggccuaauaggacuuauaacauuccuauucuuaugugguagaucaugcucaaugacauacaaaggaucauaccaacucgaaacacuagaacuaaacauggaaacacuaaacaugaccaugccacucuccuguacaaaaaacacaucucaucauuacauacgaguaggaaaugaaacuggccuagaacugacauuaacaaacacauccauaauuaaucacaaauucugcaaccuaucugaugcccacaaaaaaaaucuauacgaccacucacuaaugucaauaauaucaacauuccacuuaucuauaccaaacuucaaccaauacgaagcaaugucaugcgauuuuaacgguggaaaaauaucuauacaauacaaccuaucucacacauacgcaggagaugcggcaaaacacugcgguacauuagccaacggaauacuacaaacauuuaugcgcauggcauggggcggaucauacauagcauuagauucaggaagaggaaacugggauugcauaaugaccucauaccaauaccuaauaauacaaaauaccacgugggaagaccacugccaauucucgagaccauccccaauaggauaccuaggacuacuaucacaaagaacaagagaaaucuacauaucaaggcgcuuacuuggaacauucacauggacccuauccgacucagaaggaaacgaaaauccaggaggauacugcuuaacacgauggauguuaauagaagcagaacuaaaaugcuuuggaaacacagcuguagcaaaauguaacgaaaaacacgacgaagaauucugcgauauguuacgccucuucgauuuuaacaaacaagcaauccaacguuuaaaagcagaagcacaaaugucaauacaauuaauaaacaaagccguuaaugcucuaauaaaugaccaacuaaucaugaaaaaccacuuacgagacaucaugggaauaccauauugcaacuacucaaaauacugguacuuaaaucacacaaccacaggaagaaccucauuaccccgaugcuggcuaguaagcaacggcuccuaucuaaacgaaacaagauucucagacgauauagaacaacaagcagauaacaugauaacagaaaugcuucaaaaagaauacauagauagacaagguaaaacacccuuaggccuuguugaucuauuuguauucuccaccucauucuaucuaauaucaauuuuucuacaccuaauaaaaauaccaacacauagacauauaguaggagguccaugcccaaaaccccacagauuaaaccauaaagguauauguucauguggccucuauaaaagaccuggcguaucagucagauggaaaagauaa

SEQ ID NO: 1939 - RNA, 1473 nt, Artificial Sequence
  derived and/or modified protein sequence (opt6) from LASV(ISTH2121-NIG-2012;Clade III)__AIT17540__GPC
augggacaaauagucacauuuuuccaagaaguaccucacguaauagaagaaauaaugaacauaguauuaauaacacuaucacuccuagcaauauuaaaagguauauauaacuucgcaaccugcggacuaaucggacuuauaacauucuuauuccuaugcggacgaucauguagcacaauauauaaaggaucauaccaacuacaaacacuagaauuaaacauggaaacacuaaacaugacaaugccuuuauccugcaccaaaaauaacucucaucauuacauacgaguaggaaaugaaacaggacuagaauuaacacuaacaaacacauccauaauaaaccacaaauucugcaaccuaucagaagcacacaaaaaaaaccuauacgaucacgcacuuaugucuauaauaucaacauuucacuuaucaauaccaaauuucaaucaauaugaagcaauguccugcgauuucaauggaggaaaaauaagcguacaauacaauuuaucacacuccuacgcaguagacgcagcaaaccacuguggaacaguagccaauggaguacuacaaacauuuaugagaauggcauggggcggcucauacauagcauuagacuccggacgaggaaacugggacugcauaaugacuaguuaucaauaccucauaauccaaaacacaaccugggaagaucacugccaauucucccgaccaucacccauaggauaccuaggucuacuaucacaacgaacaagagacauauacauaucaagaagauuacuaggaacauucacauggacacuaagcgacucagaaggaaaagaaacaccaggaggauacuguuuaacaagauggauguuaaucgaagcugaacuaaaauguuucggaaauacagccguagcaaaaugcaacgaaaaacaugacgaagaauucugcgacaugcuacgacucuucgacuucaacaaacaagcaauccaacgacuuaaaacagaagcacaaaugucaauacaacucauaaacaaagcaguaaaugccuuaaucaaugaucaauuaauaaugaaaaaucaccuaagagacauaaugggaauccccuauugcaacuauucaaaauauugguacuuaaaccacacaucuaccggcagaacuucauuaccaaaaugcugguuaguaucaaauggaucauaccuaaacgaaacacacuucuccgacgacauagaacaacaagcagacaacaugauaacagaaauguuacaaaaagaauauauagauagacaaggaaaaacaccacuaggauuaguagauuuauucguauuuuccacaaguuuuuaccuaauauccauauuccuccaccuugucaaaauaccaacacauagacauauaguaggaaaaucauguccaaaaccccacagacuuaaccacaugggaauaugcucaugcggacucuacaaacaaccuggcguaccaguaaaauggaaaagauaa

SEQ ID NO: 1940 - RNA, 1473 nt, Artificial Sequence
  derived and/or modified protein sequence (opt6) from LASV(Nig08-A19;Clade III)__ADU56618__GPC
augggacaaaucguaacauucuuucaagaaguaccacacguaauagaagaagucaugaacauaguuuuaauagcccucucaauacuagcaauauuaaaaggcuuauacaacauagccaccugcggacuaauaggacuagucacauuccuccuacuaagcggcagaucuugcucaaugacauauaaaggaguauacgaauuacaaacccuagaacuaaauaugaauacauuaaacaugacaaugccacuaucaugcacaaaaaauaacucucaccauuacauaaugguuggaaacgaaacaggacuagaauuaacacuaacaaacaccagccuuuuacaccacaaauucugcaaccuauccgacgcacacaaaaaaaacuuauaugaccauacccuaaugucaauaaucuccacauuucaucuaucaauaccaaauuucaaccaauacgaagcaaugucaugcgacuucaacggaggaaaaauaacaguacaauacaaucuuucucacucauaugcaaucgaugcagcuaaccauugcggaacaguagcaaacggaguacuacaaacauucaugcgaauggcauggggagguucauacauugcucucgauucaggaagaggcaaaugggacuguaucaugacuucauaccaauaccuaaucauccaaaacacaacaugggaagaccacugccaauucucacgcccaucaccaauaggcuaccucggcuuacuaucccaaagaaccagagauauauacauaucaagaagacuacuaggaacauucacauggacucuuuccgacuccgaaggaaacgaaacaccaggaggcuacugccuaacacgauggauguuaauagaagcagaauuaaaaugcuucggcaacacugccgucgcuaaaugcaacgaaaaacaugaugaagaauuuugcgacaugcucagacuauucgacuucaauaaacaagcaaucagaagacuaaaagcagaagcucaaaugucaauccaacuaauaaacaaagcaguaaacgcucuaauaaaugaucaacuaauaaugaaaaaccaccuaagagacauaaugggaaucccauacuguaauuacucaaaauacugguaccuaaaucacacauccacuggaagaacaucacugccaagaugcugguuaguauccaacggaucauaucuaaaugaaacacacuucucagaugacauagaacaacaagcagacaauaugauaacagaaauguuacaaaaagaauaccuagauagacaaggaaaaacaccccuagguuuaguugacuuauucgucuucagcacaucuuucuaccuaauauccauauuccuccaucuaguaaaaauaccaacacacagacacauaguaggaaaaccaugcccaaaaccccaucgccuaaaccauaugggcauaugcucaugcggacuauacaaacaaccaggagucccagucagauggaaaagauaa

SEQ ID NO: 1941 - RNA, 1473 nt, Artificial Sequence
  derived and/or modified protein sequence (opt6) from LASV(ONM-299;Clade III)__ANH09734__GPC
augggccaaaucguaacauuuuuucaagaagucccccauguaaucgaagaaauaaugaacauuguacucauaacucuaucucuauuagcaauauuaaaaggucuauacaacuucgcuacaugcggacuaauaggacuaauaaccuuccuauuucuaugcggaagguccuguuccaugauauacaaaggcucauaucaacuagaaacauuagaacuaaacauggaaacauuaaacaugacaaugccacucuccugcacaaaaaacaacagucaucauuacauuagaguaggaaacgaaacaggauuagaacuaacauuaacaaacacaucaauaauaggccacaaauucugcaacuuaucagacgcacacaaaaaaaauuuauacgaccacucacucaugucaauaauaucaacuuuccacuuaucaaucccaaacuuuaaccaauacgaggcaaugagcugugacuucaacggaggaaaaauauccauacaauauaaccuaucacacacauacgcaggagaugcagccaaacauugcggaacaguagcaaacggaguacuacaaacauucaugagaauggcauggggaggaucauauauagcccuagacucaggacgaggaaauugggacugcauaaugacuucauaccaauaccuaauaauccaaaacaccacaugggaagaccacugucaauucuccagaccaucacccauaggauaccucggacuauuaucacaaagaacaagagacauauacauaucaaggagacuacuaggcacuuuuaccuggacacuaucagacuccgaaggaaaagaaacaccaggaggauauugccuaacaagauggaugcuaauagaagcagaauuaaaaugcuucggaaauacagcuguagcaaaaugcaacgaaaaacaugacgaagaauuuugcgacauguuacgacuauuugauuucaauaaacaagcaauacaaagauuaaaaacagaagcacaaaugucaauacaacuaauuaacaaagcaguaaacgcacuaauaaacgaccaacucauuaugaaaaaucaucuaagagacauaaugggaauaccauauugcaacuacucaaaauacugguaccuaaaucauacaucuacaggaagaacaucacuaccuaaaugcuggcuaguaucuaauggaucauaccuaaaugaaacccauuucucagacgacauagaacaacaagccgacaacaugauaaccgaaauguuacaaaaagaauauauagaccgacaaggaaaaacuccacuaggacuaguagacguauucguuuuuucaaccuccuucuaccuuaucuccauuuuccuccaccuuguaaaaaucccaacccaccgacacauuguaggaaaauccugcccaaaaccccaucgacuuaaccauauggguauaugcuccuguggauuauacaaacaaccaggaguaccaguaagauggaaaagauaa

SEQ ID NO: 1942 - RNA, 1473 nt, Artificial Sequence
  derived and/or modified protein sequence (opt6) from LASV(ONM-700;Clade III)__ANH09738__GPC
augggacaaauuguaaccuuuuuccaagaaguaccacaugucauagaagaaaucaugaacauaguacuaauuacacuaagucuauuagcaaucuuaaaaggauuauacaacuucgccacaugcggacuaauaggacuaauaacauuucuauuccuauguggcagaaguugcucaaugauauacaaaggaucauaccaauuagaaacauuagaacuaaauauggaaacauuaaacaugaccaugcccuuaucauguaccaaaaauaauucacaucauuacauuagaguaggaaacgaaacaggauuagaacuaacauuaacaaacaccuccauaauaaaucacaaauucugcaacuuaucugacgcacacaaacgcaacuuauacgaucacucacuaaugagcauaauaucaacauuucauuuaucaauaccaaauuuuaaccaauaugaagccaugucaugugacuuuaauggcggaaaaauaagcauacaauauaaccuaucccauacauacgcaggcgacgccgcaaaacauuguggaacuguagcaaacggaguauuacaaacauucaugagaauggcauggggagguuccuacauagcacuagauucaggacguggcaauugggacugcauaaugaccucauaccaauaucucauaauccaaaauacaacaugggaagaucauugucaauucucacgcccaaguccaauaggauaccuaggccuauuaucacaaagaacacgagacauuuacauaucaagaagacuacuaggaacauucacauggacauuaucagacucagaaggaaaagaaacaccaggcggauacugccucaccagauggaugcuaauagaagcugaacuaaaauguuucggaaacacggcaguugcaaaaugcaacgaaaaacacgacgaagaguucugcgacaugcuaagauuauucgacuuuaacaaacaagcaauacaaagacuaaaaacagaagcacaaaugagcauacaauuaauaaacaaagcagucaacgcacuaauaaacgaucaacuaauaaugaaaaaccaccuacgagauauaaugggaauaccauauuguaacuacucuaaauacugguacuuaaaccacaccucaacaggaagaaccucauuaccaaaaugcuggcuagucucaaacggaucguaccuaaacgaaacacacuucagugacgauauagaacaacaagcagacaacaugauaacagaaaugcuccaaaaagaauacauagacagacaaggaaaaacaccacuaggccuaguagacgucuuuauguuuagcacauccuuuuaucuaaucucaaucuuccuacaucuaguaaaaauaccaacacacagacacauagucggaaaaucaugcccaaaaccgcacagauuaaaccauaugggaauauguuccuguggauuauacaaacaacccggaguaccagucagauggaaaagauaa

SEQ ID NO: 1943 - RNA, 1473 nt, Artificial Sequence
  derived and/or modified protein sequence (opt6) from LASV(Weller;Clade III)__AAT49010__GPC
augggacaaauagucaccuucuuccaagaaguaccacacgucauagaagaaguaaugaauauuguauuaauagcauuauccgucuuggccauacucaaaggacuuuacaacuucgcaaccugcggccuaauaggccuaguaacauuccuacuauuaucaggacgaucuugcucaaugauauauaaaggaguauacgaacuacaaacauuagaauuaaacauggaaacacuaaauaugacaaugccacucucauguacuaaaaacaccucacaccauuauauacgcguuggaaacgacacaggccucgaauuaaccuuaacaaacgaaacauuacuccaucacaaauuuugcaauuuaucugacgcacacaaaagaaaccucuacgaccacgcacuuaugagcauaaucagcacauuccacuuaagcauaccaaauuucaaccaauaugaagcaaugagcugugacuucaauggaggcaaaauaacaguacaauacaaccuaucacacucauacgcaguugacgcagcaaaacauugcggaacaguagcaaacggaguucuacaaacauucaugagaauggcauggggaggauccuauauugcauuagauucaagacauggaaacugggacugcauaaugaccaguuaucaauaucuuauaauacaaaacacaacaugggaagaucacugccaauucucaagacccucuccaauagguuaccuaggguuacuaucacaacgaacacgcgacauauacauaucaagaagacuacuaggaaccuucacauggacauuaucagacucagaagguaacgaaacaccaggagguuacugcuuaacaagauggauguuaauagaagcagaauuaaaauguuucggaaauaccgcaguagcaaaauguaacgaaaaacacgacgaagaauuuugcgauauguuacgucuauuugacuuuaacaaacaagcaauucgucgacuaaaaaccgaagcacaaaugucaauacaacuaauaaacaaagcaguaaacgcacuaauuaacgaccaacuaauaaugaaaaaccacuuacgagacauaaugggaauaccuuacugcaacuacucaaaauacugguaccuaaaccauacuucaacaggaaaaacaucauuaccuagauguuggcuaguaucaaacggauccuaccuaaacgaaacgcacuucucagacgacaucgaacaacaagcagacaacaugaucacagaaaugcuacaaaaagaauacuuagauagacaaggaaaaacaccauuaggauuaguagaccuauucguuuucucaacaucuuuuuacuuaauaucaaucuuccuacaccucauaaaaauaccaacacauagacacaucguuggaaaaccaugcccaaaaccacacagacuuaaccacaugggcauauguucaugcggacucuacaaacaaccaggaguuccaguaagauggaaaagauaa

SEQ ID NO: 1944 - RNA, 1476 nt, Artificial Sequence
  derived and/or modified protein sequence (opt6) from LASV(BA366;Clade IV)__ADI39451__GPC
augggacaaauaguaacauuuuuccaagaaguaccacacgucauagaagaaguaaugaacauaguuuuaauagcucuauccguauuagcaguacuaaaaggauuauacaacguagccacaugcggccuuaucggacuaauagcauuucuauuacuaugcggccgcagcugcacaacuacauuauauaaaggaguauacgaacuccaagcacuagaacuaaacauggaaacccuaaacaugacaaugccgcuaucauguacaaaaaauaauucccaucacuacaucaugguaggaaacgaaacaggacuagaacuaacacuaacaaauacaucaauaauaaaucauaaauucuguaaccuaucagacgcccacaaaaaaaaccuauaugaccaugcacuaaugucaauaauaucaaccuuccaccuaaguauaccaaacuucaaucaauacgaagcaaugucaugugacuuuaacggaggaaaaauuucaguacaauacaaccuaucacauacauacgcaguugacgcagcaaaccacugcggaacaguagcaaauggaguacuccaaacauucaugcgcauggcauggggcggcucauacauugcacuagacucaggacgaggaucaugggacugcauaaugacaucauaucaauaucuaauaauacaaaacaccacaugggaagaucacugccaauucaguagaccuucucccauagguuaccuuggacuacuaucccaaagaacacgcgacauauacaucucacgacgacuacuaggaacuuuuacauggacauuaucagacucagaagguaaagacacccccggaggauacugucuaacuagauggaugcucauagaagcagaacuaaaaugcuuuggaaauacagcaguagcaaaaugcaacgaaaaacacgacgaagaauuuugcgacauguuaagacucuuugauuucaacaaacaagcaauccaacgauuaaaagcagaagcacaaaugucaauacaauuaauuaauaaagcaguaaacgccuuaauuaacgaccaauuaauaaugaaaaaucaucuaagagacauaaugggaauaccauacugcaacuacucaaaauacugguaccuaaaccacacuauaacaggaagaacaucacuaccaaaaugcugguuaguaucaaacggaucuuaccuaaacgaaacacacuucucagaugacauagaacaacaagcagauaauaugauaacagaaauguuacaaaaagaauauauagaaagacaaggcaaaacaccacuagguuuaguagauuuauuuguauucucaacauccuucuaccuaauaucaauauucuuacaccuuauaaaaauaccaacacacagacauauaguuaacaaacccuguccaaaaccacacagauuaaaccauaugggcguuuguucauguggacuauauaaacaaccuggaguaccaguccgauggaaacguuaa

SEQ ID NO: 1945 - RNA, 1476 nt, Artificial Sequence
  derived and/or modified protein sequence (opt6) from LASV(G1180-SLE-2010;Clade IV)__AIT17168__GPC
augggacaaauaguaacauucuuccaagaaguaccacauguaauugaagaaguaaugaauauaguacuaaucgcucuaucuauccucgcaguacuaaaaggauuauauaacuucgcaacuuguggacuagucggcuuacuaacuuuccuccuauuaugcggacgaucuugcacagcaucaagauauaaaggaguuuacgaacuacaaacccuugaauuaaacauggaaacacuaaauaugacaaugcccuuaagcuguacaaaaaacaauucucaucauuacauaaugguaggaaacgaaacaggauuagaauuaacauuaacaaauacauccauaauaaaccauaaauucugcaauuuaucagacgcacacaaaaaaaaccucuacgaccaugcacuuaugucaauuauaucaacauuccacuuaucaauacccaacuucaaucaauacgaagcaaugucuugcgacuucaauggaggaaaaauaucaguacaauacaauuuaucccauucauaugcaggagacgcagcaaaccauugcggaacaguugccaacggaguccuacaaacauuuaugcgaauggcauggggaggaucauauaucgcacuagacaguggacacggaucaugggacugcauaaugacaagcuaccaauaucuaaucauacaaaauacuacaugggaagaccacugccaauucagccgaccaagcccaauaggauaucuaggccuacucucacaacgcacaagagauauauacauaucaagaagauuacuaggaacauuuacauggacauugucagacucugaaggaaaagacacaccaggagguuauugccuuacaagauggauguuaauagaagcagaauuaaaaugcuuuggaaacacggcuguagcuaaaugcaacgaaaaacacgaugaagaauucugcgauauguuaagacuauuugauuuuaacaaacaagcaauccaaagacuaaaagcagaagcacaaaugucaauacaacuaaucaacaaagcagucaaugcauuaauaaaugaccaacuuauaaugaaaaaucacuuaagagacauaaugggcauaccauacuguaauuacucaaaauauugguaccuaaaucacacaaccacaggaaaaacuagccuaccaaaaugcugguuaguaucaaauggaucuuacuuaaaugaaacacacuucucugacgauauagaacaacaagcugacaacaugauaacagaaaugcuccaaaaagaauacauggaaagacaaggaaaaacaccacuuggauuaguagaccuauucguauucagcaccuccuuuuauuuaauaucaauauuccuacaccucguaaaaauaccaacacauagacauaucgucggaaaaagcugcccaaaaccacaccgacuaaaucacaugggaauaugcucguguggccuauauaaacaaccaggagucccaguaaaauggaaaagauaa

SEQ ID NO: 1946 - RNA, 1476 nt, Artificial Sequence
  derived and/or modified protein sequence (opt6) from LASV(G1190-SLE-2010;Clade IV)__AIT17172__GPC
augggucaaauaguaacauucuuccaagaaguuccccacgucauagaagaagucaugaacaucguacuaauagcacuaucaauacuagcaguauuaaaaggacucuacaauuuugcaacaugcggauuaguaggcuuagucacauucuuacuacuaugcggacgauccugcaccaccucccuauauaaaggagucuacgaacuacaaacacuagaacuaaacauggaaacucuaaauaugacaaugcccuuaaguugcacaaaaaacaacucucaucauuacaucaugguaggcaacgaaacaggauuagaauuaacacuaacaaacacuaguauaauaaaucacaaauuuuguaaccuuucagacgcacauaaaaaaaaccuauacgaccacgcuuuaaugucaauuaucucuacuuuccaccuaucaauaccaaacuucaaccaauacgaagcaaugucaugcgacuuuaacgguggaaaaauauccguacaauauaauuuaucccacuccuaugcaggcgacgcagcuaaucacuguggcacuguagcaaacggaguuuuacaaacauucaugagaauggcauggggagguagcuauaucgcguuagacucuggaagaggaagaugggauugcauaaugacaucauaucaauaccuaauaauucaaaacacaacaugggaagaucacugccaauucucuagaccaucaccaauaggauaccuuggccuauuaucacaaagaacaagagacauauacauaucaagacgacuauuaggaacauuuacauggacacuauccgauucagaaggaaaagacacaccaggaggauauugcuuaacuagauggaugcuaauagaagcagaacucaaaugcuucggaaauaccgcaguagcaaaauguaacgaaaaacaugaugaagaguucugcgacaugcuaagacuauuugacuuuaauaaacaagcaauccaaagauuaaaagcagaagcacaaaugaguauacaauuaauaaacaaagcaguuaacgcccuaaucaacgaccaacuaauaaugaaaaaccaccucagggauauaaugggcauaccauacuguaacuacucaaaauacugguaccuaaaucacacaacaaccggaaaaaccucacucccaaaaugcugguuagucagcaacggcucauaccuaaacgaaacacacuucucagacgacauagaacaacaagcagauaacaugauaacugaaaugcuacaaaaagaguacauggaacgccaaggaaaaacaccacuaggacuuguugauuuauucguauuuuccacaucauuuuacuuaauuucaauauuucuccauuuaguuaaaauaccaacacaccgacauauaguaggaaaaccaugcccacgaccccacagacuaaaccacaugggcauaugcucaugcggacuauacaaacaaccuggaguaccagucaaauggaaaagauaa

SEQ ID NO: 1947 - RNA, 1476 nt, Artificial Sequence
  derived and/or modified protein sequence (opt6) from LASV(G1200-LIB-2010;Clade IV)__AIT17176__GPC
augggacaaauaguaacauuuuuucaagaaguaccacacguaauagaagaaguaaugaauauaguauuaauugcccuaucacuacuagcaguucuaaaaggacuuuauaacgucgcaacaugcggccuaauuggauuaauaaccuuccuacuauuaugcggacgaucauguacaacaaaccuauacaaaggaguauacgaacuacaagcacuagaacuaaauauggaaacuuuaaacaugacaaugccauuaucaugcaccaaaaacaacucucaccacuacauaauggucggcaacgaaacuggacuagaacuaacacuaacaaacacaucaauaauaaaccacaaauucugcaaccuaucagacgcacauaaaaaaaaccucuaugaccacgcccuaauguccauaauauccacauuucaucuaucuauaccuaacuucaaccaauaugaagcaaugucaugugauuucaacggaggacgaauaucuguacaauauaaccuaagccauucauacgcaggagaugcagcaucucacugcggaacuauagcaaacggaguacuacaaacuuuuaugcgaauggccuggggcgguucauauauagcacuagauuccggacacggaggaugggauuguauaaugacuuccuaccaauauuuaauaauacaaaauacaacaugggaagaccauugccaauucucaagaccaucaccaauaggauaccucggacuacuaucucaacgaaccagagacauauauaucagccgacgacuauuaggcacauucacauggacuuuauccgacucagaaggaaaagauacuccaggaggauacugucuaacaagauggaugcuaauagaagcagaauugaaaugcuuuggaaauacagcaguagccaaaugcaaugaaaaacacgacgaagaauucugcgacauguuaagacuauuugacuucaacaaacaagcaauacaaagauuaaaagcagaagcacaaaugucaauacaacuaauaaauaaagccguaaacgcuuuaauaaacgaccaauuaauuaugaaaaaccaccuaagagacauaaugggaauaccauacugcaacuauucuaaauauugguauuuaaaccauaccguuacgggaaaaacaucacuaccuaaaugcuggcuaguaucaaauggaucauacuuaaaugaaacacacuucucagacgacauagaacaacaagccgacaacaugaucacugaaauguuacaaaaagaauacauggaaagacaaggaaaaacaccccuaggccuaguagacuuauuuguauuuucaaccucauucuaccuaauaucaauauuucuccaccuaguaaaaauaccaacccacagacauguaguaggcaaaccaugcccaaaaccacaccgacuaaaucacauggguauaugcucauguggauuauauaaacaacccggaguaccugucagauggaaaagauaa

SEQ ID NO: 1948 - RNA, 1476 nt, Artificial Sequence
  derived and/or modified protein sequence (opt6) from LASV(G1442-SLE-2011;Clade IV)__AIT17180__GPC
augggacaaauagucacuuuuuuccaagaaguaccacauguaauagaagaaguuaugaacauaguauuaauagcauuaucuauauuagccguacucaaaggucuauacaaugucgcaacauguggacuaauagguuuagucacauucuuacuccuaugcggaagaucauguacaacaacacuauacaaaggcguauacgaacuucaaacuuuagaacuaaacauggaaacauuaaacaugaccaugccucuauccugcacaaaaaacaacucacaccauuacauuagaguaggaaacgaaacaggacuagaacuaaccuuaacgaauacaucaauaauuaaccacaaauucugcaaccuaucagacgcccacaaaaaaaaccuauaugaccacgcauuaaugucuauaaucucaacauuccaccuaucaauuccaaacuucaaccaauacgaagcaaugucaugcgauuucaauggaggaaaaauaucaguacaauauaaccuuucacacucauacgcaggagacgcagcuaaccacugcgguacagucgcaaauggaguauuacaaacauucaugcguauggcaugggguggcucauauauagcacuugauucaggaagaggaaauugggauugcauuaugacuuccuaucaauaucuaauaauacaaaauacaacaugggaugaccacugucaauucucaagaccuucaccaauaggcuaccuaggacuauuaucacaaagaacccgagauguauacauaucacgacgacuuuuaggaacauucacauggacauuaucagacucagaaggcaaagacacaccaggagguuacugucuaaccagauggauguuaaucgaagcagaacuaaaaugcuuuggaaacacugcaguagcaaaauguaacgaaaaacacgaugaagaauucugugauauguuaagacuauucgauuucaacaaacaagcaauacaacgacucaaagcagaagcacaaauguccauucaacuaauuaacaaagcaguaaacgcucuaauaaacgaccaacucaucaugaaaaaccacuuaagagauauaaugggaauccccuacugcaauuacucaaaauacugguaccuaaauaacacugcaacuggcaaaaccucauuaccaaaaugcuggcucauaucuaauggcucauauuuaaacgaaacccauuucucagacgacauagaacaagaagccgauaacaugauaacagaaauguuacaaaaagaauacauggaaagacaaggaaaaaccccacuaggauuaguagacuuauucguauuuuccacuucauucuaucuaauaucaauauuccuacaccuagucaaaauaccuacacaccgacacauaguaggaaaauccuguccaaaaccccaucgacuaaaccacauggguauaugcuccugcggacuauacaaacaaccaggagucccaguaagauggaaaagauaa

SEQ ID NO: 1949 - RNA, 1476 nt, Artificial Sequence
  derived and/or modified protein sequence (opt6) from LASV(G1529-SLE-2011;Clade IV)__AIT17184__GPC
augggacaaauagucacuuucuuccaagaagucccccacgucauugaagaaguaaugaacaucguucucauagcccuuaguauauuagcaguucuaaaaggauuauacaacguagccacuugcggacuaauaggacuaguaacauucuuauuacucugcggacgaucaugcacaacaaccuuauacaaaggaguauaugaauuacaagcacuagaacuaaacauggaaacacuaaauaugacaaugcccuuaucaugcacaaaaaacaacagccaucauuacauuagaguaggaaaugaaaccggacuagaacuaacauuaacaaacacaucaauuauugaucacaaauucugcaaccuaucugacgcacacaaaaaaaacuuauaugaucacgcacuaaugucaauaauauccacauuccacuuauccauaccaaauuuuaaccaauaugaagcaaugucaugcgacuucaacggaggaaaaauaagcguacaauauaacuuaucucauaguuacgccggagacgcagcaaaccauuguggaacaguagcuaauggaguccuacaaacauucaugagaauggccuggggaggcaguuacauagcacuagacagcggacgaaacggcugggacugcauaaugacuucauaucaauaucuaaucauacaaaacacuacaugggacgaucacugccaauuuucacgaccaagcccaauagguuaccucggauuacuaagucaaagaacacgagacauauauauaagcagaagauuacuaggcacauucacauggacacuaucagauucagaaggaaaagacacaccagggggauacuguuuaacaagauggaugcuaauagaagcagaacucaaaugcuucggaaacacagcaguagcaaaaugcaacgaaaaacaugacgaagaauucugcgacaugcucagacuauucgacuucaauaaacaagcaauaagaagauuaaaagcagaagcacaaauguccauacaacuaauaaauaaagcaguaaacgcauuaauaaacgaccaacucauaaugaaaaaccauuuaagagacaucauggguaucccuuauugcaacuacucaaaauacugguauuugaacaauacagccacaggaaaaacuucucuaccaagaugcugguuaguaucaaacggaucauauuuaaaugaaacacauuucucagacgacaucgaacaacaagcagacaacaugauaacagaaaugcuccaaagagaauauauggaaagacaaggaaaaacaccacuaggacuagucgaucuauucgucuucagcacauccuuuuaucuaauuuccaucuuccuacauuuaguaaaaauaccaacacacagacauauaguaggaaaaccaugcccaaaaccacaucgacuaaaccacaugggaauuugcucaugcggacuauacaaacaaccaggcguaccagucaaauggaaacgauaa

SEQ ID NO: 1950 - RNA, 1476 nt, Artificial Sequence
  derived and/or modified protein sequence (opt6) from LASV(G1618-SLE-2011;Clade IV)__AIT17188__GPC
augggacaaauaguaacauucuuccaagaagucccacacgucaucgaagaagucaugaacauaguauuaauagcacuaucuauacuagccguauuaaaaggauuauacaauuucgcaacuuguggauuuguaggacuagucaguuuccugcuacuaugcgguagaucaugcacaacaucauuauacaaaggaguauacgaacuacaaacacuagaacuaaauauggaaacccuaaacaugacaaugccacuaucuugcacuaaaaacaacucacaccauuauaucaugguaggaaacgaaacaggacuagaauuaacacuaacuaacacauccauaauaaaccauaaauucugcaaccuauccgaugcacacaaaaaaaauuuauacgaccacgcacuaaugucaauaaucucuacauuucauuuaucaauaccuaauuucaaccaauacgaagccaugucaugcgacuuuaauggcggcaaaauauccguacaauauaaccucucacacucauacgcagucgaugcagcaaaucacugcggcaccgucgccaacggaguacuucaaacauucaugagaauggcuuggggaggaagcuacaucgcucuagacucaggacacgguucaugggauuguaucaugacauccuaccaauacuuaauaauacaaaauacuacaugggaagaccacugccaauucucaagaccaucaccaaucggauacuuaggucuacuaucccaaagaacaagagauauauauauauccagaagacuauuaggaaccuucaccuggacacuaucagacucugaaggcaaagauacaccuggaggcuauugccuaacuagauggauguuaauagaagcagaacuaaaaugcuucggcaacacagcaguagcuaaaugcaacgaaaaacacgaugaagaauucugcgacauguuaagauuauuugauuuuaauaaacaagcuauacaaagacuucgagcagaagcacaaaugucuauucaauuaauaaacaaagcuguaaaugcauuaauaaacgaccaacuaauaaugaaaaaucaucucagagacauaaugggaauaccauacuguaauuacucaaaauacugguaccuaaaccauacaacaacagguagaacaucucuaccaaaaugcuggcuaguuucaaacggauccuaccuuaaugaaacacauuuuucagacgauauagaacaacaagcagacaacaugaucacagaaaugcuacaaaaagaauacauggaaagacaaggaaaaacaccucuaggauuaguagaccuauuuguauucuccacaucauuuuauuuaauauccauauuccuacaccuaguaaaaauaccaacacacagacacaucguuggcaaaucaugcccaaaaccacaucgacuaaaccacaugggaaucuguucaugcggcuuauauggccaaccagguguaccaguaaaauggaaaagauaa

SEQ ID NO: 1951 - RNA, 1476 nt, Artificial Sequence
  derived and/or modified protein sequence (opt6) from LASV(G1646-SLE-2011;Clade IV)__AIT17192__GPC
augggccaaauuguaacauucuuccaagaaguaccacacguaauagaagaaguaaugaauauaguacuuauagcccuauccauacuagcaguccuaaaaggauuauauaauuuugcaacauguggauucauaggacuaguaucauuucucuuacuaugcggaagaucuugcaccacaucacucuacaaaggagucuacgaacuccaaaccuuagaauuaaauauggaaacacuaaacaugaccaugccauuaaguugcacaaaaaacaacagccaccacuacauaaugguaggcaaugaaaccggacuagaauuaacacuaacaaauacaagcauaaucaaccauaaauucugcaaucugucagacgcucauaaaaaaaaccuauaugaccaugcacuaaugucaauaauaaguacuuuccaccuauccauaccaaauuucaaccaauucgaagcaaugucuugcgacuucaacgguggcaaaauaucuguacaauauaaccuaucccacucauaugcaguagaugcagcaaaccauugcggaacagucgcaaacgguguauuacaaaccuucaugcgaauggcauggggaggauccuacauugcacuagauucuggacacggaucaugggacuguauaaugacaagcuaucaauacuuaauaauacaaaacacaacaugggaagaccauugccaauuuucaagaccaucaccaaucgguuaucuaggacuacucucacaacgcacaagagauauauacauaaguagaagacuucuaggaacauucacauggacauuaucagacagcgaaggaaaagauacaccaggaggauauugcuuaacuagauggaugcuuauagaagcagaacuaaaaugcuucggcaacaccgcuguagcaaaaugcaacgaaaaacacgacgaagaauucugcgauaugcuacgauuauucgacuucaacaaacaagcaauacaaagauuaaaagcagaagcacaaaugucaauacaauuaauaaacaaagcaguaaacgcacuaaucaacgaccaauuaauaaugaaaaaccacuuacgugacauaaugggaaucccuuacugcaacuacagcaaauacugguaucuuaaucacacaacaacaggaagaacaucauuacccaaaugcugguuaguauccaacggaucauaccuaaaugaaacccacuucucugaugauaucgaacagcaagcagacaacaugauaaccgaaaugcuccaaaaagaauacauggaaagacaaggcaaaacaccccuaggauuagucgacuuauuuguauucucuaccucauuuuacuuaauauccauauucuuacaccuuguaaaaauacccacccauagacacauaguaggaaaaucaugcccaaaaccacaccgauuaaaccauaugggcauaugcucaugcggauuauacggacaaccaggaguaccagucaaauggaaaagauaa

SEQ ID NO: 1952 - RNA, 1476 nt, Artificial Sequence
  derived and/or modified protein sequence (opt6) from LASV(G1647-SLE-2011;Clade IV)__AIT17196__GPC
augggacaaauaguaacauucuuucaagaaguaccacauguaauugaagaaguaaugaauauaguccuaauagcacucucaauauuagcagucuuaaaaggauuauauaacuuagcuaccugcggacuagucggacuaguuacauuccuguuacuuugcggacgauccuguaccacaucacucuauaaaggagucuacgaauuacaaacauuagaauuaaacauggaaacacucaacaugacaaugccacuaucaugcacaaaaaacaacucacaucacuacauuauggucggaaacgaaacaggccucgaacuaacauuaacaaauacuucaauaauaaaccacaaauucugcaauuuguccgaugcccacaaaaaaaaucuauaugaccacgccuuaaugucuauaauuucaacauuccaccuauccauaccaaacuuuaaccaauacgaagcaaugucaugugacuucaauggaggaaaaauauccguacaauacaaucuaucucacuccuacgcaggagacgcugccaaccacugcggaacaguagccaacggaguacuacaaaccuucaugagaauggcuuggggaggaucauacauugcacucgauucuggacgcggucgaugggacugcauuaugacauccuaccaauacuuaauaauacaaaauacaacaugggaagaccauugucaauuuucaagacccucuccaauaggauaucuagguuuacuaucucaaagaacaagagauauauauauaucuagaagacuacuuggaacauucacauggacauuaagcgacucagaaggaaaagauacaccagguggcuacugccuaacaagauggaugcuuauagaagccgaacuaaaaugcuuuggaaauacagcaguagcuaaauguaaugaaaaacacgaugaagaauucugcgacaugcuuagauuauucgacuucaacaaacaagcgauccaaagacucaaagcagaagcacaaaugaacauacaauuaauaaacaaagcaguaaaugcucuaauaaacgaccaacuaauaaugaaaaaucaccuaagagauauaaugggcauaccauauugcaauuacuccaaauauugguauuuaaaccacacaacaaccggaaaaacaucacuaccaagaugcuggcuaguauccaacggaucauaccuaaacgaaacccauuucucagacgauaucgaacaacaagccgauaacaugauaacugaaaugcuucaaaaagaauacauggaaagacaaggaaaaacuccacuaggucuagucgaucuauucguauuuagcacaagcuuuuaccuaaucucaauauuucuacaccuaguaaaaauccccacccacagacacauagucggaaaaccaugucccaaaccacaccgacuuaaccacaugggcaucugcucguguggauucuauaaacaaccuggaguaccagucaaauggaaaagauaa

SEQ ID NO: 1953 - RNA, 1476 nt, Artificial Sequence
  derived and/or modified protein sequence (opt6) from LASV(G1774-SLE-2011;Clade IV)__AIT17204__GPC
augggacaaauagucacuuuuuuucaagaagucccacacgucauagaagaagucaugaauauaguacucauagcacuaucuauacuagcagucuuaaaaggacuauacaaccuagcaaccuguggucuaguaggacuaguaacauucuuauuauuaugcggaagaucaugcacaucaucacuuuauaaaggaguauaugaauuacaaacacuagaauuaaacauggaaacacuaaacaugaccaugccauuaucaugcacuaaaaacucaucacaccauuacauaagaguuggaaacgaaacuggauuagaacuuacacuaacaaauacuuccauaauaaaccauaaauuuugcaacuuaucagacgcacacaaaaaaaaucuauacgaucacgcacuaaugucaauaauaucaacauuccaucuaucaauaccaaacuucaaucaauacgaagcaaugucaugugacuucaacggagguaaaauaucaguucaauacaaucuaucacacucauacgcaggagaugcagcaaaccacugugguaccguagcaaacggaguacuacaaacauuuaugagaauggcauggggaggaagcuacauagcccuagacuccggucaugaccgaugggacugcauaaugacuucauaucaauacuuaauaauacaaaacacaacaugggaagaccauugccaauucucacgacccuccccaauaggcuaccuagguuuauuaucgcaaagaacaagagauauauacauaucacgacgucuacuuggcaccuuuaccuggacucuaucagacucagaaggaaaagacacaccuggcggauacugucuaacacgauggauguuaauagaagcagaacucaaauguuuugguaauacagcagucgcuaaaugcaacgaaaaacacgacgaagaauuuugcgacaugcuaagacuauucgauuucaacaaacaagcaauacaacgacuaaaagcagaagcucaaaugucaauccaauuaauaaacaaagcgguaaacgcucuaauaaacgaccaacucauaaugaaaaaccacuuacgagauauaaugggaauaccauauugcaauuacuccaaauacugguaccuaaaccacacaauaacaggaaaaacaucacucccaaaauguuggcuuguauccaauggcucauauuuaaacaaaacacacuucagugacgacauagaacaacaagcagacaauaugauaacagaaaugcuacaaaaagaauacauggaaagacaagguaaaaccccacucggccuaguagaccuauucguauuuuccacuucauucuaccuaauaucaauuuuucuccacuuaaucaaaauaccaacccaccgacacauaguaggaaaaccaugcccaaaaccucaucgacuaaaccauaugggaauauguucaugcggauuauauaaacaaccaggaguaccagucaaauggaaaagauaa

SEQ ID NO: 1954 - RNA, 1476 nt, Artificial Sequence
  derived and/or modified protein sequence (opt6) from LASV(G1792-SLE-2011;Clade IV)__AIT17208__GPC
augggccaaauaguaacauucuuccaagaaguaccacacguaauagaagaaguaaugaauaucguauuaauagcauuaucaauauuagcaguuuuaaaaggacuauauaacuucgcuacauguggacuaaucggcuuaguaacuuuccuacuacuaugcggacgaucauguaccacaucccucuauaaaggaguauacgaacuacaaacauuagaauuaaauauggaaacacuaaacaugacaaugccacuuuccuguacaaaaaacaauucacaccacuacauaaugguaggaaaugaaacuggauuagaauuaacauuaacaaacacauccaucauaaaccauaaauucugcaaucucagcgacgcucacaaaaaaaacuuauacgaccacgcauuaauguccauaauauccacauuccaucucucaauaccaaacuucaaccaauaugaagccaugaguugugauuucaacggaggaaaaauaucaguacaauacaaccuaucccacuccuaugcaggugaugcugcaaaccauugcggcaccguagcaaacggaguacuacaaacauucaugcgcauggccuggggagguucauacauagcacuagauucaggcagaggacaaugggauuguauaaugacuucauaucaauacuuaauaauacaaaacacuacaugggaagaccacugccaauucucacgaccaucuccaaucggauaccuaggacuacuuucccaacgaacaagagacauauauauaucaagaagacuacucggaacuuuuaccuggacacuauccgacucagaaggaaaagauacuccaggugguuauuguuuaacaagauggaugcuaauagaagcagagcuaaaaugcuucggaaacacagccguugcaaaaugcaacgaaaaacaugacgaagaauuuugugacaugcuuagacuauuugacuucaacaaacaagcaauccaacgccuaaaagcagaagcacaaaugucuauacaacuaauaaauaaagcaguaaaugcccucaucaacgaucaauuaauaaugaaaaaccaucuaagagacauaaugggaauaccauauuguaacuauucaaaauacugguacuuaaaucacacaacaacuggcaaaacaaguuuaccuaaauguuggcuagucucaaacggauccuaccucaacgaaacacauuuuuccgacgacauagaacaacaagcagauaauaugauaacagaaauguuacaaaaagaauauauggaaagacaaggaaaaacaccacuuggacuaguagaccuauucguauucucaacaucuuuuuacuuaauaagcauauuccuacacuuaguuaaaauaccaacacacagacacauaguugguaaaucuugcccaaaaccccauagauuaaaccauaugggaauauguucaugcggacuauacaaacaaccaggaguacccguaaaauggaaaagauaa

SEQ ID NO: 1955 - RNA, 1476 nt, Artificial Sequence
  derived and/or modified protein sequence (opt6) from LASV(G1897-SLE-2011;Clade IV)__AIT17210__GPC
augggacaaauaguaacauuuuuucaagaaguaccacacguaauagaagaagucaugaacauaguacucauugcauuaagcauacucgcaguauuaaaaggucuauacaaccuagcuacaugcggacuaguaggucuaguaacauuccuacuacuaugugguagauccugcacaacauccuuauauaaagguguauaugaacuacaaacauuagaauuaaauauggaaacacuaaacaugacaaugccacugucauguacaaaaaacaauucccaccacuauauaaugguaggaaaugaaacaggcuuagaacuuacauuaacaaauacaucaauaauuaaccacaaauucugcaaucuuuccgaugcacacaaaaaaaaccuauaugaccacgcacuaaugucaauaaucucaacauuccaccuuuccaucccaaauuucaaccaauacgaagcaaugucuugugauuuuaacggaggcaaaauaucaguacaauacaaccuaagucacucauacgcaggugacgcagcaaaccauugcggaaccguagcaaacgguguacuccaaacauucaugcgaauggcauggggaggauccuacaucgcacuagacuccggaagagacagaugggacugcauaaugacauccuaccaauaccuaauaauacaaaacacaacaugggaagaucacugccaauuuucuagaccauccccuauaggcuacuuaggacuccuaucacaaagaaccagagacauauacauaaguagacgauuauuaggaacauuuaccuggacacuaucagacucagaaggaaaagacacaccaggaggauacugucuaacuagauggaugcuuauagaagcagaacuaaaauguuuuggcaacacagccguagcaaaauguaacgaaaaacacgaugaagaauucugcgacaugcuuagacucuucgacuuuaauaaacaagcaauacaaagauuaaaagcugaagcacaaaugucaauacaacuaauaaauaaagcaguaaacgcacuaauaaacgaccaacuaauaaugaaaaaccaccuacgagacauaaugggaauucccuauugcaauuacagcaaauacugguaccuaaaccauacaacuacaggaaaaacaucacuuccaaaaugcugguuaguaucaaacggaucauauuuaaaugaaacacauuucuccgacgacauagaacaacaagcagauaacaugauaacagaaaugcuucaaaaagaauacauggaaagacaaggaaaaacaccacuaggccuaguagaccucuucguauucuccacaucauucuaccuaaucucaauauuucucagacuaguaaaaauaccaacucacagacauauaguaggaaaaccaugcccaaaaccacaccgacuaaaucauauggguauaugcucuugcggcuuauacaaacaaccagguguaccaguaaaauggaaaagauaa

SEQ ID NO: 1956 - RNA, 1476 nt, Artificial Sequence
  derived and/or modified protein sequence (opt6) from LASV(G1932-SLE-2011;Clade IV)__AIT17212__GPC
augggacaaauuguaacauucuuccaagaaguuccacacguaauagaagaaguaaugaauauaguacuaauagcacuuucaauacuagccguacuaaaaggccuauauaauuuagcaaccugcggauuaguaggauuaguaacauuccuacuacuaugcggcagaucaugcacaacaucacuauacaaaggcgucuaugaauuacaaacccuagaacuaaacauggaaacauuaaacaugacaaugccauuaucauguaccaaaaauaacucacaccauuacauaaugguaggaaacgaaacaggacuagaauugacacuaacuaacaccucaauaauaaaccacaaauucugcaaccuaagugacgcccacagaaaaaaucuauaugaccacgccuuaaugucuauaauaucaacauuucaucuaucaauaccuaacuuuaaucaauacgaagcaaugucaugugacuucaacggaggaaaaauaucaguucaauacaaccuaucacacucuuacgccggcgacgcagcuaaccauugcggaacaguagccaacggaguacuacaaacuuuuaugagaauggcuuggggaggaagcuauauugccuuagacucaggacgaggaaaaugggacuguauuaugacuucauaucaauacuuaauaauacaaaauacaacaugggaagaccacugccaauucucacguccaucaccaauaggauaucuaggacuacucucccaacguacacgagauauauacauaucccgacgccuacuagguacauucacauggacgcuauccgacucugaaggaaaagacacaccuggaggauacugccuaaccagauggaugcuaauagaagcagaacuaaaaugcuucggaaacacagcaguagccaaauguaaugaaaaacaugaugaagaauuuugugacaugcuuagacucuucgacuucaacaaacaagccauacaacguuuaaaagccgaagcacaaauguccauacaacuaaucaauaaagccguuaacgcacuaauaaacgaccaacuaauaaugaaaaaccaccuaagagacauaaugggaauaccauacugcaauuacucaaaauacugguacuuaaaucauacuacuacaggcaaaaccucacucccaagauguuggcuaguauccaacggaucauaccuaaacgaaacacacuucucagaugauauagaacaacaagcagauaacaugauuacagaaauguuacaaaaagaauauauggaaagacaaggaaaaaccccauuaggauuaguagaucucuuugucuucuccacaucuuucuaccuaauaucuauauuccuacaccuuguaaaaauaccaacacaccgucacauuguaggaaaaccaugcccaaaaccacacagacuaaaccacaugggaauaugcucaugcggacuauacaaacaaccuggaguaccagucaaauggaaaagauaa

SEQ ID NO: 1957 - RNA, 1476 nt, Artificial Sequence
  derived and/or modified protein sequence (opt6) from LASV(G1959-SLE-2011;Clade IV)__AIT17216__GPC
augggacaaauagucacauucuuccaagaaguaccacauguuaucgaagaaguaaugaauaucguauuaauagcccuuucaauauuagcaguacuaaaaggacuauacaacuucgccacaugcggauuaguaggcuuagucacauuccuauuacuaugcggaagaucauguaccacaucucucuacaaaggaguauacgaacuacaaaccuuagaacuaaacauggaaacacucaauaugacaaugccacuaucaugcaccaaaaacaauucccaccacuacauaaugguuggaaaugaaacaggcuuagaacuaacacugacaaacacuucaauaauaaaccauaaauucugcaacuuaucagacgcacauaagaaaaaucucuacgaucaugcccuaaugucaauuauaucaacuuuucaucuaucaauaccaaauuuuaaccaauacgaagcaaugucaugcgacuucaacggagguaaaauauccguacaauacaaucuaucucacucuuacgcgggagacgcagcaaaccacugcggaacaguagcaaauggaguccuacaaacauucaugagaauggcauggggaggaucauacauagcauuagacucaggacauggcagaugggacuguauaaugacauccuaccaauaccuaauaauacaaaauaccacaugggaagaccauugccaauucucccgaccaucuccaauagguuauuuaggcuuauuaucacaaagaacaagagacauuuauauaucaagaagauuacucggaacuuucaccuggacauuaucugauuccgaaggaaaagacacaccaggaggauauugucuaacaagauggaugcuaauagaagccgaauuaaaaugcuuuggcaacacagcagucgccaaauguaacgaaaaacaugacgaagaauuuugcgacauguuaagauuauucgacuucaacaaacaagcaauacaaagauuaaaagcagaagcacaaaugucaauacaauuaauaaacaaagcagucaacgcacuaauaaaugaccaauuaauaaugaaaaaccaucuuagagacauuaugggcauaccauacuguaacuacucuaaauacugguacuuaaaucacaccacaaccggaaaaacaucccuaccaaaauguugguuagucagcaauggaucauauuuaaacgaaacccacuucuccgacgacauagaacaacaagcagauaauaugaucacagaaaugcuccaaaaggaauacauggaaagacaaggaaaaacaccauuaggccucgucgacuuauucguauucucaaccucauucuauuuaauaucaauauuccuacaccucguaaaaauaccaacacacagacacaucguaggaaaaccaugccccaaaccccacagacucaacuauaugggaauaugcucaugcggccuauacaaacaacccgguguuccaguacgauggaaaagauaa

SEQ ID NO: 1958 - RNA, 1476 nt, Artificial Sequence
  derived and/or modified protein sequence (opt6) from LASV(G2141-SLE-2011;Clade IV)__AIT17224__GPC
augggccaaauuguaaccuuuuuccaagaaguaccacauguaauagaagaaguaaugaacauaguacuuauagcacuaucuauucuugcuguacuaaaaggauuauacaacguagcaacauguggucucauuggccuaguuacuuuccuccuacuaugcggaagaucuuguaccaccacauuauauaaaggaguauacgaacuacaagcgcuagaauuaaacauggaaacacuaaacaugacaaugccccucucauguacaaaaaauaacagucaucacuauauaagaguagguaacgauacagguuuagaacuaacccuaaccaauacaucaauaauccaacacaaauucugcaacuuaucugacgcacacaaaaaaaauuuauaugaucacacuuuaaugucuauaauaucaacauuccaucuaucaauaccaaacuucaaccaauacgaagcaaugucaugugacuuuaacggaggaaaaauauccguacaauacaacuuaagucacucauacgcaggagacgcagcaucacacugcggaacaguagcaaauggagucuuacaaacuuucaugcgcauggcauggggcggaucauacauagcauuagacagcggaagaggaaauugggacugcauaaugaccagcuaccaauaucuaauaauacaaaacacaacaugggaagaccacugccaauuuucacgaccaagcccaaucgguuaccuaggacuauuaucacaaagaacucgcgacauauacauauccagaagacuacuaggaacauucacauggacacuaucugacuccgaaggacgagacacaccaggaggauacugccucacaagauggauguuaauagaagcagaacuaaaaugcuucgguaacacagcuguagcaaaaugcaacgaaaaacacgacgaagaauucugcgacauguuaagacuauucgacuucaacaaacaagcaauacaaagacuaaaaacagaagcucaaauguccauacaacuaaucaacaaagcaguaaaugcacuaauaaaugaccaacuaauaaugaaaaaccacuuaagagacauaauggguauaccauauugcaacuauucaaaauacugguaccuaaacaacacuauaacaggaaaaucaaguuuaccaaaaugcugguuaguaucaaacggaucauaucuaaacgaaacacacuuuucagacgacauagaacaagaagcagauaacaugaucacagaaaugcuccaaaaagaauauauggaacgacaaggaaaaacaccccuaggccuaguagacuuauucguuuucucaacaucuuucuacuuaauaucaauauuucuucaccuuguaaaaauaccaacacaucgacacauaguaggaaaaccuugcccaaaaccccauagacuaaaucacaugggaguauguucaugcggauuauauaaacaaccaggaguuccaguaagauggaaacgauaa

SEQ ID NO: 1959 - RNA, 1476 nt, Artificial Sequence
  derived and/or modified protein sequence (opt6) from LASV(G2147-SLE-2011;Clade IV)__AIT17228__GPC
augggacaaauaguaacauucuuucaagaaguaccacacguaauagaagaaguaaugaacauuguacuaauagcacuaucaauacucgcaguacuaaaaggacuauauaacuucgccacaugcggauuaguaggauuauuaacauuucuacuccucugcggccgaucaugcaccacaucccucuacaaaggaguauacgaauuacaaacacuagaacuaaacauggaaacacuaaauaugacaaugccuuuaucaugcaccaaaaauaacucacaccacuacaucaugguuggaaaugaaacagggcuagaauuaacacuaacuaacacaucaauuauagaccacaaauucuguaaccuaagcgaugcacacaagaaaaaccuuuacgaccaugcacuaaugucuauaaucucaacauuucaucuaucaauacccaacuucaaccaauaugaagcaaugucaugcgauuucaacggcggaaaaauaucuguccaauacaauuuaagccacuccuacgcaggagaugcagcaaaccacuguggcaccguagcaaacggaguucuacaaacauucaugagaauggcauggggagguuccuacauagcacuagauucaggaaggggaggaugggacugcaucaugacaucuuaccaauaccuuauaauacaaaauacaacuugggaagaccauugccaauucucaagaccaucaccaauaggauauuuaggauuacuaucacaacgaacaagagacauauacauaucaagacgacuccucggcacauucaccuggacauuaucagacagugaaggaaaagauacaccaggaggauacugccucacaagauggaugcuaauagaagccgaauuaaaaugcuuuggcaacacggcaguagcaaaaugcaaugaaaaacacgacgaagaauuuugcgauaugcuaagauuauucgacuuuaauaaacaagccauccaaagauuaaaagcagaagcacaaauguccauacaauuaauuaauaaagcaguaaacgcccuaauaaacgaucaacucauaaugaaaaaucaucucagagauauaaugggaaucccauacugcaacuauagcaaauacugguaccuaaaccacaccacaaccggaaaaacaagccuaccaaaauguuggcucguaucaaacggaucauacuuaaaugaaacacauuucucugacgauauagaacaacaagccgauaacaugauaacagaaaugcuacaaaaagaauauauggaaagacaaggaaaaacaccacuaggccuaguagaccuauucgucuuuucuacaucuuucuauuuaauaucaauauuuuuacaucucguaaaaauaccuacacaucgucacauaguaggaaaaucauguccaaaaccacauagacuaaaucacaugggaauaugcucaugcggacucuauaaacaaccaggcgucccaguaaaauggaaacgauaa

SEQ ID NO: 1960 - RNA, 1476 nt, Artificial Sequence
  derived and/or modified protein sequence (opt6) from LASV(G2165-SLE-2011;Clade IV)__AIT17232__GPC
augggacaaauaguaacuuuuuuucaagaaguaccacacguaauugaagaaguaaugaauauaguacuaauagcacuaucaauauuagccguacucaaaggacuuuacaauuucgcaacaugcggauuaguaggacuaguaacauuucuacuacucugcggaagauccugcacuacaagccucuauaaaggaguauacgaacuacaaacacuagaauuaaacauggaaacacuaaacaugacaaugccacuuucuugcacaaaaaauaacucacaccauuacauacgaguaggaaaugaaacaggacuagaacuaacacuaacaaacacauccauaauaaaccauaaauucugcaaccuaucugacgcacauaaaaaaaacuuauacgaucacgcacucaugucaauuauaucaacuuuucacuuauccauaccaaauuuuaaccaauacgaagcaauguccugcgauuuuaacgaaggaaaaauaagcguccaauacaacuuaagccauucauacgcaggagaugcagcaaaccacugcggaacaguagcaaacggaguauuacaaacauucaugagaauggcauggggcggauccuacauagcucuagacucuggaagaggaaaaugggacugcauaaugaccucauaccaauaccuaauaauacaaaauacaacaugggaagaucacugccaauucagcagaccaucaccaauaggauaucucggacuacugucacaaagaacacgagacauauacauaucccguagacuccuuggaaccuucacauggacauuaucugacucagaagguaaagauacaccaggaggcuacugccuaacaagauggaugcucaucgaagccgaacuaaaaugcuucgguaacaccgcaguagccaaaugcaacgaaaaacacgacgaagaauuuugcgacauguuaagacuauucgacuucaacaaacaagcaaucgaacgacuaaaagcagaagcccaaaugucaauucaacuaauuaacaaagcaguaaaugcccuaauaaaugaccaacucauaaugaaaaaucaccuaagagacauaaugggaaucccauacugcaauuacucaaaauacugguaccuaaaccacacaacaacuggaaaaacaucauuaccaaaaugcuggcucgucuccaacggauccuaccuaaaugaaacacauuucucagaugauauugaacaacaagcagacaauaugauaacagaaaugcuacaaaaagaauacauggaaagacaagguaaaacuccacuaggauuagucgaccucuucguauucucuacaucauucuacuuaauaucaauauucuuacaccuaguaaaaauaccuacucaccgacacauaguaggaaaaucauguccaaaaccacacagauuaaaccauaugggaauauguaguugcggauuauauaaacaaccaggaguucccguaaaauggaaaagauaa

SEQ ID NO: 1961 - RNA, 1476 nt, Artificial Sequence
  derived and/or modified protein sequence (opt6) from LASV(G2184-SLE-2011;Clade IV)__AIT17236__GPC
augggacaaauaguaacauuuuuucaagaaguaccacauguaauugaagaaguaaugaacauaguauuaauugcacuaucaauacuagcaguacuaaaaggauuauacaauuucgcaacaugcggacuaguaggacuagucacauuccuacuacuaugcggaagaucaugcacaacaucccucuacaaaggaguauacgaauuacaaacauuagaacuaaacauggaaacauuaaauaugacaaugccauuauccugcacaaaaaacaauucacaccacuauauaaugguaggcaaugaaaccggacuugaacucacacuaaccaacaccucaaucauaaaccacaaauuuuguaaucuaagugaugcucauaaaaaaaaucuauacgaccacgcacugaugagcaucauaucaacauuccaucuaucaaucccuaauuucaaccaauaugaagcaaugucaugcgacuucaacggcggcagaauaucaguucaauauaaccuaucccacucuuacgcuggagaagcagccaaccauugcggaacagucgcaaacggaguccuacaaacauuuaugagaauggcauggggcggcucuuacaucgcccuagacucaggacgagguaaaugggauugcauaaugacaucuuaccaauaccuuauaauacaaaauacaacaugggaagaccauugccaauucucacgaccaucacccauaggauacuuaggucuccucagucaaagaacucgugacauauauauauccagaagauuacuaggaaccuuuacauggacacuuucagacucagaagguaaagauacaccuggaggauacugucuaacaagauggaugcuaauugaagcagaacuaaaaugcuuuggcaacacagccguagcuaaaugcaaugaaaaacacgacgaagaauucugugacaugcuuagauuauucgauuucaauaaacaagcaauacaaagauuaaaagcagaagcacaaaugucaauacaacuaauaaacaaagcaguaaaugcucuaauaaaugaucaauuaauaaugaaaaaccacuuacgggauaucaugggcauacccuacugcaacuacucaagauacugguaccuaaaccauacaaccacaggaaaaaccucccuaccaaaaugcugguuaguuucuaacggaucauaccuaaacgaaacacauuucucugacgacauagaacaacaagcugacaacaugauaacagaaaugcuccaaaaagaauacauggaacgacaaggaaaaacgccauuaggcuuaguagacuuauucguauucucaacaucauuuuaccuaauaucaauauuuuuacaccuaguuaaaauaccaacccaccgacacauuguaggaaaaucauguccaaaaccacacagacucaaccacaugggaauauguuccuguggccuauauaaacaaccaggagucccaguaaaauggaaacguuaa

SEQ ID NO: 1962 - RNA, 1476 nt, Artificial Sequence
  derived and/or modified protein sequence (opt6) from LASV(G2197-SLE-2011;Clade IV)__AIT17240__GPC
augggacaaauaguaacauucuuccaagaaguaccacacguaauagaagaaguaaugaacauaguccuaauagcacuaucaaucuuagcaguauuaaaaggacuauacaacuuagccacaugcggacuagucggauuagucacauuucuacuacucugcggaagauccugcaccacaucuuuauacaaaggauucuaugaauuacaaacauuagaauuaaacauggaaacauuaaacaugacaaugccacuaucauguaccaaaaacaacucacaucauuauauacgaguaggaaacgaaacaggccuagaauuaaccuuaacaaacacaucuaucaucgaccacaaauucugcaacuuaucagacgcacauaaaaaaaacuuauaugaccacgcacucaugagcauaauaucaacauuccauuuaucaaucccaaauuuuaaccaauacgaagcaaugucuugcgacuuuaauggaggaaaaauaucaguacaauauaaccuaucccacuccuaugcaggagacgcagccaaccacugcggcacagucgcaaacggaguucuacaaacuuucaugcgcauggcauggggaggcucauauauagcauuagauaguggcagagggagaugggauugcauaaugacaucauaucaauaccucauaauacaaaacacuacaugggaagaccacugccaauuuucaagaccauccccaauaggauaccuaggacuacuaucucaaaaaacaagagacauauacauaucaagacgacuauuagggacuuuuaccuggacauuauccgacucugaaggaaaagacacacccggaggcuacuguuuaacaagauggauguuaauagaagcagaacuaaaaugcuucggaaacacugcagucgcaaaauguaacgaaaaacaugacgaagaauucugcgacaugcuaagacuauucgacuucaacaaacaagcaauccaacgacuuaaagcagaagcacaaaugagcauccaacuaauaaacaaagcggucaacgcacuaauaaacgaccaacuaauaaugaaaaaucauuuaagagacauaaugggaauacccuacugcaacuacucuaaauauugguauuuaaaccauacaacaaccggaaaaacaucucuacccaaauguuggcuaguaucaaacgguuccuaccuaaacgaaacacacuuuuccgacgacauagaacaacaagcagacaauaugaucacagaaauguuacaaaaagaauauauggaacgacaaggaaaaacacccuuaggccuaguagaucuauucguuuucucaacaucauuuuaccuaauaucaaucuuuuuacacuuaguuaaaauuccuacacauagacacauaguaggcaaaucauguccaaaaccacacagacucaaccacaugggcauaugcucaugcggacuauacaaacaaccaggugucccaguaaaauggaaaagauaa

SEQ ID NO: 1963 - RNA, 1476 nt, Artificial Sequence
  derived and/or modified protein sequence (opt6) from LASV(G2222-SLE-2011;Clade IV)__AIT17244__GPC
augggacaaauaguuacauucuuccaagagguaccccacguaauagaagaaguaaugaauauaguauuaauagcauuaucaauacuagcaguccuuaaaggauuauauaaucuagcaaccuguggauuaguaggacuaguaacauuucuauuacuaugcggcagaucauguaccaccaauuuauauaaaggaguauaugaauuacaaacauuagaacuaaauauggaaacccuaaauaugacaaugcccuuaucuuguacaaaaaacucaucucaccauuacauaagaguaggaaacgaaaccggauuagaacuuacauuaacaaacacaucuauaauagaccacaaauucugcaacuuaucagacgcacacaaaaaaaacuuauaugaucacgcauuaaugucaauaauaucaacauuucaucuaucaauaccaaacuucaaccaauaugaagcaaugucaugcgacuuuaacggaggaaaaauauccguacaauacaaucuuucacauucuuauguuggcgaugcagcagaccauuguggaacaguagcaaauggaguuuuacaaaccuuuaugcgcauggcauggggagguucauacauagcacuagacucaggacgaggaaaaugggacugcauaauaacaucauaucaauacuuaauaauccaaaacacaacaugggaagaccacugccaauuuucacgaccauccccaauaggauaccucggacuauuaucacaaagaacacgagacaucuauauaucccgaagacuuuuaggaacauuuacauggacauuaucagacucagaaggaaaagauacuccaggaggauacuguuuaacuagauggaugcuaauagaagcagaacucaaaugcuucggaaauacugccguagcaaaauguaaugaaaaacacgaugaagaauuuugcgacaugcuaagacuauuugacuucaacaaacaagcaauccaacgacuaaaagcugaagcacaaaugucaauacaacucauaaauaaagcaguaaacgcccuaaucaacgaucaacuaauaaugaaaaaucaccuacgagacauaaugggaauaccauacugcaacuacucaaaauacugguaucucaaucauacaauaaccggaaaaacaucacucccaagauguuggcuaguaaguaauggaucauaccuaaaugaaacaagauucucagacgacaucgaacaacaagcagauaacaugauaacagaaaugcuacaaaaagaauauauggaaagacaagguaaaacuccauuaggccucguagaucuauucguauuuucaaccucauucuaccuaauuucaauauuuuuacacuuaguuaaaauaccuacacacagacacauaguuggaaaaccaugcccaaaaccucaccgacuaaaucacaugggcauaugcucaugcggauuauacaaacaaccaggaguaccagucaaauggaaaagauaa

SEQ ID NO: 1964 - RNA, 1476 nt, Artificial Sequence
  derived and/or modified protein sequence (opt6) from LASV(G2230-SLE-2012;Clade IV)__AIT17246__GPC
augggacaaauaguaacauucuuccaagaaguaccacacguaauagaagaagucaugaacauaguucuaauagcccuauccuuauuagcuguacucaaaggauuauacaacguagccacauguggacuaauaggccuaauuacauuccuauuauuaugcggacgcucaugcacaaccaaccuauacaaaggaguuuacgaacuccaaacacuugaacuaaacauggaaacacugaauaugacaaugccauuaucaugcacaaaaaacucuucacaccacuauauaaugguaggaaacgaaacuggacucgaauuaacacuaacuaacacaagcauaauaaaccacaaauucugcaaucuaucugaugcucacaaaaaaaaucuuuaugaccacacauuaaugagcauaauaucaacauuccaccucuccauaccaaacuucaaccaauacgaagcaaugucaugugacuucaacggaggcaaaauaaguguacaauacaaccuaucacauucauacgcaguagacgccgcaaaccacuguggcacagucgcaaacggcauauuacaaacauucaugagaauggcauggggaggcucauacaucgcccuagacucaggaagaggcaacugggacuguauaaugacauccuaccaauacuuaauuauacaaaacacaacaugggaagaccacugucaauucucaagaccauccccaaucggcuacuuaggauuauuaagccaaagaacaagagacaucuacauaucaagacgauuauuaggaacauuuacauggacacuaucugauagugaaggaaaugauacaccaggcggcuacugucuaacaagauggauguuaauagaagcagaauuaaaaugcuucggaaacaccgcaguagccaaaugcaacgaaaaacaugacgaagaauucugcgauaugcuaagacuauuugacuucaacaaacaagcuauccaacgauuaaaagcagaagcacaaauguccauacaacucauaaacaaagcaguaaacgcucucauaaaugaccaacuuauaaugaaaaaccaccuaagagacauaaugggaauacccuacugcaacuacucaaaauacugguaucuaaaucacacaacaacaggcaaaacuucauuaccaaaaugcuggcuaguuuccaacggaucauacuuaaaugaaacacacuucucagacgacauagaacaacaagcagauaacaugauaacagaaauguuacaaaaagaauauauggaacgccaaggaaaaacaccacuaggcuuaguagaccucuucguauucuccacaucauuuuacuuaauauccaucuuuuuacacuuaguaaaaauaccaacacacagacacauaguuggcaaacccuguccaaaaccacauagacuaaaccacaugggaauaugcagcuguggacuauauaaacaaccaggagucccaguucgauggaaaagauaa

SEQ ID NO: 1965 - RNA, 1476 nt, Artificial Sequence
  derived and/or modified protein sequence (opt6) from LASV(G2259-SLE-2012;Clade IV)__AIT17250__GPC
augggacaaauagucaccuuuuuucaagaaguaccccacguaauagaagaaguuaugaacauagugcuaauagcacuuucauuacuagcagucuuaaaaggacuauacaacguagccacauguggauuaauaggacuaguaacauucuuacuacucugcggaagauccugcacaacaaaucuauacaaagguguauacgaauuacaaacacuagaauuaaacauggaaacauuaaacaugacaaugcccuuaucaugcacaaaaaacaacucccaucacuacauaaugguaggaaacgaaacaggacuagaauuaacuuuaacaaacacuuccauuauaaaccacaaauucugcaaucuauccgacgcacacaaaaaaaaccuauaugaccacacacucaugaguauaauaucaacauuccaucucucaauaccaaauuucaaucaauacgaagcaaugucaugugacuucaacggaggcaaaaucucaguccaauacaaucuaagccacagcuacgccguagaugcagcaaaccacugcggaacagucgcuaauggcguauuacaaacauucaugagaauggccuggggaggaagcuacauagcauuagauucaggacgaggaaacugggauugcauaaugacaucuuaccaauacuuaauaauacaaaauaccacaugggaagaucacugccaauucucccgcccaucaccaauaggauacuuaggauuauuaucucaacgaacacgagacauauacauaucaagacgacucuuaggaacuuuuacauggacucuaucagauucagaaggcaacgauacaccaggaggauacugccuaacaagauggaugcuaauagaagcagaauuaaaaugcuucggaaauacagccguagcaaaaugcaaugaaaaacaugacgaagaauucugugacaugcuaagauuauucgacuucaauaaacaagcaauacaacgacuaaaagcagaagcgcaaaugucaauacaacucauuaauaaagccguaaacgcacuaauaaacgaccaacuaauaaugaaaaaccacuuaagagacauaaugggaauaccuuauugcaauuacagcaaauacugguaucuaaaucacacuacaaccgguaaaacaucucucccaaaaugcuggcuaguaagcaauggaucauaucuaaacgaaacucacuucucagacgacauagaacaacaagcagacaauaugauuacagaaauguuacagaaagaauacauggaaagacaagguaaaacaccauuaggacuaguagaucuauucguauuuucaacaucauucuacuuaauaucaauauuucuacaucuaguaaaaauaccuacacacagacacauagucggaaaaccaugcccaaaaccacaccgcuuaaaucacaugggaauaugcaguugcggauuauacaaacaaccaggaguaccaguacgauggaaaagauaa

SEQ ID NO: 1966 - RNA, 1476 nt, Artificial Sequence
  derived and/or modified protein sequence (opt6) from LASV(G2263-SLE-2012;Clade IV)__AIT17254__GPC
augggacaaauaguaacauuuuuccaagaagucccacacguaauagaagaagucaugaauauuguucuaauagcacucucaauauuagcaguauuaaaaggcuuauacaacuuugcaaccugcggcauaguaggacucguaacauuccuacuauuauguggaagaucauguacuacaucauuauauaaagguguauacgaacuacaaacacucgaauuaaacauggaaacccuaaacaugacaaugccuuuaagcugcacaaaaaacaauucacaccauuacauaaugguuggaaacgaaacaggacuagaauuaacacuaacaaacacauccaucauaaaccacaaauucuguaaccuaucagaugcccacaaaaaaaacuuauacgaccacgcacuaaugaguauaauuucaacuuuucaccuaucaauaccaaacuucaaccaauacgaagcaauguccugcgauuuuaacggaggaaaaauaucaguacaauauaaccuaucucacuccuaugccggugacgcagcuaaucacugcggcacaguagcaaacggagucuuacaaacauucaugagaauggcauggggaggaucauauauagcacuagauucaggaagagauagaugggacuguauuaugacuuccuaccaauaucuaauaauacaaaacaccacaugggaagaccauugccaauuuucacgaccaagcccaauaggauaccuaggauuauuaucacaaagaacuagagacauauacauauccagaagauuacuaggaacauucacauggacauuaagcgauucagaaggcaaaaacacaccaggcggguacuguuuaaccagauggaugcucauagaagcagaauuaaaauguuucgggaacacagcuguugcuaaaugcaaugaaaaacacgacgaagaauucugcgacauguuaagacuauucgacuucaacaaacaagcaauacaaagacuaaaagcagaagcucaaaugucuauaucacuaauaaacaaagcaguaaacgcauuaauaaacgaccaauuaauaaugaaaaaccaccuaagagauauaaugggaauaccauacuguaauuacucaaaauacugguaccuaaaucacacaacuacagguaaaacauccuuaccuagauguugguuaguuucuaacggaucuuaccugaacgaaacacauuuuucagacgauaucgaacaacaagcagauaacaugauaacggaaauguuacaaaaagaauacauggacagacaaggaaaaacuccacuaggauuaguagauuuauuuguauucucaacauccuucuaccuaauaucaaucuucuuacaccuaguaaaaaucccaacacacagacacauaguaggaaaaacauguccaaaaccacaccgacuaaaucacauggguauauguucaugcggucucuacaaacaaccaggaguaccugucaaauggaaaagauaa

SEQ ID NO: 1967 - RNA, 1476 nt, Artificial Sequence
  derived and/or modified protein sequence (opt6) from LASV(G2280-SLE-2012;Clade IV)__AIT17258__GPC
augggacaaauaguaacauucuuccaagaaguaccacauguaauagaagaaguaaugaauauuguacuaauagcacuaagcauacuagcaguucuaaaagggcuauauaacauagcaacaugcggacucguaggauuaguaacauuccuccucuuauguggccguucaugcacgacaucauuauacaaaggaguauacgaacuacaaacauuagaacuaaacauggaaacauuaaacaugaccaugccauuaagcuguacuaaaaacaacagccaucacuauauaaugguagguaacgaaacaggauuagaauuaacacuaacaaacacaucuaucauaaaucacaaauucugcaaucuaucagacgcucauaagaaaaaucuauacgaccacgcacuaaugagcauaguaucaacauuccauuuaagcaucccaaacuucaaccaauacgaagcaauguccugcgacuucaacggaggaaaaauuuccguacaauacaacuuaucacacucauacgcugucgacgcagcuaaccacugcggaaccguugcaaacggaguauuacaaacauuuaugagaauggccuggggcggaagcuauauagcauuagauucaggcagagguggaugggauugcaucaugacaagcuaccaauauuuaaucauacaaaauguuacaugggaagaccauugccaauucucacguccaaguccaauaggauaucuaggacuacuaucacaaagaacaagagauguuuacauaucaagacgucuuuuagguaccuucacauggacacucucagauucagaagguaacgacacacccggcggauauugccuaacccgauggauguuaauagaagcagaacuaaaauguuuuggaaacacagcaguagcaaaaugcaacgaaaaacacgacgaagaauuuugcgauaugcuaagacuauucgacuucaauaaacaagcuauucaacgacuaaaagcagaagcacaaaugucaauacaacuaauaaacaaagcgguuaaugcucuaauaaaugaccaacuaauaaugaaaaaccaccucagagacauaauggguauaccauauuguaacuacagcaaauacugguacuuaaaucauaccacaacaggaaaaacaucauuaccaaaaugcuggcuaguaaguaacggaucauaccuaaaugaaacacacuuuucugaugacauagaacaacaggcagauaacaugaucacagaaaugcuacaaaaagaauauauggaaagacaaggaaaaacaccauuaggauuaguagaccuauucgucuuuagcacaucauuuuaccuaauaucaauauuuuuacaccuagugaaaauaccaacacacagacacauaguaggaaaaccaugcccaaaaccacauagauuaaaccacaugggaauaugcucaugcggucuauacaaacaaccaggaguccccguaaaauggaaaagauaa

SEQ ID NO: 1968 - RNA, 1476 nt, Artificial Sequence
  derived and/or modified protein sequence (opt6) from LASV(G2295-SLE-2012;Clade IV)__AIT17262__GPC
augggacaaauuguaacauucuuccaagaaguuccacacguaauagaagaaguaaugaacauaguacucauagcauuaucaauacuagcaguccuaaaaggucuuuacaauuuagcaacauguggacucguaggacuaguaacauuucuacuuuuaugcggcagaucaugcacaacaucacuauacaaaggaguauacgaacuccaaacacuagaacucaacauggaaacacuaaauaugaccaugccauuauccuguacaaaaaacaauucccaucauuacaucaugguagguaaugaaacaggauuagaacuaacacuaacaaacacaucuauaaucaaucacaaauuuugcaaccuaucagacgcccacaaaaaaaaucuauacgaccacgcacuaaugaguauaaucucaacauuucacuuaucaauaccuaauuucaaucaauacgaagccaugucaugugauuucaauggcgguaaaauaucaguacaauacaacuuaucacacucauacgcaggagacgcagcaacccauugcggaaccguagcaaacggaguacuacaaaccuucaugagaauggcauggggaggaagcuacaucgcacuagacucaggaagaggcaaaugggacugcaucaugacaucauaucaauacuuaauaauucaaaauacaacaugggaagaccauugucaauucagcagaccaucaccaauaggauacuuaggccuacucucacaaagaacaagagacauauacauauccagaagacuauuaggaacauuuacauggacacuaucagauucugaaggaaaagacaccccaggaggauauugucuaacuagauggaugcuuauagaagccgaacuaaaaugcuucggcaacacagcagucgcaaaaugcaacgaaaaacacgacgaagaauuuugcgauauguuaagacuauucgacuuuaacaaacaagcaauacaaagacuaaaaacagaagcacaaaugucaauacaauuaauaaacaaagcaguaaacgcuuuaauaaacgaucaauuaauaaugaaaaaucaccuucgagacauaaugggaauuccauauugcaacuacucaaaauauugguaccuaaaccacacaacaaccggaaaaacaucacuaccacgauguuggcuaguaucaaacggaucauaucuaaacgaaacacacuucucagacgacauagaacaacaagcugacaauaugauaacagaaaugcuccaaaaagaauacauggaaagacaaggaaaaacaccauuaggauuaguugacuuauucgucuucucaacaucauucuacuuaaucucaauuuucuuacauuuaguaaaaaucccaacacacagacacauagucggcaaaccauguccaaaaccccacagacuuaaccacaugggaauaugcucaugcggacuauacaaacaacccggaguaccaguaaaauggaaaagauaa

SEQ ID NO: 1969 - RNA, 1476 nt, Artificial Sequence
  derived and/or modified protein sequence (opt6) from LASV(G2315-SLE-2012;Clade IV)__AIT17266__GPC
augggacaaauaguuacauucuuccaagaaguaccacacguaauugaagaaguuaugaacauaguacuaauagcacuaaguauacuugcaguacuuaaaggacuauacaacuuagcaaccugcggacuaguaggacuagucacauucuuacuccuauguggccgcucaugcacaacaucacuauacaaagguguauacgaauuacaaacacuagaacuaaacauggaaacacuaaacaugaccaugccacuaucuugcacuaaaaacaacucucaccacuacauaauggucggaaaugaaacaggacuagaauuaacccuaacaaacaccucauuaauaaaccacaaauucugcaaccuaucagacgcacauaaaaaaaacuuauacgaccacgcacuaaugucaaucauaucaaccuuccacuuaucaauaccaaacuuuaaccaauacgaagcaaugagcugcgacuuuaacggagguaaaauaucaguacaauacaacuuaucacacucauaugcaguagacgcagcuaaccacugcggaacagucgcaaauggaguauuacaaacauucaugagaauggcaugggguggcuccuauauagcauuagacucuggcagaggaggaugggacugcaucaugacaucauaccaauacuuaaucauacaaaacaccacaugggaagaccauugccaauucuccagaccaucaccaauaggauaccuaggccuacuaucacaacguacaagagacauauauauaucaagacgauuacuuggaacauucaccuggacucuaagcgacucugaaggaaaagacacaccaggcggcuauugucuaaccagauggaugcuaauagaagcagaauuaaaaugcuucggcaacacugcgguggcaaaaugcaacgaaaaacacgacgaagaauucugugacaugcuaagacuauuugacuucaacaaacaagcaauacaaagacuaaaagcagaagcacaaaugucaauacaauuaauaaauaaagcaguaaacgccuuaauaaacgaccaacucauaaugaaaaaccacuuacgagacauuaugggcauaccuuacuguaauuauucuaaauacugguaccucaaccauacaacuacugguagaaccucauuaccacgaugcuggcuaguaucaaauggaucauacuuaaaugaaacccacuucucagacgacauugaacaacaagcagauaacaugauaacagaaaugcuacaaaaagaauauauggaaagacaaggaaaaacaccucucggauuaguugaccuauuuguuuucucaaccucauucuaucuaauaucuaucuuccuacaccuaguaaaaauuccuacacacagacacauaguaggaaaaucauguccaaaaccacacagauuaaaccauaugggcauauguucaugcggucuauauaaacaaccaggaguacccguaaaauggaaacgauaa

SEQ ID NO: 1970 - RNA, 1476 nt, Artificial Sequence
  derived and/or modified protein sequence (opt6) from LASV(G2318-SLE-2012;Clade IV)__AIT17270__GPC
augggacaaaucguaacauucuuucaagaaguaccucacguaaucgaagaaguaaugaacauaguacuuauagcauuaucuguacuagcaguucuaaaaggacuauacaacuucgccacaugcggacuaguaggacucguaacauuccuacuacuauguggaagauccuguucaacaucaguauacaaaggaguauacgaacuacaaaccuuagaauuaaauauggaaacacuaaacaugacaaugccauuauccugcacaaaaaacaauucacaccauuacaucaugguaggaaacgaaacaggauuagaacuuacccuaacaaauacauccauaauaaaccacaaauuuugcaaucuaucugacgcacacaaaaaaaacuuauacgaucacgcauuaaugucaauaauaucaacauuccacuuauccauaccaaacuucaaccaauacgaagccaugucaugcgauuuuaacggcggaaaaauaucaguacaauacaacuuaucacacucauacgcaguagacgccgcuaaccauugugguacaguugccaacggaguacuacaaacauuuaugagaauggcauggggaggaaguuacaucgcucucgacucaggacacggaggaugggacugcauaaugacaaauuaucaauauuuaauaauacaaaacacaacaugggaagaucacugccaauucucaagaccaucuccaauuggauacuuaggacuauuaucccaaagaacacgagacaucuacauuucaagaagacuauuagguacauucacuuggacauuaucagacucugaaggaaaagacacaccuggaggauacugucucacuagauggauguuaaucgaagcagaauuaaaauguuucggcaauacugcagucgcaaaaugcaacgaaaaacacgaugaagaauucugugacaugcuaagacuauucgauuucaacaaacaagccauacaaagacuuaaagccgaagcacaaaugucaauacaauuaaucaauaaagccguaaacgcauuaauaaaugaucaacuuauaaugaaaaaccaccuacgcgacauaaugggcauacccuacuguaacuacucuaaauacugguaccuaaaccacacaacaacugguagaaccucauuaccaaaaugcugguuaguaucaaacggaucauaccuaaacgaaacucacuucucugaugacauagaacaacaagccgacaauaugauaacagaaaugcuccaacgagaauacauggaaagacagggcaaaaccccacuaggacuaguugauuuauucgucuucucuacaucauucuacuuaauaucaauauuccuacaccuaguaaaaauaccaacacaucgacauauagucgguaaaucaugcccaaaaccacaucgacuaaaucauaugggcaucugcucaugcggucuauacaaacaacccggcgucccagucaaauggaaaagauag

SEQ ID NO: 1971 - RNA, 1476 nt, Artificial Sequence
  derived and/or modified protein sequence (opt6) from LASV(G2363-SLE-2012;Clade IV)__AIT17274__GPC
augggacaaauuguaacauucuuccaagaaguuccacacguaaucgaagaagucaugaacaucguacuaaucgcuuuaucaauccuagcaguauuaaaaggauuauauaauguagcaacaugcggacuaacaggccuaguagcauuccucuuacucuguggccgcuccugcacaaccacacuauauaaaggaguauacgaauuacaagcacuugaauuaaacauggaaacacuaaacaugacaaugccacuaaguugcacaaaaaauaacucucaccacuauauaagaguaggcaacgaaacaggucuagaacuaacacuaacaaacaccucaauaauagaacacagauucugcaaccuaucugacgcacacaaaaaaaacuuauacgaccaugcauuaaugucaauaaucucuacauuccaccucuccaucccaaauuucaaccaauaugaagcaauguccugugacuucaacggaggcaaaauaucaguacaauacaaucuaucacacuccuacgcaguugaugcagccaaccacuguggaacaguagcaaauggaguucuacaaacauucaugagaauggcauggggaggauccuacauagcacuagauagcggaagaaauggaugggacugcauuaugacaucuuaucaauacuuaauaauacaaaacacaacaugggaagaucacugccaauucagcagaccaucaccaaucggauaucuaggucuauuaucacagagaacaagagacauauacauauccagacgacucuuaggaacauucaccuggacacuaucagacucagaaggaaaagacacacccggaggauauugucuaacacgcuggaugcuaaucgaagcagaauuaaaauguuucggaaacaccgcagucgcuaaaugcaacgaaaaacacgacgaagaauucugcgauaugcucagacucuuugauuuuaacaaacaagcaauccaacgacuuaaagccgaagcacaaaugucaauacaacuaaucaacaaagcaguaaacgcauuaauaaacgaccaauuaaucaugaaaaaucaccuaagagacauaaugggaauaccauacugcaacuauucaaaauacugguaccuaaacaacacagcaacaggcaaaacaucccuaccaagauguugguuaguaucuaacgguuccuaucuaaaugaaacccacuuuucagaugacauagaacaacaagcagauaacaugaucacagaaaugcuccaaaaagaauacauggaaagacaaggaaaaacaccccuaggccuaguagaucuauucguauuuucaacuuccuucuaccuuauaagcauauuccuacacuuaguuaaaauacccacacacagacacaucguaggaaaaccaugccccaaaccacacagacuaaaccauaugggaaucuguucgugcggauuauacaaacaaccaggagcgccaguuagauggaaaagauaa

SEQ ID NO: 1972 - RNA, 1476 nt, Artificial Sequence
  derived and/or modified protein sequence (opt6) from LASV(G2384-SLE-2012;Clade IV)__AIT17276__GPC
augggacaaauaguaacuuucuuccaagaaguaccacauguaauagaagaaguaaugaacauaguacuaauagcccugucgauauuagcaguauuaaaaggacuuuacaacuuugcaacaugcggacuagucggauuaguuacauucuuacuacuaugcggacgcucaugcacaacaucauuauauaaaggagucuaugaacuacaaacauuagaauuaaacauggaaacauuaaacaugacaaugccacuaucuuguaccaaaaauaacucccaccacuacauaaugguaggaaacgaaaccggacuagaacucacacuaacaaacacauccaucaucaaccacaaauuuugcaacuuaagcgacgcacauaaaaaaaacuuauaugaccaugcauuaaugucaauaaucagcacauuucaccuaucaauaccaaacuucaaccaauacgaagcaaugucaugugauuucaacggaggaaaaauaucaguccaauacaacuuaucacauucauacgcaggagacgcagcuaaucauugcggaacaguagcaaacggcguacuacaaacauucaugcgaauggcuuggggaggaagcuacauugcauuagacucaggacauggaaaaugggauuguauaaugacaagcuaccaauacuuaauaauacaaaauacaacaugggaagaccacugccaauucucaagacccucuccaauaggguaccuaggauuacuaucucaaagaacuagagauauauacauaucuagacguuuacuaggaacauucacauggacacuauccgacucagaaggaaaagacacaccaggaggauauuguuuaacacgauggaugcuaauagaagccgaacuaaaaugcuucggaaauaccgcaguugcaaaaugcaacgaaaaacacgacgaagaauuuugcgacaugcuaagacucuucgacuucaacaaacaagcaauacaaagacuaaaagcagaagcccaaauguccauacaauuaauaaauaaagccguaaaugcacuaauaaacgaccaauuaauaaugaaaaaucaccuacgugauauaaugggaauaccauacugcaauuacucuaaauacugguaccucaaccacacaacaacaggaaaaacaucacuaccaaaaugcugguuaguaucuaauggaucauaccuaaacgaaacacacuuuucagacgauauagaacaacaagccgauaacaugauaacagaaauguuacaaaaagaauauauggaaagacaaggaaaaacaccauuaggcuuagucgaccuauucguauuuagcacaucauucuacuuaauaucaaucuuccuacaccuagucaaaauaccaacacacagacauauaguuggaaaaucaugcccaaaaccacacagacuuaaucauaugggaauaugcucuugcggacucuacaaacaaccaggaguaccaguccgcuggaaaagauaa

SEQ ID NO: 1973 - RNA, 1473 nt, Artificial Sequence
  derived and/or modified protein sequence (opt6) from LASV(G2392-SLE-2012;Clade IV)__AIT17280__GPC
augggacaaauaguaacauucuuccaagaagucccacacguaauagaagaaguaaugaacauaguauuaaucgcauuaucaauacuagcaguacuaaaaggacuauauaauuucgcaacaugcggacuugucggccuaguaacauucuuacuacuuugcggaagaucauguacaacaucucuauauaaaggagucuacgaacuacaaacacuagaauuaaacauggaaaccuuaaacaugaccaugccacuaucaugcacuaaaaacaauucacaucauuacauacgcguaggaaacgaaacaggacuagaacuaacacuuacaaauacaucaauaauagaucauaaauucuguaacuuaucagaugcacacaagaaaaaccuauacgaccacgcccuaaugucaauaauuuccacauuccaccuaucuauaccaaacuucaaccaauaugaagccaugucaugcgacuucaacggaggaaaaauaaguguacaauauaaccucucacauagcuacgcaggagacgcagcaaaccacugcggaacaguagcuaacggaguguuacaaacauucaugagaauggcauggggaggaagcuacauagcuuuagacucaggucacgaaugggauugcauaaugacauccuaccaauacuuaaucauacaaaacacaaccugggacaaucauugucaauucucaagaccaaguccaaucggauaucuaggccuauuaagucaaagaacacgagauaucuauaucucuagaagacuuuuaggaaccuuuacauggacacuaagcgauucagaaggaaaagauacaccaggaggauacugccucacaagauggaugcuuauagaagcagaauuaaaauguuucggaaacacagcagucgcaaaaugcaacgaaaaacacgaugaagaauuuugugauaugcucagauuauucgauuucaacaaacaagccauacaacgacuaaaaguagaagcacaaaugucaauacaauuaauaaacaaagccguaaacgcccuaauaaacgaccaauuaaucaugaaaaaccauuuacgagacauaaugggaauaccauacuguaacuauucaaaauacugguaucuaaaucauacaaccaccggaaaaaccucacucccaaaaugcugguuaguaagcaacggaagcuaucuaaacgaaacacauuuuucagacgacauagaacaacaagcagacaauaugaucacagaaaugcuacaaaaagaauacauggaacgacaagguaaaacaccauuaggccuaguagaccuauuuguauucucuacaucauuuuaccuaauaucuauauuccuacaucuaguaaaaauaccaacacacagacacauaguaggaaaaucauguccaaaaccacaucgacuaaaccacaugggaauaugcucaugcggauucuacaaacaaccaggagucccaguuaaauggaaacgcuaa

SEQ ID NO: 1974 - RNA, 1476 nt, Artificial Sequence
  derived and/or modified protein sequence (opt6) from LASV(G2405-SLE-2012;Clade IV)__AIT17284__GPC
augggacagauagucacauuuuuccaagaaguaccccauguaauagaagaaguaaugaauauuguauuaauagcauuauccguacuagcaguacuaaaaggacucuacaacuuugcaaccugcggaaucguaggauuaguaacauuuuuauuacuaugcggcagaucauguacuacaucccuauacaaaggaguauaugaacuacaaacauuagaauuaaauauggaaacacuaaacaugaccaugccacuaagcuguaccaaaaauaauucccaccacuauaucaugguaggaaacgauacaggacuagaacuaacauuaacuaacacaucaaucauaaaccacaaauucugcaaucuaagugacgcccacaaaaagaacuuauacgaccaugcacucauguccauaauaucaacauuccaccucucaauaccuaacuucaaccaauacgaagcaaugucaugcgacuucaacggcggaaaaaucucaguacaauacaacuuaagccacucauacgcaggcgaugcagcagaccacugcggaacaguagcaaauggaguacuccaaacauucaugagaauggcaugggguggaaguuauauagcccucgacucaggacgaggaagaugggauugcauaaugacaucauaccaauacuuaauaauacaaaacacaacaugggaagaucacugccaauucucaagaccaucacccauagguuaccugggacuauuaucucaacgaacacgagauaucuacauaucuagaagauuacucggaaccuucacauggacacuauccgacucagaaggaaaagacaccccagguggauacugccuaacuagauggaugcuaauagaagcagaacugaaaugcuuugguaacacagcaguagccaaauguaacgaaaaacacgaugaagaauuuugugacaugcucagauuauuugauuuuaacaaacaagcaauccaaagacuaaaagcagaagcacaaaugagcauacaauuaauaaacaaagcuguaaaugcacuaauuaacgaucaauuaauaaugaaaaaccauuuaagagacauaaugggaauacccuacugcaacuacucuaaauacugguaccuuaaccacacaacaacaggaaaaacuucauuacccaaaugcugguuaguauccaacgguuccuaucuaaaugaaacacacuuuucagacgacauagaacaacaagcagacaauaugaucacagaaauguuacaaaaagaauauauggaaagacaaggcaaaacaccacuaggccuagucgaccuauuuguauuuucaaccucuuucuaccuaauaucaauauuccuacaccucguaaaaauaccaacacauagacacauaguaggaaaaccauguccuaaaccacacagacuaaaucauaugggaauaugcuccugcggauuauacaaacaaccaggaguaccaguaaaauggaaaagauaa

SEQ ID NO: 1975 - RNA, 1476 nt, Artificial Sequence
  derived and/or modified protein sequence (opt6) from LASV(G2427-SLE-2012;Clade IV)__AIT17288__GPC
augggacaaauaguaacauuuuuucaagaagucccucacguaaucgaagaaguaaugaacauaguacucauagcacuaucuauauuagccguacuaaaaggccuauacaauuucgcaacaugcggacucguaggauuaguaacauuuuuauuauuaugcggacgaucaugcacaacaagccuauauaaaggaguauacgaauuacaaacauuagaacucaauauggaaacccuaaauaugacaaugccuuuaucuuguaccaaaaacaacucucaccacuauauuaugguaggaaacgaaaccggacuagaacuaacacuaacaaauacaucaauaauaaaccacaaauucugcaaccucucagacgcacacaaaaaaaauuuauacgaccacgcacuaauguccauuauuucaacauuucaucuauccauaccaaacuuuaaccaauacgaagcaaugucaugcgacuucaacggaggaaaaauaagcguacaauacaacuuaagccacucauaugcaguugaugcagccaaccacugcggaacagucgcaaacggaguccuacaaaccuuuaugagaauggcauggggaggaggauacauugcauuagacaguggaagaggaaauugggauugcauaaugacaucauaccaauaucuaauuauucaaaauacaacaugggaagaucauugccaauuuagcagaccaucacccaucggauaccuaggccuacuaucacaaagaacaagagauaucuauauaucaagaagacuacuaggaacuuuuacauggacauuaucagacucagaaggaaaagacacaccaggaggauacugccuaaccagauggaugcucauagaagcagaauuaaaaugcuucggaaacacagcuguagcaaaauguaaugaaaaacaugacgaagaauuuugcgauauguuacgccuauuugacuucaauaaacaagcaauacaaagauuaaaagcagaagcacagaugucaauacaacuaauaaacaaagccguaaacgccuuaauaaacgaccaacuaauuaugaaaaaccaccuuagagacauaaugggaauaccauacuguaacuacucuaaauauugguaccuaaaucacacagucaccggaaaaacaucacuaccaaaaugcuggcucguaucaaacggcucauacuuaaaugaaacacacuucucagacgacauugaacaacaagcagacaauaugauaacagaaauguuacaaaaagaauauauggaacgacaaggcaaaacaccucuaggauuaguagaucuauucguauucucuacauccuuuuaucuaauaucaauuuucuuacaccugguaaaaauaccaacacacagacauauaguaggaaaaucuuguccaaaaccccaccgauuaaaccacaugggcauaugcucaugcggauuauacaaacaaccaggaguuccaguuagauggaaaagauga

SEQ ID NO: 1976 - RNA, 1476 nt, Artificial Sequence
  derived and/or modified protein sequence (opt6) from LASV(G2431-SLE-2012;Clade IV)__AIT17292__GPC
augggacaaauaguuaccuucuuccaagaaguuccacacgucaucgaagaaguaaugaacaucguuuuaauagcacuauccauuauggcaguauuaaaaggacuauacaacaucgcaacauguggacuaguaggucucguaacauuccuacuacuaugcggacgcucaugcacaacaacauuauacaaaggcguauacgaauuacaaacacuagaauuaaacauggaaacacuaaacaugacuaugccauuauccugcacaaaaaacaacucacaucacuacauaauggucgguaaugaaacaggacuugaauuaacacuaacaaacacaucaauaauaaaccauaaauuuugcaaccuauccgacgcacacaaaaaaaaucuauacgaccacgcacuaauguccauaauaucaacauuucaccuaucaaucccuaacuucaaucaauacgaagcaaugucaugcgacuucaacggcggaaaaauaucaguucaauacaaccucucacauucauacgcaggagacgcagcaaaucacuguggaacaguagcuaacggagucuuacaaacauuuaugcguauggcauggggaggauccuacauagcacuugacucaggccacggagguugggacugcauaaugacaucauaucaauacuuaauaauacaaaacaccaccugggaagaccacugccaauucacaaggccaucaccaauaggcuacuuaggauuacuaucccaaagaacaagagacauauacauuucccgcagauuauuaggaacauucaccuggacucuaucagacucagaaggaaacgauacaccaggaggauauugccuaaccagauggaugcuaauagaagcagaacucaaauguuuuggaaauacagcaguugcaaaaugcaacgaaaaacacgaugaagaauucugugacaugcuaagacuauucgacuucaacaaacaagcaauccaaagacuacgagcagaagcacaaauguccauacaauuaauaaacaaagcaguaaacgcacuaauaaacgaccaacucauaaugaaaaaucaccuaagagacauaaugggaaucccauacugcaacuacuccaaauauugguacuuaaaccacacaacaaccggacgaacuucccuaccaagaugcuggcuaguaucuaacggaucuuaccuaaaugaaacacauuuuucagacgacauagaacaacaagccgacaacaugauaacagaaauguuacaaaaagaauauauggaaagacaaggcaaaacaccauuaggacuaguagaccuuuucguauuuuccacaucauucuaccuaauaucaauauucuuacaccucauaaaaauacccacacauagacacauagucggcaaacccugcccaaaaccccacagacuuaaccauaugggaguaugcuccugcggacuuuacaaacaacccggaguaccaguaagauggaaaagauaa

SEQ ID NO: 1977 - RNA, 1476 nt, Artificial Sequence
  derived and/or modified protein sequence (opt6) from LASV(G2511-SLE-2012;Clade IV)__AIT17294__GPC
augggacaaauagucacauucuuccaagagguuccccacguaauagaagaaguaaugaauauaguacuaaucgcacuaagcauacuugcaguauuaaaaggcuuauacaaucucgcaacaugcggacuaguaggccucguaacguuccuacuacuauguggccgcucauguacaacaucauuauauaaaggaguauaugaauuacaaacacuugaacuaaacauggaaacucuuaauaugacaaugccacuaucuuguacaaaaaauaacucacaccacuacauaauggucggaaacgaaacaggucuagaacuaacacuaacaaauacaucaauaauagaccacaaauuuugcaaucuaagcgacgcacacaaaaaaaacuuauacgaccacgcauuaauguccauuauaucaacauuccaccucucaaucccaaacuucaaucaauacgaagccauguccugugauuuuaacggagguaaaaucucaguacaauauaaccuaucacacucauaugcaggagacgccgcaaaccauugcggcaccguagcaaacgguguacuacaaacuuucaugcgaauggcauggggcggcuccuacauagcacuagacagcggacgaggaggaugggauuguauaaugacgucauaucaauaucuaauaauacaaaacaccacaugggaagaccauugucaauucucaagaccaucaccaguaggauaccuaggacuacuaucacaaagaacccgcgauauauacauaucaagaagacuacucggaacuuucacauggacccucuccgacucagaaggcaaagauacaccaggaggauacugcuuaacacgauggaugcucauagaagcagaauuaaaaugcuucggaaacaccgccguagcaaaaugcaacgaaaaacaugaugaagaauucugcgacaugcuuagauuauucgauuucaacaaacaagcaauccaaagacucaaaacagaagcacaaaugucaauacaacucauuaacaaagcaguaaaugcauuaauuaacgaccaacuaauaaugaaaaaccaccuaagagauauaaugggaauuccuuacugcaauuacucaaaauauugguacuuaaaccacaccacaacaggaaaaacuucauuaccuagaugcuggcucguaucaaacggauccuaccuaaacgaaacacacuucucagaugacauagagcaacaagcugauaacaugauaacagaaauguuacaaaaagaauacauggaaagacaaggaaaaacaccacuaggauuaguagaccuauucguauuuucaacaagcuuuuauuuaauaucuauauuccuacaccuaguaaaaaucccaacacacagacauauagucggaaaaccauguccaaaaccacauagacuaaaccacaugggaauauguucaugcggccuauacaaacaacccggaguaccuguaaaauggaaaagauaa

SEQ ID NO: 1978 - RNA, 1476 nt, Artificial Sequence
  derived and/or modified protein sequence (opt6) from LASV(G2554-SLE-2012;Clade IV)__AIT17298__GPC
augggacaaauaguaacauuuuuccaagaaguaccacacguaauagaagaaguaaugaacauaguccuaauagcacuuucaauucuagcaguccuaaaaggauuauacaacauagccacaugcggacuccuaggcuuagucugcuuccuacuacuaugcggaagauccugcacaacaucacuauacaaaggaguguaugaacuacaaacacuagaauuaaacauggaaaccuuaaacaugaccaugcccuuauccugcacaaaaaauaacucacaccacuacauuaugguaggaaaugaaacaggauuagaauuaacacuuacaaacaccuccauuauaaaccacaaauuuuguaaucuuuccgacgcacacaaaaaaaaccuauacgaccacgcauuaaugucaauaauaaguacauuccaucuauccauaccaaauuucaaccaauacgaagccaugucaugcgauuucaacgguggcaaaauaucaguacaauauaaccuaucacauuccuacgcaguagaugcugccucacacugcggaacaauagcaaauggcguacuacaaacauucaugagaauggcauggggaggaucauacauagcauuagacucuggucacggaggaugggacugcauaaugacuucauaccaauaccuaaucauacaaaacacuaccugggaagaucacugccaauucucaagaccauccccaauaggauaccuaggauuacucucccaacgaaccagagacauauacauaucacgaagacuacuaggaaccuucacauggacacucucagauucugaaggaaaagacacaccuggcggauacugccuaacacgauggaugcucauagaagcagaacuaaaaugcuucggaaacacagcuguagcaaaauguaacgaaaaacacgacgaagaauuuugugauaugcuaagacucuuugacuucaauaaacaagcaauacaaagacuaaaagcagaagcacaaaugucaauacaauuaauaaauaaagcaguuaacgcucuaauaaaugaccaacuaauaaugaaaaaccacuuaagagacauaaugggaauacccuacuguaacuacucaaaauacugguaccucaaccacacaacaacaggaaaaacaucacuaccaaaaugcuggcuaguaucaaacggcucauauuuaaacgaaacacacuucucugacgauaucgaacaacaagcugacaacaugauaacagaaauguuacaaaaagaauacauggaaagacaaggcaaaacaccacuaggucuaguagaucuuuuugucuucucaaccucauucuauuuaauaucaaucuuucuacaccuaguaaaaauuccaacacaucgacauguaguaggaaaaccaugcccaaaaccacaccgacuaaaccauauggguauaugcucaugcggacuauacggacaacccggaguaccaguuaaauggaaaagauaa

SEQ ID NO: 1979 - RNA, 1476 nt, Artificial Sequence
  derived and/or modified protein sequence (opt6) from LASV(G2557-SLE-2012;Clade IV)__AIT17302__GPC
augggacaaauaguaacauuuuuccaagaagucccccaugucauagaagaaguaaugaauauaguccuaauagcucuaagcuuacucgcaguauuaaaaggacuauacaaugucgcaacaugcggacucauaggccucguaacauuccuucuacuauguggacgaucuugcacaacaaaucucuauaaaggaguauacgaauuacaaacauuagaauuaaacauggaaacauugaacaugacaaugccacuaucauguacaaaaaauaauagccaucacuacaucaugguaggaaacgaaacaggacuugaacuaaccuuaacaaacacaagcauaauaucacacaaauuuugcaaccuauccgacgcacacaaaaaaaaccuauaugaccauacacucaugucaauuauaucuacauuucaccuaucuauaccaaacuucaaucaauacgaagcaaugucuugcgacuuuaacgguggcaaaauaucuguacaauacaaccuaagccacucauacgcaguagacgcagccaaccacuguggcacaguagccaauggagucuuacaaaccuuuaugagaauggcauggggaggaagcuacauagcacuagacucaggaagaggaaacugggauugcauaaugacaucauaccaauaccuaaucauacaaaacaccacaugggaagaccacugucaauucucaagacccaguccaauuggauaccuaggcuuacuaucacaaaggacaagagacauauacauuucuagaagacuccuaggaaccuucacauggaccuuaucagacucagaaggaaacgacacaccaggaggauauugccucaccagauggauguuaaucgaagcagaacuaaaauguuucggaaauaccgcaguugccaaaugcaaugaaaaacacgacgaagaauucugcgacaugcuaagauuauuugacuuuaacaaacaagccauucaaagacucaaagcagaagcacaaaugagcauacaacuaauaaacaaagcaguaaacgcacuaauaaacgaccaacuaauaaugaaaaaccauuuaagagacauuaugggaauaccauacugcaacuacucaaaauauugguaucuaaaccauaccacaaccggaaaaaccucacuaccaaaaugcuggcucguaucaaacggaucauaccuaaacgaaacccacuucucagacgacaucgaacaacaagcugauaauaugauaacagaaaugcuucaaaaagaauacauggaaagacaaggaaaaacaccacucggacuaguagauuuauucguauucucaacaucauuuuacuuaaucaguauauuucuacaccuagucaaaauaccaacucacagacacauagucggcaaaccaugcccaaaaccacacagauuaaaucacaugggaauaugcuccugcggauuauacaaacaaccaggcguuccuguaagauggaaacgauaa

SEQ ID NO: 1980 - RNA, 1476 nt, Artificial Sequence
  derived and/or modified protein sequence (opt6) from LASV(G2587-SLE-2012;Clade IV)__AIT17310__GPC
augggacaaauagucacauucuuccaagaaguaccacacguaauagaagaaguaaugaauauaguacuaauagcccuaagcauccucgcaguccucaaaggacucuacaaccuagcaacgugcggccuaguuggauuaguaacauuuuuacuacuauguggaagauccuguaccaccucccuauacaaaggaguauaugaauuacaaacucuugaacuaaauauggaaacauuaaacaugacaaugccacuaagcugcacuaaaaauaauagccaucacuauauaaugguaggaaacgaaacaggauuagaauuaacacuaacuaacaccagcauaauaaaccauaaauucugcaaccuaucagacgcacacaagaaaaaccucuacgaccaugcauuaaugucuauaauaucaacauuccaucuaucaauaccaaacuucaaucaauaugaagcaaugagcugugacuucaacggagguaaaauaucaguacaauacaacuuaucacacucuuacgcuggagaugcagcaacacacuguggaacaguagcaaacggaguauuacaaaccuucaugagaauggcaugggguggaagcuacauagcacuagacucaggaagaggaaaaugggacugcauaaugacaucauaucaauaccuaaucauacaaaacaccacaugggaagaccacugccaauuuucaagaccaucaccaauaggauauuuaggacuacuaucgcaaagaacaagagacauauacauaucacgaagacuacuagguacuuucacauggacacuauccgauagugaaggaaaagacacaccagguggauacugcuuaacaagauggauguuaauugaagcagaacuaaaauguuucggcaauacagcaguagccaaaugcaacgaaaaacacgacgaagaguucugugacaugcuacgacuuuucgauuucaauaaacaagcaauacaaagacuaaaaaccgaagcacaaaugucaauacaauuaauaaauaaagcaguaaacgcacuaauaaaugaucaacucauaaugaaaaaucacuuaagggauauaaugggcauaccauacugcaacuacucaaaauacugguaccucaaucauacaacaacaggaaaaaccucccucccaagaugcuggcuaguuucaaauggaucauaucucaacgaaacccauuucucagaugacauugaacaacaagccgacaauaugaucaccgaaaugcuccaaaaagaauacauggaaagacaaggaaaaacaccacuaggccuaguugacuuauucguauuuaguacauccuucuaccuaauuucaaucuuucuacaccucguaaaaauaccaacacauagacacauaguaggaaaacccugcccaaaaccacacagacuaaauuacaugggaauauguucauguggacuauacaaacaaccuggaguuccaguaaaauggaaaagauaa

SEQ ID NO: 1981 - RNA, 1476 nt, Artificial Sequence
  derived and/or modified protein sequence (opt6) from LASV(G2612-SLE-2012;Clade IV)__AIT17314__GPC
augggccaaaucguuaccuucuuccaagaaguaccacauguaauagaagaaguaaugaacauaguccuaauaacacuaucaauacucgccguauuaaaaggccuuuacaaugucgcaacaugcggauuaguaggauuaguaacauuuuuacuacuauguggacgaucauguacaaccucacucuauaaaggcguauaugaauuacaaacacuagaacuaaacauggaaacacuaaacaugacaaugccacuaucauguaccaaaaauaacucacaccacuacauaauggucggaaacgaaacaggacuagaauuaacacuaacaaacacaagcauaauaaaccacaaauuuugcaaccuaucugacgcacacaaaaaagacuuauacgaccacgcacuaaugucaaucauaucaacauuucaccuaucaauaccaaauuuuaaccaauacgaagcuaugucaugcgacuucaacggcggaaaaauaucaguacaauacaaccuaucacacucauacgcugucgacgcugccaaccacuguggcacaguagcaaauggaguacuacaaacauucaugagaauggccuggggaggaucauauauagcacuagacuccggaagaggaggaugggacugcauaaugacaucauaccaauaccuaauaauacaaaacacuacaugggaagaccacugucaauucucucgaccuaguccaauagguuaccuuggucuccucucacaaagaaccagagacauauauauauccagacguuuacuaggaaccuuuacauggacauuauccgacucagaaggaaacgauacuccaggaggauauugucuaacaagauggauguuaauagaagcagaauuaaaaugcuuuggaaacacugcagucgcaaaaugcaacgaaaaacacgaugaagaauucugcgauauguuaagacuauucgacuucaacaaacaagcaauacaacgacuaaaagcagaagcacaaaugucaauacaacuaauaaauaaagcagucaacgcucuaaucaacgaccaacucauaaugaaaaaucaucuaagagacauaaugggaauuccauacuguaacuauaguaaauacugguaccuaaaccacacaacaacaggaaaaacaagcuuaccaaaauguuggcuaguaucaaacggaucauaccugaaugaaacacacuucucagaugacauagaacaacaagcagauaauaugauaacugaaaugcuacaaaaagaauacauggaaagacaaggaaaaacaccacuaggucuaguagaucuauuugucuuuagcacaucuuucuauuuaaucucaauauuccuacaccuaguaaaaaucccaacacacagacacauaguagggaaaccaugcccaaaaccacacagacuaaaucauaugggaauaugcucauguggacucuacaaacaaccaggaguaccaguaaaauggaaaagauaa

SEQ ID NO: 1982 - RNA, 1476 nt, Artificial Sequence
  derived and/or modified protein sequence (opt6) from LASV(G2615-SLE-2012;Clade IV)__AIT17318__GPC
augggacaaauaguaacauuuuuucaagaaguaccacacgucauagaagaagucaugaacauaguacuaauagcgcuaucauuacuagcaguucuuaaaggacuauauaaugucgcaacaugcggacuaauaggccucgucacauuccuacuacuguguggcagaucaugcacaacaaacuuauauaaaggaguauaugaauuacaaacacucgaauuaaauauggaaacacuaaacaugacaaugccacuaucauguaccaaaaacaacagccaccacuacauaaugguaggaaaugaaacuggacuagaacucacacucacaaauacaucuaucauaaaccauaaauucugcaauuuaucagacgcacauaaaaaaaaucuauacgaccacgcauuaaugucaauaaucucaaccuuccacuuaucaauaccaaacuucaaucaauacgaagcaaugucaugugacuucaauggaggaaaaauuucuguacaauacaacuuaucacacucauacgcaguagacgcagcaaaccacuguggaaccgucgcaaauggaguacuacaaacauucaugagaauggcauggggcggaucauauauugcacuagacuccggcagaggaaacugggacugcauaaugacaucauaucaauauuuaauaauacaaaacauaaccugggaagaccacugccaauucucuagaccuucacccauaggcuauuuaggcuuacuuucacaaagaacuagagauauauacauuucaagacgauuauugggcacauucacauggacacuuucagacucugaaggaaacgacacaccuggaggcuauugucuaacaagauggauguuaauagaagcagaacuuaaaugcuucggcaacacagccguagcaaaauguaacgaaaaacacgacgaagaauucugcgacauguuacgacuauuugauuuuaauaaacaagcaauacaaagacuaaaagcugaagcacaaaugagcauacaacucaucaacaaagcaguaaaugcacuaauuaacgaccaauuaauaaugaaaaaccaccuucgugacauaaugggaauaccauacugcaacuacagcaaauauugguauuuaaaccacacaacaacagguaaaacaucccuaccuaaaugcugguuaguaucaaacggaucauaccuaaacgaaacccacuucucggacgacauagagcagcaagcagacaacaugauaacagaaauguuacaaaaagaauauauggaaagacaaggaaaaacaccacuaggacuagucgaccuauuuguauucucaacaucauucuaucuaauaucaaucuuccuucaccuuguaaaaauaccaacacauagacauauagucggaaaacccugccccaaaccacacagauuaaaucauaugggaauaugcucauguggacuauauaaacaaccaggagucccaguacgauggaaaagauaa

SEQ ID NO: 1983 - RNA, 1476 nt, Artificial Sequence
  derived and/or modified protein sequence (opt6) from LASV(G2723-SLE-2012;Clade IV)__AIT17322__GPC
augggacagauuguaacauucuuccaagaaguaccccacguaauagaagaagucaugaacauaguccuaauagccuuaucacuacuagccguauuaaaaggccuauacaacguagcaacauguggcuuaauaggacuaguaacauuuuuacucuuaugcggaagaagcuguacuacuaaccuauacaaaggagcauaugaauuacaaacccuagaacuaaauauggaaacucuaaauaugaccaugccccuaucuugcacaaaaaacaauucacaccacuauauaaugguaggaaaugaaacaggauuagaauuaacucuaacuaacaccucaaucauaaaucauaaauucuguaacuuaagcgaugcacacaaaaaaaaucuauaugaccacacauuaaugucuauaauaucgacuuuucaucuaucaauaccaaacuucaaucaauaugaagcuauguccugcgacuuuaacggaggaaaaauaagcguacaauauaaucuuucacacaguuacgcaguagaugcagcuaaucacuguggaacaguagccaaugguguauuacaaacauucaugagaauggcauggggaggaucauacauagcccuagacucaggcagaggaaauugggacugcauaaugacaucauaccaauaucuaauaauacaaaacacaacaugggaagaccacugccaauuuucaagaccuucuccaauuggauacuuagguuuauuaagucaaagaacaagagacaucuacauaucaagacgacuauuaggaaccuucaccuggacacuauccgauucagaaggaaaugacacaccuggaggauacugccuaaccagauggaugcucauagaagcagaacucaaauguuucggaaacacagcagucgcuaaaugcaaugaaaaacacgacgaagaauucugcgacauguuaagacucuucgacuucaauaaacaagcaauacaaaggcucaaagcagaagcacaaaugucaauucaacuaauaaacaaagcagucaaugcauuaauaaacgaccaauuaauaaugaaaaaccauuuacgagauauaauggguauaccauauuguaacuacagcaaauacugguaucuaaaucauacaaccacaggaaaaacaucauuaccaaaauguugguuaguaucuaacggaucauaucuaaaugaaacacacuuuucagaugacauagaacaacaagcagauaacaugauuacagaaaugcuccaaaaagaauacauggaacgacaaggaaaaacaccucuaggacuaguagacuuauucguauucucaaccucuuucuauuuaaucuccauuuuccuacaccucguaaaaauaccaacacaucgacacauaguaggaaaacccugcccaaaaccccacagacuaaaccacaugggaauauguucauguggauuauauaaacaaccaggaguaccaguaagauggaaaagauaa

SEQ ID NO: 1984 - RNA, 1476 nt, Artificial Sequence
  derived and/or modified protein sequence (opt6) from LASV(G2868-SLE-2012;Clade IV)__AIT17328__GPC
augggccaaauaguaacguuuuuccaagaaguaccacacguaauagaagaaguaaugaauauaguacuaauaaccuuauccauacucgcuguacucaaagguuuauacaacauagccacauguggacucguaggacucgucacauuccuacuuuuaugcgguaaaucaugcacaacaucacuauacaaaggaguauacgaacuacaaacacuugaacuaaacauggaaacacuaaacaugaccaugccacucuccugcacaaaaaacaauucacaucacuacauaagaguaggaaaugaaacaggacucgaacuaacuuuaacaaauacaucuaucauaaaccauaaauucuguaaucuuucagacgcacacaaaaaaaacuuauacgaucacgcauuaauguccauaauuucaacuuuccaccuaucaauaccuaacuucaaccaauacgaagcaaugucuugugauuucaauggaggaaaaauaucuguacaauacaacuuaucacacucauacgcugucgacgcagccaaucacuguggaacaguugcuaauggaguacuacaaaccuucaugagaauggcauggggaggaucauauauagcacucgacucaggacacggaaacugggacuguauaaugacaucauaccaauacuuaauaauacaaaauacaacaugggaagaccauugucaauucucaagaccuucaccuauuggauaucuaggacuacuaucacaaagaacccgagacauauauaucagcagaagauuacuagguacauucacauggacacuaucagacuccgaaggaaaugaugccccaggagguuauugccuaaccagauggauguuaaucgaagcagaacuuaaaugcuucgguaacacagcaguagcuaaauguaaugaaaaacaugaugaagaauucugcgacaugcucagacuuuuugacuuuaacaaacaagcaauucaacgacuaaaagcagaagcacaaaugucaauccaacucauaaauaaagcaguuaacgcucuaauaaaugaucaauuaauaaugaaaaaucaccuaagagacauaaugggaauacccuacugcaacuauuccaaauacugguaucuaaaucacacaacaacaggaaaaacuucccuaccaaaaugcuggcuaguaucaaacggcucauaccuaaacgaaacucacuuuucagaugauauagaacaacaagcagauaauaugaucacugaaaugcuacaaaaagaauauauggaaagacaaggaaaaacaccacuaggacucguugaccucuucgucuucagcaccucuuuuuaucuaauaucaaucuuccuacacuuaguaaaaauaccaacacauaggcacguaguaggaaaaucaugucccaaaccucacagauuaaaccacaugggaauauguuccuguggacuauacaaacaaccaggcgucccuguaaaauggaaaagauaa

SEQ ID NO: 1985 - RNA, 1476 nt, Artificial Sequence
  derived and/or modified protein sequence (opt6) from LASV(G2903-SLE-2012;Clade IV)__AIT17332__GPC
augggacaaauaguuacauuuuuccaagaaguaccacauguaauagaagaaguaaugaacauaguauuaauagcacuaucaauacuagcaguauuaaaaggauuauacaauuuagcaaccugcggcuuaguagggcuaguaacauuccuacuauuaugcggacgaucaugcaccaccagcuuauacaaaggaguauacgaacuacaaacacuagaauuaaacauggaaacacuaaacaugacaaugccacucucuugcaccaaaaauaacucacaucauuacauaagaguaggaaaugaaacaggauuagaacuaacccucacaaauacaagcaucauaaaucacaaauucugcaaccuuuccgacgcacacaaaaagaaccuauaugaccacgcuuuaauguccauaauuagcacauuccaucucaguauuccaaacuucaaucaauacgaagcaaugagcugugacuucaauggaggaaaaauaucaguacaauacaaccuaucccacucauacgccguagacgcagcaaaccacugcggcacaguagcuaacgguguucuacaaacauucaugcgaauggcauggggcggaagcuauauagcacuagacucaggacacggaagaugggacugcauuaugacaaguuaccaauaucuaauaauacaaaauaccacaugggaagaucauugcuuauucucaagaccaucacccauaggauacuuaggacuacuaucacaaagaacuagagacauauacauaucaagaagacuacucggcacauuuacauggacacuaucagacucagaaggcagagacacaccaggcggauauugcuuaacccguuggauguuaauagaagcagaacuaaaaugcuuuggcaauacugccguugcuaaauguaacgaaaaacaugacgaagaauuuugcgacauguuaagacucuucgacuucaacaaacaagccauccaaagauuaaaagcagaagcacaaaugucaauacaacuaaucaacaaagcaguaaacgccuuaauuaaugaucaacuaauaaugaaaaaucaucuaagagacauaaugggaauaccauauugcaauuauucuaaauauugguauuuaaaucacaccaccacaggaagaacaucacuuccacgaugcuggcucguaucaaacggaucauauuuaaacgaaacccacuucucagaugacaucgaacaacaagcagacaacaugaucacagaaaugcuacaaaaagaauauauggaacgacaaggaaaaacaccacucggcuuaguagacuuauucgucuucucaacauccuuuuaccuaauuucaauauuuuuacaccucguaaaaauaccaacacauagacacauuguuggaaaaucauguccaaaaccacacagauuaaaccacauggguauauguucaugcggauuauacaaacaaccaggagucccuguuaaauggaaaagauaa

SEQ ID NO: 1986 - RNA, 1476 nt, Artificial Sequence
  derived and/or modified protein sequence (opt6) from LASV(G2944-SLE-2012;Clade IV)__AIT17340__GPC
augggacaaauuguuacauucuuucaagaaguaccacauguaauagaagaaguaaugaacauaguacuaauagcauuauccauacuagcagucuuaaaaggccuauacaacuuugcaacaugugguuuaguaggacuaguaacauuccuauuauuauguggaagaucauguacaaccucauuauauaaaggagucuacgaauuacaaacacucgaauuaaacauggaaacauuaaacaugacuaugccucuuucaugcacaaaaaacaauucacaccacuacauaaugguagguaacgaaaccggauuagaauuaacacuaacaaauauaucaauaauuaaccauaaauucuguaacuuaagugacgcccacaaaaaaaaucuauaugaucaugcacuaaugaguauaauaucaacuuuucauuuaucaauaccaaauuucaaucaauacgaagccauguccugcgacuuuaacggaggaaaaauaucaguccaauauaaucuaucacacucauaugcaggagaugccgcaaaccacuguggaacagucgcaaacggaguacuacaaacauuuaugagaauggccuggggcggauccuauaucgcacuagacucuggaagaggcgaaugggacugcauaaugaccucauaucaauaccuaauaauacaaaacacaacaugggaagaucacugccaauucucgcgacccucaccaauagguuacuuaggccuacuaucacaacgaacaagagauauauacauaagcagaagauuacuagguacauucaccuggacauuaagcgacucugaaggaaaagauacaccagguggauacugccuuacaagauggauguuaauagaagcagaacucaaaugcuucggaaacaccgcaguagccaaaugcaaugaaaaacacgacgaagaauucugugacaugcuuagacuauucgauuuuaacaaacaagcaauccaaagacuaaaagcugaagcacaaaugucaauccaacucauaaauaaagcaguaaacgcacuaauaaaugaucaauuaauaaugaaaaaccauuuaagagauauaaugggcauaccauacuguaauuacaguaaauacugguaccuaaaucauacaacaacaggcaaaacaucacuaccaaaaugcuggcuuguuucaaacggaucauaccuaaacgaaacacauuucuccgaugacaucgaacaacaagcagacaacaugaucacagaaauguuacaaaaagaauacauggaaagacaaggaaaaacaccacuaggauuagucgaccuauucguauucuccaccucauucuaccuaaucucaauuuuccuacaucuaguaaaaauaccaacacacagacacauagucggcaaaccaugcccacgaccacaucgacuaaaccacaugggaauaugcagcuguggauuauacaaacaaccagguguccccgucaaauggaaaagauaa

SEQ ID NO: 1987 - RNA, 1476 nt, Artificial Sequence
  derived and/or modified protein sequence (opt6) from LASV(G3010-SLE-2013;Clade IV)__AIT17344__GPC
augggacaaauaguaacauuuuuccaagaaguaccccacguaauagaagaagucaugaauaucguguuaauugcacuaucaauccucgcaguucuaaaaggccuauacaauuucgccacauguggccuaguuggauuaguaaccuuccuauuacuauguggccgaucuuguacuaccuccuuauauaaaggagucuaugaacuacaaacacuagaacuaaauauggaaacacugaauaugacaaugccacucucauguacaaaaaacaacucacaccacuauauaaugguaggaaacgaaacaggcuuagaacuaacacuaacaaauacaagcauaauaaaccacaaauucugcaaccuuagcgaugcacauaaaaaaaacuuauacaaccacgcccuaaugucuauaauauccacauuccacuuauccauaccuaacuucaaucaauacgaagccaugucaugugacuucaauggaggaaaaaucuccguacaauacaaccuaucucauaguuacgcaggagacgcagccucucauugcggaacuguagcaaauggaguauuacaaacauucaugcgaauggcauggggaggaucauauauagcauuagauucuggauacggaaaaugggauugcaucaugacaucauaccaauacuuaauaauacaaaacaccaccugggaagaccacugucaauucucccgacccaguccaauaggauaccucgguuuauuaucacaacgaacaagagacauauacauaucaagaagauugcuaggaacauuuacauggacacuaagugauucagaaggaaaagacaccccaggaggauacugccuaacaagauggaugcuaauagaagcagaacuaaaaugcuucggaaauacagcagucgccaaaugcaacgaaaaacacgacgaagaauuuugcgacaugcuuagauuauucgacuuuaacaaacaagcuauacaaagauuaaaaaccgaagcacaaaugucaauacaauuaauaaauaaagcaguaaacgcccuaauaaacgaucaacuuauaaugaaaaaccaucuuagagacauaaugggaaucccuuacugcaacuauucaaaauauugguacuuaaaccacaccacaacaggaaaaacaucacuccccaaaugcuggcuaguauccaauggcucauaucucaacgaaacacacuucucagaugauaucgaacaacaagccgacaacaugaucacagaaaugcuucaaaaagaauacauggaacgacaaggaaaaacaccacuaggccucguggaccuauucguauucuccacaucauucuaucuaauuucuauauuccuacaucucguuaaaauaccaacacaccgacauauaguaggcaaaucauguccaaaaccacacagacuaaaccauaugggaaucuguuccuguggacucuauaaacaaccaggaguaccaguaagauggaaaagauaa

SEQ ID NO: 1988 - RNA, 1476 nt, Artificial Sequence
  derived and/or modified protein sequence (opt6) from LASV(G3016-SLE-2013;Clade IV)__AIT17348__GPC
augggccaaauagucacauucuuucaagaaguaccacacguaauagaagaagucaugaacauuguauuaauagcacuuucaauauuagccguauuaaaaggacuauacaacauagcaaccugcggacuaauaggauuaguaacauuccuacuacuauguggacgaagcugcacaacuucacucuacaaaggaguauacgaacuacaaacacuagaacuuaacauggaaacauuaaacaugacaaugccacucucauguacaaaaaacaauagccaucacuacauaaugguaggaaaugaaacaggauuagaacuaacacuaacaaauacaucaauaauuaaccacaaauucugcaacuuauccgacgcacacaaaaaaaaccuauacgaccacgcauuaaugucaauaaucucaacauuccaccuaucaauccccaauuuuaaccaauaugaagcuaugucaugugacuuuaacggaggaaaaaucucaguacaauacaaucuaagucauuccuacgcaggagacgccgcaaaucacugcggaaccgucgcuaauggaguacuccaaacauuuaugcgcauggcauggggaggauccuacauagcccuagauucaggaagaggacguugggacugcauaaugacaucauaucaauaccuaauaauacaaaacacuacaugggaagaucacugccaauucucaagaccaucacccauaggauaccuuggccuacucucacaacgaacaagagacaucuauaucucaagaagacuacuaggaacauucacuuggacccuaagugauucugaaggaaaugacacaccaggcggauacugcuuaacaagauggauguuaauugaagccgaacuaaaaugcuucggaaacacagcaguagcaaaauguaaugaaaaacaugacgaagaauuuugcgacauguuaagacuauucgauuucaacaaacaagccauccaaagauuaaaagccgaagcucaaaugagcauacaacuuaucaacaaagcagucaacgcccuuauaaacgaccaacuaaucaugaaaaaccacuuaagagauauaaugggaauacccuacuguaacuauuccaaauauugguaucuaaaccacaccaccacagguaaaacaucccuacccaaaugcugguuagucagcaacggcucauaccuaaacgaaacacacuuuucagaugacauagaacaacaagccgacaacaugauaacagaaaugcuucaaaaagaauacauggaaagacaaggcaaaacaccacuaggacuaguugacuuauuuguauucucuaccucauucuaucuaaucuccauauuuuuacacuuaguaaaaauaccaacacacagacacauaguaggaaaaccaugcccaaaaccacauagauuaaaccacaugggcauauguucaugcggucuauacaaacaacccggaguaccuguaaaauggaaacgcuaa

SEQ ID NO: 1989 - RNA, 1476 nt, Artificial Sequence
  derived and/or modified protein sequence (opt6) from LASV(G3034-SLE-2013;Clade IV)__AIT17350__GPC
augggacaaauaguaacuuucuuccaagaaguaccacauguaauagaagaaguaaugaacauaguauuaauagcccuuucaauccuagcaguacucaaaggacuauacaauguagcaaccuguggauuaauuggucuaguuacauuccuucuucuauguggacgaucuuguacaacaacacucuacaaaggaguauaugaacuucaagcauuagaacuaaacauggaaacacuaaacaugacaaugccauuauccugcaccaaaaauaacucucaccauuauauaaugguaggaaacgaaacaggccucgaacuuacacucacaaauacaucaauaauagaccacaaauuuugcaauuuaagcgacgcacacaagaaaaaccuauacgaccaugcauuaaugucuaucauaucaacuuuccaucuaagcauaccaaacuuuaaccaauacgaagcaaugucaugcgacuucaacggaggaaaaaucucuguacaguacaaccuaucacacucuuaugcaggcgaugcagcaaaacauuguggaacuguagcaaacggaguacuacaaacauucaugcgaauggcaugggguggaucuuacauagccuuagacucaggaagaaauggaugggacugcguuaugaccucauaccaauaccuaauaauacaaaacacaaccugggaagaccauugucaauucucccgccccaguccaaucggauaccuaggauuacuuucucaacgaacacgagauauauauauauccagacgacuccuaggaaccuucacauggacccuaucugacucagaaggaaaagacacaccaggaggauacugcuuaacaagauggaugcuuauagaagcagaacuaaaaugcuuuggaaauacagccguagcaaaaugcaacgaaaaacacgaugaagaauuuugcgauaugcuacgacuauucgacuuuaacaaacaagccauccaaagauuaaaaaccgaagcacaaauguccauucaacuaaucaauaaagccguuaacgcauuaauaaacgaucaauuaauaaugaaaaaccaccuaagagauaucaugggaauaccauacugcaauuacucaaaauacugguacuuaaaccacacaguaaccggaaaaacaucauuaccuagauguuggcucguauccaacggaucauaucuaaacgaaacacacuucucagacgacauagaacaacaagccgacaauaugauaacagaaaugcuacaaaaagaauacauagaacgacaaggaaaaacucccuuaggucuaguugaucuuuucgucuucuccacaucauucuaccuaauuucuauauuucuacauuuaguaaaaauaccaacacaucgacacauaauuggaaaaccaugcccaaaaccacacagauuaaaucacaugggaauauguucaugcggacuauacaaacaaccagguguaccaguacgauggaaaagauaa

SEQ ID NO: 1990 - RNA, 1476 nt, Artificial Sequence
  derived and/or modified protein sequence (opt6) from LASV(G3101-SLE-2013;Clade IV)__AIT17354__GPC
augggacaaauaguaacauuuuuucaagaaguuccacacgucauagaagaaguaaugaacauaguccuaauagcauuauccaucuuagcaguucuaaaaggacuuuacaauuucgccaccuguggacuaguaggacuagucacauucuuauuacucuguggccgcucaugcacaacaucgcuauacaaaggaguauacgaauuacaaacacuagaauuaaauauggaaacauuaaauaugacuaugccauuaucaugcaccaaaaacaacucacaucauuauauaaugguaggaaacgaaacaggacuagaacuuacacuaaccaacauaucuauaauaaaucacaaauuuugcaaucucucagacgcccauaaaaaaaauuuauacgaccacgcacuuaugucaauaauaucaacauuucauuuaucaauacccaacuucaaccaauaugaagcaaugucaugcgauuucaauggugguaaaauaagcguacaauacaacuuaucacacucuuacgcaggcgacgcugcaaaccauugcggcacaguugccaacggaguauuacaaacauuuaugagaauggcauggggcgguuccuacaucgcacuugacucaggacacggaggaugggauugcauaaugacauccuaucaauaccuaauaauacaaaacacaacaugggaagaucacugucaauucucacgacccuccccaauuggauaucuaggacuauuaucccaaagaacuagagauauuuacaucucuagacgacuuuuaggaaccuuuacauggacacuaucagauucagaaggcaaagacacucccggcgguuacugcuuaaccagauggaugcuuauagaagcagaacuaaaauguuuuggaaauacagcaguugcaaaauguaacgaaaaacacgacgaagaauucugcgacauguuaagacuauucgacuucaacaaacaagcaauacaaagacuaaaagcagaagcacaaaugucaauacaacuaauaaauaaagcaguaaaugcccucauaaacgaccaacucauaaugaaaaaucaccuacgugacauuaugggaauaccauacuguaacuacucuaaauacugguaccuaaaccauacaacaaccggaaaaacguccuuaccaaaaugcugguuaguaucaaacggaucauauuuaaacgaaacccacuuuucagacgacaucgaacaacaagcagacaauaugauaacugaaauguuacaaaaagaauacauggaaagacaaggaaaaacaccucuaggacuaguagaccuauucguuuuuagcacuucauucuaucuaauauccauauuccuacaccucguaaaaauaccaacccacagacacaucguaggaaaaccaugcccacgaccacacagauuaaaccauaugggcauaugcucauguggauuauauaaacaaccaggaguaccuguaaaauggaaaagauaa

SEQ ID NO: 1991 - RNA, 1476 nt, Artificial Sequence
  derived and/or modified protein sequence (opt6) from LASV(G3110-SLE-2013;Clade IV)__AIT17360__GPC
augggacaaauaguuacauuuuuucaagaaguaccucaugucauagaagaaguaaugaacaucguacuaauagcccuaucaauauuagcaguacuaaaaggacuauacaauuuugccacaugcggacuaguaggucuaguaacauucuuacuauuaugcggaagaucaugcacaacaucccuuuacaaaggaguauacgaacuacaaaccuuagaacuaaacauggaaacacuaaauaugacaaugccacucucauguacuaaaaacaacucccaccacuauauaagaguaggaaacgaaacaggauuagaacuaacacuaacaaacacaucaaucauaaaucacagauucugcaaccuaucagaugcucacaaaaaaaacuuauaugaccaugcauuaauguccauaaucucaacauuccaccuaucgauaccuaauuucaaccaauacgaagcaaugucuugcgauuucaauggcggaaaaauaucuguacaauauaaucuaagccacagcuacgcaggagacgccgcaaaccauugcggaacuguagccaauggaguuuuacaaacauucaugagaauggcuuggggaggauccuauauagcacuugacucaggacacggaaaaugggacugcaucaugacaucuuaucaauaucuaauaauacaaaacacaacaugggacgaccauugucaauuuucaagaccaucacccauaggauaucuaggccuacuaucacaaagaacaagagauaucuacauauccagacgauuauugggaaccuucaccuggacacuaucagauucagaagguaaagacaccccaggaggauacugccucacaagauggaugcuuaucgaagcagaauuaaaaugcuuuggaaauacagcaguagcaaaaugcaacgaaaaacacgacgaagaauuuugcgacaugcuaagauuauuugauuucaauaaacaagcaauucgaagauuaaaagcagaagcacaaaugucuauacaacuaaucaacaaagcaguuaacgcauuaauaaaugaccaacuaauaaugaaaaaccaccuaagagacauaaugggaauaccauauugcaacuauucaaaauacugguaucuaaaucacacaacaacgggaaaaacaucucucccuagaugcugguuaguauccaauggaucuuaccuaaaugaaacacacuucucagacgacauugaacaacaagcagacaauaugauaacagaaaugcuacaaaaagaauacauggaaagacaaggaaaaacaccccuaggauuaguagaccuuuuuguauucucaaccucauucuauuuaauauccaucuuccuucaucuaguaaaaaucccuacacacagacacauaguuggcaaaucuugucccaaaccacacagauuaaaucauaugggaauaugcucauguggauucuacaaacaaccagguguaccaguaaaauggaaaagauaa

SEQ ID NO: 1992 - RNA, 1476 nt, Artificial Sequence
  derived and/or modified protein sequence (opt6) from LASV(G3148-SLE-2013;Clade IV)__AIT17364__GPC
augggacaaauaguaacauucuuucaagaaguaccucacguaauagaagaaguaaugaacaucguauuaauagcauuaucaauacucgcaguacuaaaaggacuauacaacuuugcaacauguggccuaguaggacuaguaacauuucuuuuacuaugcggacgauccuguacaacaucauuauacaaaggaguauaugaacuucaaacccuagaacuaaacauggaaacacuaaauaugaccaugccacuaucaugcacaaaaaacaauucacaucacuacauuaugguaggaaaugaaacaggacucgaacuaacauuaacaaauacaaguauaaucaaccacaaauucugcaauuuaucagacgcccacaaaaaaaaccuauacgaccacgcauuaaugucaauaauuagcacauuucaccuaaguauacccaacuucaaccaauaugaagcaaugagcugcgacuuuaauggagguaaaauauccguucaauacaaccuaucacacucauacgccggugaugcagcaaaucacugcggcacaguugcaaacggcgucuuacaaacauucaugagaauggcauggggaggaagcuacauagcauuagauucaggucgagaccgaugggacugcauaaugaccucauaccaauacuuaauaauacaaaacacaacaugggaagaccacugccaauucaguagaccaucucccauaggauaccuaggacuucuaucccaaagaacaagagacauauacauaucuagaagauuauuaggcacauucacauggacacuaucagauucagaaggaaaagauacaccaggaggauacugucucacaagauggaugcuuauagaagcagaacuaaaaugcuuugguaacacagcaguugcuaaauguaacgaaaaacacgaugaagaauuuugcgacaugcuaagacuauucgacuuuaauaaacaagcaauacaacgacuaaaagcagaagcacaaaugucaauacaauuaauaaauaaagcuguaaacgcauuaauaaaugaucaacuaauaaugaaaaaucacuuaagagacauaaugggaauccccuacugcaauuauucaaaauacugguacuuaaaucauacaacaaccgguaaaacaucauuacccaaaugcugguuaguaagcaacgguucauacuuaaacgaaacacacuucucugacgacaucgaacaacaagccgacaauaugauaacagaaauguuacaaaaagaauacauagaaagacaaggcaaaacaccacuaggauuaguagaccuauucguauuuucaacaucguucuacuuaauaagcauauuucuacaccuaguaaaaauuccaacacaccgacacauugucggaaaaccaugucccaaaccacacagacuaaaccacaugggaauaugcuccugcggacuauacaaacaaccaggaguuagcguaaaauggaaaagauaa

SEQ ID NO: 1993 - RNA, 1476 nt, Artificial Sequence
  derived and/or modified protein sequence (opt6) from LASV(G3151-SLE-2013;Clade IV)__AIT17368__GPC
augggacaaauaguaaccuucuuucaagaaguaccacauguaauagaagaagucaugaacauaguauuaauagcuuuauccauauuagcaguacuaaaaggauuauacaauuucgcaacaugcggacuaguuggacuaguaacauucuuauuacucugcggcagaucauguacaacaucccuauauaaaggaguauacgaauuacaaaccuuagaacuaaacauggaaacacucaacaugacaaugccauuaucauguaccaaaaacaacucacaccauuauauaaugguaggaaacgaaacaggacuugaacuaacauuaacaaacacaucuaucauaaaucacaaauucugcaaccuaucagaugcacauaaaaaaaaucuauaugaucacgcacuaaugucaauaauaucaacauuucaccuaucaauaccuaacuuuaaccaauucgaagcaaugucaugugauuucaauggaggcaaaauaucaguacaauacaaucuaucucacucauaugcaggagaugcagcaaaccauugcggaacagucgcaaacggaguauuacaaacauuuaugagaauggccuggggcggauccuacaucgcuuuagacucaggacacuccaaaugggacugcauaaugaccucauaccaauaccuaaucauacaaaacaccacaugggacgaucacugccaauucucaagaccaucacccauaggauaccuaggacuacuaucacaaagaacaagagauauauacauaucacgaagacuacuaggaaccuucacauggacacuauccgacuccgaaggcaaagauacaccaggaggcuacugccuaaccagauggaugcuaauagaagcagaacucaaaugcuucggaaauaccgccguugcaaaaugcaacgaaaaacaugacgaagaauuuugcgacauguuaagacucuucgauuuuaacaaacaagcaauucaacgccuaaaagcagaagcacaaaugucaauacaauuaauaaauaaagcaguaaacgcuuuaaucaacgaccaguuaauaaugaaaaaccacuuacgugacauaaugggaauacccuacugcaauuauucaaaauacugguaucuaaaccauaccaccaccggaaaaacaagcuuaccaaaauguuggcuaguaucaaacggcucauaccuaaacgaaacccacuuuuccgacgauaucgaacaacaagcagauaacaugauaacagaaauguuacaaaaagaauauauggaacgacaagguaaaacaccacuaggacuagucgacuuauucguuuuuuccacaucauucuaccuaauuagcauauuucuacaccucguaaaaauaccaacacaccgacacauaguaggaaaaucauguccaaaaccacacagacuaaacuacaugggaaucugcaguuguggauucuauaaacaaccaggagucccaguaaaauggaaacgauaa

SEQ ID NO: 1994 - RNA, 1476 nt, Artificial Sequence
  derived and/or modified protein sequence (opt6) from LASV(G3157-SLE-2013;Clade IV)__AIT17370__GPC
augggacaaauaguaacauuuuuccaagaaguaccacacguaauagaagaagucaugaacauaguacuaauagcccuuucaauacuagcuguacuaaaaggacuuuacaacuuugcaacaugcggcuuaguaggccuaguaacauucuuacuucuaugcggcagauccugcacuacuucauuauacaaaggagucuaugaacuucaaacauuggaauuaaacauggaaacacuaaacaugacaaugccacuaucauguacaaaaaauaauucacaucacuacauaaugguaggaaacgaaacagguuuagaauuaacacuaacaaacacaucaauaaucaaccacaaauucugcaauuuaucagacgcccacaaaaaaaaucuauaugaucacgcacuuaugucaauaauauccaccuuccaccucucuauaccuaauuucaaccaauacgaagccaugucaugugacuucaacggaggaaaaauaucaguacaauauaaucuaucacacucauaugcaggagacgcagcaaaccacugcggcacaguagcaaacggaguacuccaaacuuucaugcgaauggcaugggguggaucauacauagcacuagacuccgguagagauagaugggacugcauaaugacauccuaccaauaucuaauaauccaaaacacaacaugggaagaucacugccaauucucucgaccauccccaauaggcuaccuaggauuauuaucccaaagaacacgcgacauauacauaucaagacgucuccuaggaacauucacuuggacccuaucagacucagaaggaaaagauacuccaggaggcuauugccuuacaagauggaugcuaauagaagccgaauuaaaaugcuucggaaauacggcagucgcaaaaugcaacgagaaacacgacgaagaauucugcgacauguuacgacuuuuugacuucaauaaacaagcaauacaacgacuaaaagcagaagcacaaaugagcauacaacuaauaaauaaagcaguaaacgcacuaauaaaugaccaacuaauaaugaaaaaccaccuaagagacauaaugggaauaccauacugcaacuauucaaaauauugguaccuaaaccauacaacaacaggcaaaacaucuuuacccaaauguuggcuaguaucaaacggauccuaccuaaacgaaacucacuucucagacgacauagaacaacaagccgacaacaugaucacagaaauguuacaaaaagaauacauggaaagacaaggaaaaacaccacuaggacuaguagaucuauuuguauucucaacaucauucuaccuaauaucaauauuccuacaccuaguaaaaauaccaacccacagacacauuguuggaaaaccuuguccaaaaccccauagacuaaaucacaugggaaucugcagcugcggccuauacaaacaaccagguguuucaguuaaauggaaacgauaa

SEQ ID NO: 1995 - RNA, 1476 nt, Artificial Sequence
  derived and/or modified protein sequence (opt6) from LASV(G3206-SLE-2013;Clade IV)__AIT17378__GPC
augggacaaauaguaacauucuuccaagaagucccacacguaauagaagaaguaaugaacauaguacuuaucgcacuaucuauccuagcaguucuaaaaggccucuacaaccuagccacaugcggccuaguaggacuaguaacauuccuauuacuaugcggacgcucaugcacaacaucuuuauauaaaggcgucuacgaacuacaaaccuuagaacuaaacauggaaacucuaaacaugacaaugcccuuaucuuguaccaaaaauaacucacaccauuacauaaugguagguaaugaaacuggauuagaacuaacacuaacaaacaccucaauaauuaaccacaaauucugcaaucuauccgaugcacacaaaaaaaaucucuacgaccacacauuaaugagcauaauaucaacuuuccaccuaucaauaccuaacuuuaaccaauacgaagcaaugucaugcgacuucaacggagguaaaauaucaguccaauacaaccuaucacauaguuaugcagucgacgcagccaaccacuguggaaccguagcaaauggaguauuacaaacauuuaugagaauggcauggggaggaucauauauagcacuagacuccggaagaucaggcugggauugcauaaugacaucauaucaauaccucguaauccaaaacacuacaugggaagaccacugccaauucucaagaccauccccaauaggcuauuuaggacuacuaucucaaagaacaagagacauauacauaucucgaagacuauuaggaaccuucacauggacuuuaucagauuccgaagguaaaaauacaccaggaggcuacugucuaacacgcuggaugcucaucgaagcagaacuaaaaugcuucggaaacacagcaguugcaaaaugcaacgaaaaacacgacgaagaauuuugcgauauguuaagauuauucgacuucaacaaacaagcaauacaacgacuaaaagccgaagcacaaauguccauacaacuaauaaacaaagccguaaacgcacuaaucaaugaccaacuuauaaugaaaaaucaucuaagagauauaaugggcauaccauacuguaacuacucuaaauacugguaucucaaccacacuaccacuggaagaacaucacuaccccgauguugguuaguauccaacgguucauacuuaaacgaaacucauuucucagaugacauugaacaacaagccgauaacaugauaacagaaaugcuccaaaaagaauauauggaaagacaaggaaaaacuccccuaggauuaguagaccucuuuguauucuccacaagcuuuuaucuaauauccaucuuuuuacacuuaguaaaaauacccacacaccgacauauaguagguaaaucaugcccuaaaccacauagacucaaccacaugggaaucugcucaugcggauucuacaaacaaccuggugucccaguaaaauggaaaagauaa

SEQ ID NO: 1996 - RNA, 1476 nt, Artificial Sequence
  derived and/or modified protein sequence (opt6) from LASV(G3234-SLE-2013;Clade IV)__AIT17388__GPC
augggacaaauugucacauucuuccaagaaguaccacacguaauagaagaaguaaugaacauaguauuaauagcccuuuccauacuagcgguacuaaaaggauuauacaacguagccacaugcggacuuauaggccuaguaaccuuccuacuacugugugguagaucuugcacaacaacacuauacaaaggcguauacgaauuacaagcccucgaacuaaacauggaaacacuaaacaugacaaugccacuaucaugcacaaaaaacaacucacaccauuacauaagaguaggcaaugaaaccggacuagaauuaacacuaacaaauacaucaauaauuaaccacaaauucugcaauuuaucagacgcacauaaaaaaaaccuauacgaccacgcacucaugucaauaauaucaacauuccaccuaaguauaccaaacuucaaccaauacgaagcaauguccugcgauuucaacggaggaauuauaucaguucaauacaaccucucccacucauaugcaggagacgcagcaaaccauugcggaacagucgcaaauggaguacuacaaacauucaugcgaauggcauggggaggaucauacauagcacuagauucaggacggaacggaugggacugcauaaugacaucauaccaauaccucauaauacaaaacacaacaugggacgaucacugucaauuuucaagaccaucaccaauaggauaccuaggacuacuaucacaaagaacaagagauauauacauaucaagaagacuacuagguacauucacauggacacuaucagacucagaaggcaaagacacacccggcggauacugcuuaacaagauggaugcuaauagaagcagaauuaaaaugcuuuggaaacaccgcagucgcuaaaugcaaugaaaaacacgaugaagaauuuugcgauauguuaagacuauuugauuucaacaaacaagccauacaacgccuaaaaacagaagcccaaaugaauauccaacuaauaaacaaagcagucaacgcacuuauaaaugaccaacuaauaaugaaaaaucaucuaagagacauuaugggaauuccauacugcaauuacucaaaauacugguaccucaacaacacugcaacaggaaaaacaucacuaccaagaugcuggcuagucuccaacggcagcuacuuaaaugaaacacacuuuucugaugacauagaacaacaagcagauaacaugaucacagaaaugcuccaaaaagaauacauggaacgacaaggaaaaacaccauuaggauuaguugauuuauucguauuuucaacaucauuuuacuuaauuucaauauuucuacaccuaguuaaaauccccacacaccgacacauuguaggaaaaccauguccaaaaccacaccgccucaaccacauaggcauaugcucauguggccucuauaaacaaccaggagucccaguaaaauggaaacgauaa

SEQ ID NO: 1997 - RNA, 1476 nt, Artificial Sequence
  derived and/or modified protein sequence (opt6) from LASV(G502-SLE-2009;Clade IV)__AIT17126__GPC
augggacaaauaguaacauuuuuccaagaaguaccacacgucauagaagaaguaaugaauauaguauuaauagcccuuagcauccucgcaguacuaaaaggucuauacaacuucgcaacaugcggccuagucggacuacuaacauuccuauuauuauguggucgcucaugcacuacaggacucuauaaaggaguauacgaauuacaaacauuagaauuaaauauggaaacauuaaacaugacaaugccacuauccuguaccaaaaacaacucacaccauuauauaaugguaggcaacgaaacaggacucgaacuaacucuuacaaauacaucuauaauaaaccacaaauucugcaacuuaucugacgcacacaagaaaaaccuauacgaccacgcuuuaaugucaauaaucucaacauuccaucuaucaauaccaaacuucaaccaauaugaagcaaugucaugugauuucaacggaggaaaaauaucaguacaauacaaccuaucacacucauacgcaggagacgcagccgaccacugcggaacaguagcuaaugguguacuacaaacauucaugagaauggcauggggcggauccuacaucgcacuugauuccggaagaggaagaugggacugcaucaugacuucauaucaauacuuaauaauacaaaacaccacaugggaagaccauugccaauucucaagaccaucacccauaggauaccuaggcuuauuaucccaaagaacaagagacauauacauaucuagaagacuacucggaacauucacuuggacacucucugauucagaaggaaaagacacucccggaggauacugccuaacacgauggauguuaauagaagccgaauuaaaaugcuucggaaauacagcaguugcuaaaugcaacgaaaaacaugacgaagaauuuugcgauauguuaagauuauucgacuucaacaaacaagcaauccaaagacuaaaagcagaagcacaaaugucaauacaacuaauuaauaaagcaguaaacgcucuuauuaacgaucaacuuguaaugaaaaaccaucuaagagacauaauggguauuccauauuguaacuacucccguuacugguacuuaaaccacaccacaacaggaagaacaucauuaccuaaauguuggcuaguaucaaacggaucauaccuaaacgaaacacauuucuccgaugacauugaacaacaagcagacaacaugauaacagaaaugcuacaaaaagaauacauggaaagacaaggaaaaacaccacuaggccucguagaccucuucgucuucuccacuucauucuauuuaauaucaauauucuuacaccuaguaaaaauaccaacucacagacauauagucggaaaaaguugcccaaaaccacaccgccuaaaccacaugggcauuuguucauguggacucuacaaacaaccaggcguaccaguuaaauggaaacgauga

SEQ ID NO: 1998 - RNA, 1476 nt, Artificial Sequence
  derived and/or modified protein sequence (opt6) from LASV(G503-SLE-2009;Clade IV)__AIT17130__GPC
augggucaaauagucaccuucuuucaagaagucccacacguaauagaagaaguaaugaauaucguacucaucgcucuauccauacucgccguccuuaaaggucuauacaacuucgccacaugcggcuucguaggauuaguuacauucuuauuacuaugcggacgcucaugcacaacuucacuauacaaaggaguauacgaauuacaaacauuagaacuaaacauggaaacacuaaacaugacaaugcccuuaucauguacuaaaaauaauucccaccacuacauaagaguagguaacgauacaggacuagaacuaacauuaacaaacacuucaauuauaaaccacaaauucuguaaucuaucagacgcacacaaaaaaaaccucuacgaucacgcccucaugucaaucaucucaacauuccacuuaucuauacccaacuucaaucaauacgaagccauguccugcgacuucaacggaggaaaaauauccguacaauauaaccuaucacauucauaugcuguagaugcagcaagccacuguggaacaaucgcaaacggaguauuacaaacauuuaugagaauggcauggggaggcuccuauauagcacucgauucaggaagagacagaugggacuguaucaugacaucauaccaauacuuaauaauacaaaauacaacaugggaagaucacugucaauuuucaagaccaaguccaauaggauauuuaggacuacuaucucaaagaacaagagauauauacauuucacgaagacuacucggaacauuuacuuggacacuaagcgacucagaaggaaaagacaccccuggaggauacugccuaacacgcuggaugcucauagaagccgaacuaaaaugcuuuggcaauacggcaguagcaaaauguaacgaaaaacacgacgaagaauuuugugacaugcuaagacucuucgacuuuaacaaacaagcaauacaacguuuaaaagcagaagcccaaauguccauacaacuaauaaacaaagcagucaacgcacuaauaaaugaucaauuaauaaugaaaaaucacuuacgagauauaaugggcauaccauacugcaacuacucaaaauacugguacuuaaaccacacaaccacaggaaaaacaucccuacccaaaugcuggcucguaucaaacggaucauaccucaaugaaacucacuucucagacgacauagagcaacaagccgacaauaugauaaccgaaaugcuacaaaaagaauauauggaaagacaaggaaaaacaccccuuggauuaguagaucuauucguauucucuacauccuucuaccuaauaucaauauuccuacaccuuguaaaaaucccaacccacagacacauaguaggaaaaucaugcccaaaaccccacagauuaaaccauaugggcauaugcucuugcggacuauauaaacaacccggcguaccaguuaaauggaaaagauaa

SEQ ID NO: 1999 - RNA, 1476 nt, Artificial Sequence
  derived and/or modified protein sequence (opt6) from LASV(G610-SLE-2009;Clade IV)__AIT17134__GPC
augggacaaauaguaacauuuuuucaagaaguaccacaugucauagaagaagucaugaacauaguauuaauagcacuaucaauccucgccgucuuaaaaggguuauacaauuuugccacaugcggacuaguuggacuaguaaccuuucuauuacuauguggaagaucauguacaaccucauuauacaaaggagucuacgaauuacaaacauuagaacuaaauauggaaacacucaauaugacaaugccacuaucaugcaccaaaaauaauucccaucauuacauaaugguaggaaacgaaacaggacuagaacuaacauuaacaaacacaucuauaauaaaccacaaauucuguaaccuaucugacgcacauaaaaaaaaucuauacgaucaugcacucauguccauaaucucuacauuccaccuaucaaucccuaacuucaaccaauacgaagcaaugucaugugacuucaacggcggaaaaauaucaguacaauacaauuuaucacacuccuacgcuggugaugcagccaaccauuguggaacaguagccaacggaguacuacaaacauucaugagaauggcauggggagguucauacaucgcacuagacucaggacgaggccgaugggacuguauaaugacaucauaucaauaccuaauaauacaaaacacaacaugggaagaccauugccaauuuucaagaccaucaccaauaggauauuuaggccuacuaucucaaagaaccagagacauauacauaucaagaagacuacuuggaacauucacauggacccuuagugacucagaaggaaaagauacacccggaggauacugccuaacacgauggaugcuuauagaagcagaguuaaaauguuuuggaaacacagcaguagcaaaaugcaaugaaaaacacgacgaagaauucugugauaugcucagauuauuugauuucaacaaacaagcaauacaacgucuaaaagcagaagcacaaaugucaauacaauuaaucaauaaagcaguaaacgcacucauaaacgaccaauuaaucaugaaaaaccaucucagagacauaaugggaauaccauauuguaacuauucaaaauacugguaucuaaaccacaccaccacaggaaaaacaucauuacccaaauguuggcuagucucaaacggaucauauuuaaaugaaacacacuucucagacgacauagaacaacaagcagacaacaugauaacagaaaugcuacaaaaagaauacauggaaagacaaggaaaaacaccuuuaggcuuaguugaccucuucguauucucaacaucauucuauuuaauaucuauauuccuacaccuaguaaaaaucccaacacacagacauauaguaggaaaaucuugcccaaaaccccacagacuaaaccauaugggaauauguucauguggauuauacaaacaaccuggaguaccagucaaauggaaaagauaa

SEQ ID NO: 2000 - RNA, 1476 nt, Artificial Sequence
  derived and/or modified protein sequence (opt6) from LASV(G636-SLE-2009;Clade IV)__AIT17138__GPC
augggccaaauuguaaccuucuuccaagaagucccucauguaauagaagaaguaaugaauaucguauuaaucgcucuauccauuuuagcaguacuaaaaggacucuacaaccuugcaacaugcggcuuaguaggcuuagucacauuuuuauuacuaugcggcagaucaugcacaacaucauuauacaaaggaguauacgaauuacaaacccuagaacuaaacauggaaacccuaaauaugacaaugccauuauccuguacuaaaaauaacagccaccauuauauuaugguaggaaacgagacuggacuagaacuaacauuaaccaacacaucacuaaucaaccacaaauuuugcaauuuaucugaugcacacaaaaaaaaccuuuacgaccaugcacuaaugucuauaauuucaacuuuucaccuaagcauuccaaacuucaaccaauaugaagcaaugucaugcgacuucaacggaggaaaaauaaguguucaauacaauuuaucccacucauacgccgucgaugcagcaucacauuguggcacaguagcaaauggaguucuacaaacauucaugaggauggcauggggcggaucauacauagcacuagacucaggaagaggaggaugggauugcauaaugacaucuuaccaauacuuaaucauccaaaacacaacaugggaagaccacugccaauuuucucgaccaucaccuauagguuaucuuggacuauuaucccaaagaacacgagacaucuauauauccagacguuuacuaggaacauuuacauggaccuuaucagauucagaaggcaaagauacaccaggaggauauugccuaacaagauggauguuaauagaagcagaacuaaaauguuuuggaaacacugccgucgcaaaaugcaaugaaaaacacgacgaagaauucugcgacaugcuaagacucuucgacuucaacaaacaagcaauucaacgacuaaaagcagaagcacaaaugucaauacaauuaauaaacaaagcaguaaaugcauuaauaaaugaucaauuaauaaugaaaaaccaccucagagacaucaugggaauaccauacugcaacuauuccaaauauugguaccuaaaccauaccacuacuggccguacaucacucccaagaugcuggcuaguaucaaacggaucauauuuaaaugaaacacacuuuucugaugacauugaacaacaagcagacaacaugaucaccgaaaugcuccaaaaagaauacauggaaagacaaggaaaaaccccacuagguuuaguugaccuauuugucuucuccacuucauuuuacuuaauaucaauauuccuccaccucgugaaaaucccaacccacagacacauagucggaaaaucaugcccuaaaccacaucgauuaaaucacaugggaauaugcucaugcggccucuacaaacaaccagguguaccaguaaaauggaaacgauag

SEQ ID NO: 2001 - RNA, 1476 nt, Artificial Sequence
  derived and/or modified protein sequence (opt6) from LASV(G692-SLE-2009;Clade IV)__AIT17146__GPC
augggacaaauaguaacauucuuucaagaaguaccacauguaauagaagaagucaugaauaucguauuaauagcauuaagcaucuuagcaguacuaaaaggccuuuacaauuuagcaacauguggauuaguaggacuagugacauuccuacuacuauguggaagaucaugcacaacaucacuauacaaaggaguuuacgaacuacaaacacucgaacuaaacauggaaacauuaaacaugacaaugccacuaucaugcaccaaaaacaauucacaccacuacauaaugguaggaaaugaaacaggauuagaauuaacauuaacaaauacaucaauuauaaaucauaaauucugcaacuuaucagacgcacauaaaaaaaaucuauacgaccaugcauuaauguccauaauauccacauuucacuuaucaauucccaacuuuaaccaauacgaagcaaugucaugcgauuuuaacggcggaaaaaucucaguacaauacaaucuaucacauucauacgcaggagaugccgccaaccacugcggaacaguagcaaacggaguacuacaaaccuuuaugagaauggcaugggguggaucauacauagcauuagacucaggacgcggaagaugggauugcauaaugacaucauaucaauauuuaauuauacaaaacacaacaugggaagaccacugcucauucucaagacccaguccaauagguuaccuaggacuacuuucacaaagaacaagagacauauacaucuccagaagacuacuagguacuuuuacauggacacuauccgacagugaaggcaaagauacucccgguggcuacuguuuaacacgauggaugcucauagaagcugaauuaaaaugcuucgguaacacagccguagcaaaaugcaacgaaaaacaugacgaagaauucugcgacaugcuacgacucuuugacuucaacaaacaagcaauccaaagacucaaagccgaagcacaaaugucaauacaauuaauaaacaaagcagucaacgcacuaauaaaugaucaacucauaaugaaaaaccacuuaagagacauuaugggaauaccauacugcaauuauucaaaauauugguaucucaaucacacaaccacuggaaaaacaucacuaccuaaauguuggcuagucucaaacggaucuuacuuaaacgaaacacacuucucagaugacauagaacaacaagccgauaauaugaucacugaaauguuacaaaaagaauauauggaaagacaaggaaaaacaccauuaggauuagucgaccuauuuguauucucuacaagcuucuaucuaauaucaauauuuuuacaccucguaaaaauaccaacacauagacauaucguaggaaaaucaugccccaaaccacauagacuaaaucacaugggaauauguucaugcgguuucuacaaacaaccaggcguaccaguuaaauggaaacgauaa

SEQ ID NO: 2002 - RNA, 1476 nt, Artificial Sequence
  derived and/or modified protein sequence (opt6) from LASV(G733-SLE-2010;Clade IV)__AIT17154__GPC
augggacaaaucguaaccuucuuccaagaagucccacacguaauagaagaaguaaugaauaucguacuaauagcauuaucaauacuugcaguacucaaaggacuauauaacuucgcuacaugcggaauaguaggacuaguaucauucuuauuauuaugcggacgaucaugcaccacaucauuauacaaaggagucuaugaauuacaaacacuagaauuaaacauggaaacccuaaacaugacaaugccacucucaugcacaaaaaauaacucacaucacuacauaaugguuggaaacgagacaggacuagagcuaacacuaacaaacacaucaauaauaaaccacaaauucuguaauuuaagcgacgcacacaaaaaaaaucuauacgaccacgcauuaauguccauaaucucaaccuuccacuuaucaauaccaaauuuuaaucaauacgaagcaaugucaugcgauuucaacggaggaaaaauaucaguucaauauaaccuuagucacuccuacgcaggagaugccgccaaccacugcggcacaauagcaaacgguguccuacaaacuuucaugagaauggcauggggaggaagcuacauagcauuagauagcgggagagaucgaugggacuguauaaugacuaguuaucaauauuuaauaauacaaaacaccacaugggaagaccacugccaauucucaagaccaagcccaaucgguuaccucggacucuuaucacaaagaacccgagacauauacauaucaagaagacuacuaggcacauucacauggacccuaucugacagcgaaggaaaagauacuccaggagguuacugccuuacuagauggaugcuaauagaagcagaauuaaaauguuucggaaacaccgcaguagcaaaauguaacgaaaaacaugacgaagaauucugcgacaugcuccgacuauuugauuucaacaaacaagcaauacaaagacuaaaagcagaagcacaaaugucaauacaauuaauaaauaaagcaguaaacgcccuaauaaacgaccagcuaauaaugaaaaaccacuuacgagauaucaugggaaucccauacuguaacuacucaaaauacugguacuuaaaccauacaacaacuggaaaaacaucacuaccaaaaugcugguuaguaaguaacggaucuuaccucaacgaaacacauuuuucagaugacauagaacaacaagccgauaauaugauaacagaaaugcuacaaaaagaauacauggaaagacaagguaaaacuccacuaggacuagucgaccuauucguauucaguacaucauuuuacuuaauaucaaucuuccuacaccuaguaaaaauaccuacccacagacacguaguaggaaaaucaugcccaaaaccacaucgacuaaaucacaugggaauaugcucauguggacuauacggccaaccaggaguaccaguaaaauggaaaagauaa

SEQ ID NO: 2003 - RNA, 1476 nt, Artificial Sequence
  derived and/or modified protein sequence (opt6) from LASV(G771-SLE-2010;Clade IV)__AIT17158__GPC
augggacaaauaguaacauucuuccaagaaguaccacacguaauagaagaaguaaugaacauaguccuaaucgcuuuaucaauacuagcaguccuaaaaggauuauauaacuucgcaaccugcggacuuguaggucuaguaacauuucuacuauuaugcggacgaucaugcacaacaucauuauacaaaggaguauacgaacuacaaacccuagaacuaaacauggaaacauuaaacaugacuaugccacuaucauguaccaaaaacaauucacaccauuacauuaugguagguaacgaaacaggauuagaacuuacacuaacaaauacaucaaucauaaaucacaaauucugcaaccuaucagacgcucacaagaaaaaucuauaugaccacgcacuaaugucaauaaucucaacuuuucaccuaucaauaccaaacuucaaccaauacgaagcaaugucuugcgacuuuaacggaggcaaaauaucaguacaauacaaccuaucacacucauaugcaggagacgcagccaaucacuguggaacaguagcaaaugguguauuacaaacauuuaugagaauggcauggggaggaucuuauauagcacuagauucaggaagagauagaugggacugcauaaugaccucauaccaauacuuaauaauacaaaauacaacaugggaagaccacugccaauucucaagaccauccccaauuggauacuuaggacuacuuucucaaagaacccgagacauauacauaucaagaaggcuacuagguaccuucacauggaccuuaucagauagcgaaggcaaagacacaccaggaggauauugccuaacuagauggauguuaauagaagcagaacuaaaaugcuucggaaacacugcaguagcaaaaugcaacgaaaaacaugacgaagaauuuugugacauguuaagacuauucgacuuuaacaaacaagcaauacaaagacuaaaagcagaagcacaaaugucuauucaacuaauaaacaaagcuguaaacgcacuaauaaacgaccaacuaauuaugaaaaaccacuuacgagacauaaugggaaucccauacugcaauuacucuaaauacugguauuuaaaccauacaacaacaggaaaaacaucacuacccaaauguugguuaguaucaaaugguucauaccucaacgaaacacacuucucagacgacauugaacaacaagccgacaacaugauaacagaaauguuacaaaaagaauacauggaaagacaaggaaaaacaccauuaggauuaguagaccuauuuguauucucaacaucauucuaccuaauaucaauauuucuucaccuaguuaaaauaccaacucacagacauauaguagggaaaucaugcccaaagccucacagacuuaaucauaugggaauaugcucaugcgguuuauacaaacaaccaggaguaccaguaaaauggaaacgauaa

SEQ ID NO: 2004 - RNA, 1476 nt, Artificial Sequence
  derived and/or modified protein sequence (opt6) from LASV(G808-SLE-2010;Clade IV)__AIT17164__GPC
augggacaaauagucacauucuuccaagaaguaccacacguaauagaagaaguaaugaacauaguacucauagcccuaucaauacuagcuguauuaaaaggauuauacaauuucgcaacaugcggacuuguuggccuaguaacauucuuacuacuaugcggacgcucaugcacaucauccuuauauaaaggagucuacgaacuacaaacuuuagaacucaacauggaaacuuuaaauaugacaaugccacucucuugcacuaaaaacaacucacaccacuacauuagagucggaaaugaaacaggauuagaauuaacauuaacaaacacaucaauaauagaccacaaauucugcaacuuaucagacgcacacaagaaaaaucuuuacgaccaugcacucauguccaucaucucaaccuuccaccuaucaauaccuaacuucaaccaauacgaagccaugucaugcgacuucaauggagguaaaauaucuguacaauacaacuuaucacacaguuacgcaggagacgccgcuaaacacugcggcacaguagcaaauggcguauuacaaacauucaugagaauggcuuggggcggaucauacauagcacuagacucaggacacggaaacugggacuguauaaugacaucauaccaauaccucauaauccaaaauacaacaugggaagaucacugccaauuuucucgaccaagcccuaucggauaccuaggauuacuaucacaacgcacaagagacaucuauauaucaagaagacuacuaggaacauucacauggacacuauccgacagcgaaggcaacgacgcaccaggaggauauugccuaacaagauggaugcuaauccaagcagaacuaaaaugcuucgguaauacagcaguggcaaaaugcaacgaaaaacacgaugaagaauuuugugauauguuaagauuauucgacuucaacaaacaagcaauccaaagacuaaaagcagaagcacaaaugucaauucaauuaauaaacaaagccguaaacgcauuaauaaacgaucaacuaauaaugaaaaaucaccuaagagacauaaugggaauaccauauugcaauuauuccaaauacugguaccuaaaucacaccacaaccggacgcacaucacuaccaagaugcuggcuaguaucaaacggaucuuaucuaaacgaaacacacuucucugacgacauagaacaacaagccgacaacaugauuacagaaauguuacaaaaagaauacauggaaagacaaggaaaaacaccacuaggacucguagacuuauucguuuucuccaccucauuuuaucuaauuucaauauucuuacaccuaguaaaaauaccaacccacagacacauaguaggaaaaucauguccaaaaccacaucgcuuaaaccacaugggaaucugcucaugcggauuauucaaacaaccuggaguaccaguuaaauggaaaagauaa

SEQ ID NO: 2005 - RNA, 1476 nt, Artificial Sequence
  derived and/or modified protein sequence (opt6) from LASV(Guinea Faranah;Clade IV)__AMZ00381__GPC
augggacaaauagucacauucuuccaagaaguaccacacguaauagaagaaguuaugaacaucguacugauagcacucuccauacuagcaguccuaaaaggauuauauaauguagcuacauguggauuaauaggacuaauugcauucuuacuccuaugugguagauccugcacaucaacacuauacaaaggaguauaugaauuacaagcacuagaacuaaauauggaaaccuuaaacaugacaaugccacuaucauguacaaaaaacaacagccaucauuacauaauggucggaaaugaaacaggauuagaacuaacccuaacaaacacuucaauaauaaaccauaaauucugcaauuuaucagacgcacauaaaaaaaaccucuacaaccaugccuuaaugucaaucauaagcacauuccacuuaucaauaccaaacuucaaccaauacgaagcaaugucaugcgauuucaacggaggaaaaauaucaguacaauacaacuuaucacacaguuacgcaguagacgcagcaaaccauugcggaacaguagcaaacggaaucuuacaaacauucaugagaauggcuuggggcggaagcuauaucgccuuagacucaggacacggaggaugggacugcaucauguccucauaucaauaccuaguaauccaaaacaccacaugggaagaucacugccaauucucaagaccaucaccaauaggauaccuuggacuacuaucacaaagaacaagagacauauacaucuccagaagacuauuaggaaccuuuaccuggacccuauccgacucugaaggaaaagacacaccaggaggauacugucuaaccagauggaugcuaauagaagcagaacuaaaaugcuucgguaacacagcuguagcaaaaugcaacgaaaaacacgacgaagaauucugugauauguuaagacuauucgacuucaauaaacaagcaauccaacgacuaaaagcagaagcacaaauguccauacaauuaauaaauaaagcagucaaugcauuaauaaaugaucaacuaaucaugaaaaaccaucuuagagacauaaugggaaucccauacugcaauuacucuaaauauugguaccuaaaucauacaauaacaggccgaacaucacugccaaaaugcuggcuagucuccaacggauccuaccuuaaugaaacucacuucucagacgauauugaacaacaagcugauaacaugauaacagaaaugcuacaaaaagaauacuuagaaagacaaggcaaaacaccauuaggauuaguagaucuauucguauucucuacaucauucuaucucauaucaauuuucuuacacuuaauaaaaauaccuacccauagacacauaguaggaaaaucaugcccaaaaccccaccgacuaaaccacaugggagucugcucuugcggacuauacaaacaacccggaguacccgugagauggaaaagauaa

SEQ ID NO: 2006 - RNA, 1476 nt, Artificial Sequence
  derived and/or modified protein sequence (opt6) from LASV(GUINEA Z-185a;Clade IV)__AMZ00377__GPC
augggccaaauaguaacauuuuuccaagaagucccacacgucaucgaagaaguaaugaacauaguacuaauagcauuaucaauacuugcuguacuaaaaggccuauacaauguagcgacaugcggucuaauaggcuuaguaacauuccuauuccuaugcggaagaucaugcucaacaucccuauacaaaggcguuuacgaauuacaaaccuuagaacuaaacauggaaacauuaaacaugacaaugccacuuucuugcacuaaaaacaacagccaccacuacaucaugguaggaaaugaaacaggacuagaacucacacuaacaaacacauccauaauaaaccacaaauuuuguaaccuuucagacgcccacaaaaaaaaccuauaugaccauacauuaaugucaauaauaagcacuuuccaccuaucaauacccaacuucaaccaauacgaagcaauguccugcgacuuuaacggaggaaaaauaucaguacaauacaacuuaucacauuccuacgcuguagacgcagccaaccauugcggaacaguagcaaacgguguacuacaaaccuucaugcgaauggcauggggaggauccuacauugcacucgacucaggaagaggaaacugggacuguaucaugaccuccuaucaauaccucguaauccaaaauacaacaugggaagaccacugucaauuuucaagacccucaccaauaggauaccucggacuacuuucacaaagaacuagagauauauauaucucaagacgauuacuaggaaccuuuaccuggaccuuauccgacucagaaggaaaagacacaccagguggauacugcuuaaccagauggaugcuaauagaagcagaauuaaaaugcuuuggaaauacagccguagcaaaaugcaacgaaaaacacgacgaagaauuuugcgauaugcucagacucuucgacuucaacaaacaagcgauacaaagacucaaagcagaagcacaaaugucaauacaacuaauuaacaaagcaguaaacgcucuaauaaacgaccaacuaauuaugaaaaaccacuuaagagacaucaugggaauaccauauugcaauuacaguaaauauugguacuuaaaucacaccguaaccggaaaaacuucauuaccaaaaugcugguuaguauccaacggaucauacuuaaacgaaacacacuucucugaugauauugaacaacaagcugacaaccuaaucaccgaaaugcuacaaaaagaauacauggaaagacaaggaaaaacaccacuaggauugguugaccuauucguauucucaacaucauucuacuuaauaucaaucuuuuuacaccuaguaaaaauacccacacaucgccauauaguuggaaaacccugcccaaaaccacacagacuuaaccacaugggaauaugcucauguggcguauacaaacaacccggaguaccaguaagauggaaaagauaa

SEQ ID NO: 2007 - RNA, 1476 nt, Artificial Sequence
  derived and/or modified protein sequence (opt6) from MOPV/LASV reassortant(IGS-1;Clade IV)__AFY05576__GPC
augggacaaauaguaacauucuuccaagaagucccacacguaauagaagaaguaaugaauauaguacucauagcauuaucaguccuugcaguacuaaaaggccuauauaauuucgcuacauguggccuaguuggccuaguaacauuccuauuauuauguggacgauccugcacuacaucauuauacaaaggaguauacgaauuacaaacacucgaauuaaacauggaaacacucaacaugacaaugccacuauccugcacuaaaaacaacagccaccauuauaucaugguaggaaaugaaacaggacuagaauuaacacucacaaauacaucaauaauaaaccauaaauucuguaaucuaucugacgcacacaagaaaaacuuauacgaccacgcauuaaugucuauaauuucaacauuccaucuaucuauaccaaacuucaaucaauacgaagcaaugagcugugacuucaacggaggaaaaauaucaguacaauacaaccucucacacucauacgccggagaugcagcaaaccauuguggcacaguagcuaacggaguacuacaaacauuuaugcgcauggcuuggggaggaucauauauagcccucgauucaggucgaggcaacugggacugcauaaugacaucauaccaauaccuaauaauacaaaauacaacaugggaagaucauugccaauucucaagaccauccccuauaggcuacuuaggacuacucucucaacgaacaagggacauauacaucagcagaagauuauuaggaaccuuuacuuggacuuuaagcgacucagaaggcgaagauacacccggaggauacugucuaacaagauggaugcuaauagaagcagaauuaaaaugcuuugguaacacagcaguagccaaaugcaacgaaaaacacgaugaagaauuuugcgacauguuaagacuauucgauuucaacaaacaagcaauccaaagacucaaagcagaagcacaaauguccauacaacuaaucaauaaagcaguaaacgcacuaauuaacgaccaacuaauaaugaaaaaccacuuaagagacauaaugggaauaccuuauugcaacuacucuaaauacugguaccuaaaccacacaacaacaggccguacaucauuaccaaaaugcuggcuaguaucgaacggaucauacuuaaaugaaacacauuucucagaugauaucgaacaacaagcagacaauaugauaacagaaaugcuacaaaaagaauacauggaaagacaaggaaaaacaccacuaggucuaguagaccuauucguauucucaacuagcuucuaucucaucucaauauuccuacaccuaguaaaaauaccaacacauagacauauaguaggaaaaucaugcccaaaaccccacagacuaaaccacaugggaauaugcucauguggacucuacaaacaaccaggaguaccaguaaaauggaaacgcuaa

SEQ ID NO: 2008 - RNA, 1476 nt, Artificial Sequence
  derived and/or modified protein sequence (opt6) from MOPV/LASV reassortant(IGS-11;Clade IV)__AFY05588__GPC
augggacaaauagucacauucuuucaagaaguuccccacguaauagaagaaguaaugaauauaguauuaaucgcucuuucaguacuagcaguacuaaaaggacuauauaacuucgcaacaugcggauuaguaggccuagucacauuccuacuauuaugcggaagaagcugcacaacaucauuauacaaaggaguauacgaauuacaaacucuagaacuuaacauggaaacacuaaauaugacaaugccucuaucauguaccaaaaacaacucacaccacuacauaaugguaggaaacgaaacaggacuagaacuaacacucacaaauacaucaauaauaaaccacaaauucuguaauuuaagcgacgcacacaagaaaaaucuauacgaccaugcacuaaugucuaucauuuccacauuccaucuauccauaccaaauuucaaccaauacgaagcaaugucaugcgacuuuaacggagguaaaauaagcguccaauauaaccuaagccauucauacgccggagaugcagcaaaccacugcggcacagucgcaaacgguguccuucaaacauucaugagaauggcauggggaggaucauacauagcauuagacagcgguagaggaaacugggacugcauaaugacaucuuaccaauaucuaauaauccaaaacacaacgugggaagaccacugucaauucucacgacccagcccaauaggcuaccuaggcuuauuaucucaaagaacaagagaccucuacauaagcagacgccucuuagguacauucacauggacauuaucagauucagaaggagaagacacaccaggcggauauugccuuacaagauggaugcuaauagaagcagaacuaaaaugcuucggaaauaccgcagucgcaaaaugcaaugaaaaacaugacgaagaauuuugugacauguuaagacuauucgacuucaacaaacaagcaauacaaagacuaaaagcagaagcacaaaugucaauacaauuaauaaacaaagcaguuaacgcacuaauaaacgaccaacucauaaugaaaaaccaucuaagagacauaaugggcauucccuauuguaauuacagcaaauauugguaccuaaaccauacaacuacaggaagaacaucauuacccaaauguuggcuaguuucaaauggauccuaccuaaacgaaacacauuucucagaugacauagaacaacaagccgacaacaugauaaccgaaauguuacaaaaagaauacauggaaagacaaggaaaaacaccauuaggccuaguagaccuuuuuguauuuucaacuagcuuuuacuuaauaaguauuuuucuacaucuaguaaaaauaccaacacacagacauauagucggaaaaagcugcccaaaaccccauagacuaaaucacaugggaauaugcucaugcggacucuacaaacaaccaggaguaccaguaaaauggaaaagauaa

SEQ ID NO: 2009 - RNA, 1476 nt, Artificial Sequence
  derived and/or modified protein sequence (opt6) from MOPV/LASV reassortant(IGS-12;Clade IV)__AFY05590__GPC
augggacagauaguaaccuuuuuccaagaaguuccucacguaauagaagaaguuaugaacaucguacuaauagcacuaaguguacucgcaguauuaaaaggcuuauacaacuucgcaacaugcggacuuguaggccuaguaaccuuucuacuacuauguggccgauccugcacaaccucacucuacaaaggaguauacgaauuacaaacacuagaacuaaacauggaaacacuaaacaugaccaugccauuaucauguacuaaaaacaacucccaccacuacauaaugguaggaaacgaaaccggcuuagaauuaacccuaacaaauacaucaauaauaaaccacaaauuuuguaauuuauccgacgcacauaaaaaaaacuuauacgaccacgcacuuaugucaauaauauccaccuuucaucuaucaauaccuaauuuuaaccaauaugaagcaaugucaugcgacuucaacggaggaaaaauaagcguccaauacaaccucucacauucauaugcaggggacgcagcaaaucacugcgggaccguagcaaacggcguauugcaaaccuucaugcgaauggcaugggguggaaguuauauagcacucgauagcggacgaggaaacugggacuguauaaugacaucauaccaauaucucauaauacaaaacacaacaugggaagaccacugucaauucucaagaccaagcccaauuggauacuuaggccucuuaucacaaagaaccagagacauguacauaucaagaagacuccuagguacauuuacauggacacuaucugauuccgaaggagaagacacaccaggcggauacugcuuaaccagauggauguuaauagaagcagaauuaaaaugcuuuggaaacacagccguagcaaaauguaacgaaaaacacgaugaagaauucugugauauguuacgacuauuugacuucaacaaacaagccauacaaagauuaaaagcagaagcacaaaugucaauacaauuaauaaacaaagcaguaaaugcguuaauaaaugaccaauuaauaaugaaaaaccaccuuagagacaucaugggcauaccauauugcaacuauagcaaauauugguaccuaaaccacacaacaacaggaagaacaagccuacccaaaugcuggcuuguaagcaauggaucauaucuuaacgaaacacacuucucagacgacauagaacaacaagcagauaacaugaucacagaaaugcuccaaaaagaauacauggaaagacaagguaaaacuccauuaggccucguugacuuauuuguauucagcacaagcuucuaccucauaucaauauuucuacaccuaguaaaaauaccaacacaccgacacaucguaggaaaaucaugcccaaaaccacacagacuaaaccacaugggaauaugcucaugcggacuauacaaacaaccagguguacccguaaaauggaaaagauaa

SEQ ID NO: 2010 - RNA, 1476 nt, Artificial Sequence
  derived and/or modified protein sequence (opt6) from LASV(LM032-SLE-2010;Clade IV)__AIT17802__GPC
augggacaaaucgucacauuuuuccaagaagucccccauguaaucgaagaaguaaugaauauaguacuaaucgcccucucaauccuagcaguacuaaaaggacuauauaaccuagccacaugcggccucguaggauuaguaacauuccuacuauuaugcggaagaucauguacuacuucuuuauauaaaggcguauacgaacuacaaacauuagaacuuaacauggaaacacuaaacaugacaaugccccuaucuuguaccaaaaauaacucccaccacuacauaauggucggaaaugaaaccggacuagaacuaacacuaacaaacacaucuauaauuaaccauaaauucuguaacuuaucugacgcacacaaaaaaaaccuauacaaccaugcucuaaugucaauaauaagcaccuuccaccucucuauaccuaacuuuaaucaauacgaagcuaugucaugcgacuuuaacggaggaaaaauauccguacaauacaaccuaucccacucauacgcaggagaugcagcaaaucacugcgguacaguagcaaacggaguauuacaaacauucaugagaauggcauggggagguucauacauagcacuagauucaggucgagacagaugggacugcauaaugaccucauaccaauaucuaauuauccaaaacacaacaugggaagaccacugccaauuuucacgaccauccccaauaggauaucuaggacuacucucacaaagaacaagagacauauacauaucaagacgucuacuaggaacauucacauggacccuaucagauucugaaggaaaagacacucccggaggauacugccuaacacgauggaugcuaauagaagcagaacuuaaaugcuucggaaacacagccguugcaaaaugcaacgaaaaacacgacgaagaauucugcgauaugcuaagguuauucgauuucaacaaacaagcaauacaaagacucaaagcugaagcacaaaugucaauacaacucauaaauaaagcaguaaaugcacuaaucaacgaccaacuaauaaugaaaaaucacuuaagagacaucaugggaauaccauacuguaacuacucuaaauauugguaucuaaaccacacaacaaccggaaaaaccucccucccaaaaugcugguuaguauccaacggaucauacuuaaacgaaacacacuucucagacgacauagaacaacaagcugauaacaugauaacagaaaugcuacaaaaagaauauauggaaagauuaggaaaaacaccuuuaggauuaguagauuuauucguuuuuuccaccucauucuaucuaauaucuauauuucuacacuuagucaaaauaccaacacacagacacauaguaggaagauccugccccaaaccacauagacucaaccacaugggaauaugcuccuguggccuauauaaacaaccaggaguaccaguuaaauggaaacgauaa

SEQ ID NO: 2011 - RNA, 1476 nt, Artificial Sequence
  derived and/or modified protein sequence (opt6) from LASV(LM222-SLE-2010;Clade IV)__AIT17806__GPC
augggacaaauaguaacauucuuccaagagguaccacacgucaucgaagaagucaugaauauaguauuaauugcauuaucaaucuuagccguacuaaaaggucuauacaacuucgcuacaugcggcuuaauaggcuuaguaacauuccuauuacuaugcggaagaucauguacaacaucauuauacaaaggaguauaugaacuacaaacacuagaacucaacauggaaacacuuaacaugacaaugccacuaagcugcacaaaaaacaauagucaccacuauaucauggucggaaacgaaaccggacuagaauuaacauuaacaaauacauccauaauaaaucacaaauuuugcaaucuaucagacgcucacaaaaaaaaccuauacgaccacgcccuaaugagcauaauauccacauuucacuuaucaauaccaaacuucaaccaauacgaagccaugucaugcgacuucaacggaggaaaaauaucaguacaauacaauuuaucucacuccuacgcaggagaugccgccaaccauugcggcacaguagcaaacggagucuuacaaacauuuaugcgaauggcaugggguggaucauacauagcacuagacagcggaagaggaaaaugggauugcauaaugacaucuuaccaauauuuaauaauacaaaacacaacaugggaagaccacugccaauucucucgaccaucaccaauaggcuaucuaggauuacuaucacaaagaacaagagacauauacauaucaagaagacuauuaggcacauuuaccuggaccuuaucugacucugaaggaaaagauaccccaggaggauacugccuaacaagauggauguuaauagaagcagaacuaaaaugcuucgguaacacagcaguagcaaaaugcaacgaaaaacacgacgaagaauucugcgacaugcuacgccuauuugacuucaauaaacaagcaauacaaagacuaaaagcagaagcacaaaugucaauacaauuaauaaacaaagcaguaaacgcacuaauuaaugaccaauuaauaaugaaaaaucaccuaagagacauuaugggcauaccauacugcaacuacuccaaauacugguaccuaaaccacacaaccacaggcaaaacaagccuaccaaaauguuggcuaguauccaacggaucuuacuuaaacgaaacacacuucuccgacgacauagaacaacaagcagauaauaugauaaccgagaugcuucaaaaagaauacauggaaagacaaggaaaaacaccacuaggccuaguagauuuauucgucuuuucaacaucauuuuaccuaauaucaauauucuuacaucuugucaaaauaccuacacaccgccacauuguaggaaaaucaugcccaaaaccacaccgacucaaccauaugggaaucugcucgugcggauuauauaaacaacccgguguaccaguaaaauggaaaagauaa

SEQ ID NO: 2012 - RNA, 1476 nt, Artificial Sequence
  derived and/or modified protein sequence (opt6) from LASV(LM395-SLE-2009;Clade IV)__AIT17810__GPC
augggacaaauaguaacauucuuccaagaaguaccacacgucaucgaagaaguaaugaacauuguccuaauugcacuaucaauauuagccguccuaaaaggacuauacaaccuagcaacuugcggcuuaguuggauuagucacauuccuauuacucuguggaagaucaugcacaaccucauuauacaaaggaguauacgaacuacaaacacuagaauuaaauauggaaacacuaaauaugacaaugccccuauccugcacaaaagauaauucacaccauuacauaagaguaggaaacgaaacaggacucgaacuaacacuaacaaauacaucuauacuaaaccacaaauuuuguaaccuaucagaugcacacaaaaaaaaccuauacgaccacgcacuaaugucuauaauaagcaccuuccacuuaucaauaccaaacuucaaccaauaugaagcuaugagcugugacuucaacggaggaagaauaucaguucaauauaacuuaucucacucauaugcaggagacgcagcuaaccauuguggcacaguagcaaacggcguacuccaaacauucaugagaauggcuuggggcgguucauacaucgcauuagauucaggaagaggacgaugggacugcauaaugacauccuaccaauaucuaauaauacaaaauacaacaugggaagaccacugccaauuuuccagaccaucaccaauaggauacuuaggacuccuaucacaaagaacccgagauauauacaucucaagacgacuccuuggaacauuuaccuggacauuaucagacucagaaggaaaagacacaccaggugguuacugcuuaacacgcuggauguuaauagaagccgaauuaaaaugcuucggaaacacagcaguagccaaaugcaaugaaaaacaugacgaagaauucugugacaugcuaagacuauucgacuucaacaaacaagcaauccaaagacuaaaagcagaagcccaaaugucaauccaauuaauaaauaaagcaguaaaugccuuaauuaaugaccaacucauaaugaaaaaccacuuaagagacauaaugggaauaccauauugcaacuacucaaaauacugguaccucaaccacaccacaacaggaaaaacaucauuaccacgcugcuggcuaguaucaaacggcucauaccuaaaugaaacucacuuuucagacgacauagaacaacaagcagacaauaugaucacugaaaugcuacaaaaagaauacauggaaagacaaggaaaaacaccccuaggccucgucgacuuauucgucuucuccacuucauucuacuuaauaucuauauuccuacaccuaguaaaaauaccaacccauagacacguaguuggaaaaccauguccaaaaccacacagguuaaaucacaugggaauauguucaugcggauuauacaaacaaccagguguaccagucaaauggaaaagauaa

SEQ ID NO: 2013 - RNA, 1476 nt, Artificial Sequence
  derived and/or modified protein sequence (opt6) from LASV(LM765-SLE-2012;Clade IV)__AIT17814__GPC
auggggcaaauugucacauucuuucaagaaguaccacacguuauagaagagguaaugaacauaguacuaauagcacuaucaauacuagccguauuaaaaggacuauacaacuucgccacaugcggacuaguaggccuaguaacauuccuacuacuguguggacgaagcugcacuaccucccuauacaaaggaguauaugaacuccaaacauuagaacuaaauauggaaacacuuaacaugacuaugccccuauccugcacaaaaaacaacucacaucauuacauuaugguuggaaaugaaacaggauuagaacuaaccuuaaccaacacuucaauaauagaccacaaauucugcaacuuaucagacgcacaucgaaaaaauuuauaugaccaugcacuaaugucaauuauaucaacauuucaccuaagcauaccaaacuucaaccaauaugaagcaaugucaugcgacuucaacggaggaaaaauaucaguacaauacaauuuaucacauagcuaugcaaaagacgcagcagaucauugcggaacaguagcaaacggaguacuacaaacauucaugcgaauggccuggggaggaucauacauagcacuagacuccggaagaggaagaugggauuguauaaugacuucauaccaauauuuaauaauacaaaauacuacuugggaagaucacugccaauucucuagaccaucacccauuggauacuuaggacuacuaucacaaagaacaagggacauauacauaucaagacgacuacucgguacauucacauggacauuaucagauagugaaggaaaagauacuccaggcggauauugcuuaaccagauggaugcuaauugaagcagaacuaaaauguuuuggaaacacagcuguagcaaaaugcaacgaaaaacaugaugaagaauucugugauaugcuaagauuauucgauuuuaauaaacaagcaauucaaagacuaaaagcagaagcacaaaugucaauucaacuaauaaacaaagcaguaaaugcauuaauaaacgaucaacuaauaaugaaaaaucaccuaagagacauaaugggaauaccauacugcaacuacucuaaauacugguaccuaaaucacacaacaacaggcaaaacaucacuaccaaaaugcugguuaguaucaaacggaucauaccuaaacgaaacacacuucagcgaugacauagaacaacaagcagauaauaugauaacugaaauguuacaaaaagaauacauggaaagacaaggaaaaacaccauuaggcuuagucgacuuauucguauucucaacaucauuuuacuuaaucuccauauuccuacaccuaguaaaaauacccacacauagacacauagucggaaaaccaugcccaaaaccacacagacuaaaccacaugggaauauguucauguggacuauauaaacaaccaggaguaccaguaaaauggaaacgauaa

SEQ ID NO: 2014 - RNA, 1476 nt, Artificial Sequence
  derived and/or modified protein sequence (opt6) from LASV(LM774-SLE-2012;Clade IV)__AIT17820__GPC
augggacaaauuguaacauucuuccaagaaguaccacacgucauagaagaaguaaugaauauaguacuaauagcacuaucaauucuagcaguacuaaaaggacucuauaauuuugcuacaugcggccuaguaggccuaguaacauuccuccuacucugcggaagaucaugcaccacauccuuauacaaaggagucuacgaauuacaaacacucgaauuaaacauggaaacauuaaacaugacuaugccauuaucaugcacuaaaaacaacucccaccacuacauuauggucggaaacgaaacaggacucgaacuaacacucacaaacaccucuauaauaaaucacaaauuuugcaaucuaucagacgcccauaagaaaaaucuauaugaccaugcauuaaugucaauaauauccacauuucaccuaucaauaccaaauuuuaaucaauacgaagcaaugucaugcgauuucaauggaggaaaaaucucuguacaauacaauuuaucacacuccuacgcagaagaugccgcaaaccacugcggaacaguagcaaauggcguacuucaaacauucaugcgaauggcauggggaggauccuacauagcacuagauuccgguagaggaaauugggacuguauaaugacaucauaccaauaccuaauaauucaaaauaccaccugggaagaccacugccaauuuucacgaccaucaccaauaggcuaccuaggucuauuaucccaaagaacacgagacauuuauauaucaagaagacuacuaggcacauucaccuggacacuaucugacucagaagguaaagacaccccaggaggcuacugccuuacaagauggaugcucauagaagcagaacuaaaaugcuucggaaauacagccgucgccaaauguaacgaaaaacaugaugaagaauuuugcgauaugcuaagauuauucgauuucaacaaacaagcaauacaaagauuaaaagccgaagcacaaaugucaauacaacuaaucaacaaagcaguaaacgcacuaauaaaugaccaacuaauaaugaaaaaucaccuacgagauauaaugggaaucccauacugcaacuacaguaaauacugguaucuaaaccacacaacaacaggaaaaaccucacuaccaaaaugcuggcucguauccaacggaucauauuuaaacgaaacacacuuuucagacgauauagaacaacaagcagauaauaugauaacagaaaugcuacaaaaagaauacauggaaagacaaggaaaaacaccccuaggacucguagaccuauucgucuuuucaacaaguuucuauuuaauaucaaucuuucuucaucucguaaaaauacccacccaccgacauauaguaggaaaguccugcccaaaaccacacagauuaaaccauauggguauaugcucaugcggacuauauaaacaacccggaguaccaguaaaauggaaaagauaa

SEQ ID NO: 2015 - RNA, 1476 nt, Artificial Sequence
  derived and/or modified protein sequence (opt6) from LASV(LM776-SLE-2012;Clade IV)__AIT17824__GPC
augggacaaaucguaacauuuuuccaagaagucccccacguaauagaagaaguaaugaacauuguacuuaucgcauuaucaauacucgcaguccuaaaaggacuauacaacuuugcaacaugcggacuaguaggcuuagucacauuccuauuacuaugcggaagaucaugcacaacaagcguauacaaaggaguauaugaacuccaaacacuagaacucaauauggaaacucuaaacaugacaaugccauuaucaugcacaaaaaacaacucacaccauuacauaaugguaggaaacgaaacaggacuagaauuaacacuaacaaacacuucaauaaucaaccacaaauucugcaaccuuucagacgcacauaaaaaaaaccuauacgaccacgcacuaaugucuauaauaucaaccuuccaucuaucaauaccgaacuuuaaccaauacgaggcaaugucaugugauuucaauggcggaaaaauaucaguacaauacaaccuaucacacucauacgccggugaugcagccaaccacugcggaacaguugccaaugguguacuacaaacauucaugagaauggcauggggcggaucauacauagcccuagacucagggcacggaaaaugggacuguauaaugacaucuuaccaauaccucauaauacaaaauacaacaugggaagaccacugccaauuuucacgaccaucaccaauaggauaucuaggacuauuaucacaaagaacuagagacauauauauaucaagaagauuauuaggaacauuuacuuggacacuaucagacucagaaggaaaagacacaccagguggauauugcuuaaccagauggauguuaauagaagcagaacuaaaaugcuuuggaaacacagcaguugcgaaauguaaugaaaaacacgacgaagaauucugcgauaugcuaagauuauucgacuuuaacaaacaagcaauacaaagacuaaaagcugaagcacaaaugagcauacaacugauaaacaaagcaguaaacgcccucauuaacgaccaauuaauaaugaaaaaccacuuaagagacauaaugggaauaccauacugcaacuacucaaaauacugguauuuaaaccacacaacaaccggaaaaacaucccuaccaaaaugcuggcuaguauccaauggaucauaccuaaaugaaacacacuuuucagacgacauugaacaacaagcagacaauaugauaacagaaauguuacaaaaagaauacauggaacgacaaggcaaaacuccccuaggacucguagaccuuuucgucuucucaaccaguuucuaucuaauaucaauauuccuccaccuagucaaaauacccacacauagacacauaguugguaaaucaugccccaaaccccauagacucaaccacaugggaauaugcucuugcggacuauacaaacaaccaggagucccaguacgauggaaaagauaa

SEQ ID NO: 2016 - RNA, 1476 nt, Artificial Sequence
  derived and/or modified protein sequence (opt6) from LASV(LM778-SLE-2012;Clade IV)__AIT17828__GPC
augggacaaauaguaacauuuuuccaagaaguaccacacguaauagaagaaguaaugaauauuguacuaauagcauuaucaauauuagccguccucaaaggacucuacaacuucgccacuuguggacuaguaggauuaguaacauucuuacuauuaugcgguagaucuuguacaacuucccuauauaaaggcgauuaugaacuucaaacacuagaauuaaacauggaaacuuuaaacaugacaaugccacucucaugcacaaaaaacaacucccaccacuacaucaugguaggaaaugaaaccggacuugaacuaacauuaacaaacacaucaauaaucaaucauaaauucugcaaccuaucagacgcacacaaaaaaaacuuauacgaccaugcacuaaugucaauaauuucaacauuccacuuaucaauacccaacuucaaccaauaugaagcaaugucaugcgacuucaauggaggaaaaauuucaguacaauauaaccuaucacacucauacgcaggagacgcagcaaaccacuguggaacagucgccaauggaguauuacaaacauucaugcgaauggccugggguggaucauacaucgcccuagacucaggacgaggcaacugggacugcauaaugacaucauaccaauacuuaaucauccaaaauacaacaugggaagaccauugccaauucucaagaccaucaccaauaggauaccuaggauuacuaucccaaagaaccagagacauauacauaucacgaagacuacuaggcacauucacauggacacuaucagacuccgaaggaaaagacacaccaggaggcuacugccucacacgauggauguuaauagaagcagaacuaaaauguuuuggcaauacagcagucgcaaaaugcaaugaaaaacacgacgaagaauucugugacauguuaagacuauucgauuuuaacaaacaagcaauacaaagacuaaaagcugaagcccaaaugucuauucaacuaauuaauaaagcuguaaaugcucuaauaaacgaucaauuaauaaugaaaaaucauuuaagagacaucaugggaauaccauauugcaauuacucuaaauauugguauuuaaaccacacaacaacaggaaaaacaucgcuaccaaaaugcugguuaguaucaaacggcucauaucuaaacgaaacacauuucucugacgauauagaacaacaagccgacaacaugauuacagaaaugcuacaaaaagaauacauggaacgacaaggaaaaacacccuuaggcuuagucgaccuauucguauucucaacaucauucuaucuaaucucuauauuccuucaccuggucaaaauaccuacacacagacauauaguagguaaaucauguccaaaaccucauagacuaaaccauauggguaucugcucaugcgguuuauauaaacaaccaggcgucccaguaaaauggaaaagauaa

SEQ ID NO: 2017 - RNA, 1476 nt, Artificial Sequence
  derived and/or modified protein sequence (opt6) from LASV(Mad39;Clade IV)__ANH09722__GPC
augggacaaaucguaacauucuuccaagaaguaccacacguaauagaagaaguaaugaacauaguacuuauagcucuaucuauauuagcaguucuaaaaggauuauacaauguagccacaugcggacugaucggacuaguaacauuccuacuccuauguggaagaucauguaccacaacucuauauaaaggcguauaugaacuacaagcauuagaacuuaacauggaaacucuaaacaugacaaugccccuaucaugcacaaaaaauaacucccaccacuacauaagaguaggaaaugaaacuggacucgaacuaacacuaacaaacacauccuuaaucaaccacaaauucuguaaccuaagcgacgcacauaaaaaaaaucuauacgaccacgcauuaauguccauaaucucaaccuuccacuuauccauccccaauuuuaaccaauacgaagcaaugucaugcgauuucaaugacgguaaaauauccguccaauauaauuuaucccauacauacgccggagauaccgcaaaccacugcggaacuguugcaaacggagucuuacaaacauucaugagaauggccuggggaggaucauacauagcacuagacuccggaagaggaggaugggacugcaucaugacuucauaucaauaccuaauuauacaaaacacuacaugggaagaccacugucaauuuucaagaccaucaccaauaggauaccuaggucuacuuucacaaagaaccagagacaucuauaucuccagaagacuccucgguacauucacauggacacuuucagacucagaaggaaaagacacacccggaggauauugucuaacaagauggaugcucauagaagccgaacucaaaugcuucggaaauacagcaguagcuaaaugcaacgaaaaacaugaugaagaauuuugcgauaugcuuagauuauucgauuucaauaaacaagccauacaaagacuaaaagcagaagcccaaaugucaauacaacuaauaaacaaagccguaaacgcacuaauaaacgaucaauuaauaaugaaaaaccaccuaagagacauaaugggaauaccauacugcaauuauucaaaauauugguaccuaaaucacacaguaacaggaaaaaccucauuaccuaaaugcuggcuagucucuaacggaucauacuuaaacgaaacccacuucucagaugacauagaacaacaagccgacaacaugaucacggaaaugcuucaaaaagaauacauggagagacaaggcaaaacaccacuaggacuaguugaccuauucguuuuuucaaccuccuucuacuuaauaucaaucuuccuacaccuagucaaaauacccacacauagacauguaguaggaaaaccauguccaaaaccacaucgauuaaaucacaugggaauuugcucaugcggcuuuuacaaacaacccggagucccaguacgauggaaacgauaa

SEQ ID NO: 2018 - RNA, 1476 nt, Artificial Sequence
  derived and/or modified protein sequence (opt6) from LASV(Mad41;Clade IV)__ANH09724__GPC
augggacaaauaguaacauucuuucaagaaguuccucacguaauagaagaaguaaugaacauaguucuaaucgcauuaucaauacuagccguauuaaaaggucuauacaacguugcaacaugcggacuaaucggccuaguaacauuccuccuacuuuguggacgaucaugcacaacaacacuauauaaaggagucuaugaauuacaagcacuugaacuaaacauggaaacacuaaacaugacaaugccuuuaagcugcaccaaaaacgacucccaccacuacaucaugguaggaaacgaaacaggacuagaacuaacacuaacaaauaccucuauaauaucacacaaauucugcaaucuauccgacgcacacaaacaaaacuuauacgaccaugcauuaaugucaauaauaucaacauuucacuuaagcauaccuaacuucaaccaauaugaagcaaugucaugugacuucaacgguggaaaaauaucuguucaauauaacuuaagccauacauaugcaggagacgcagcaaaccacugcggcacagucgcuaacggaguacuacaaacauucaugcgcauggcauggggcggaagcuacaucgcacuagauucaggucgaggaggaugggauugcauaaugaccucauaccaauaccuaauaauacaaaacacaacaugggaagaccauugucaauucucacgaccaagucccauaggauacuuaggccuucuaucacaaagaacaagagacauauacauaagcagaagacuacucggaacauuuacauggacacugucagacucagaaggaaaagacacaccaggaggauauugccucaccagauggaugcuaauagaggcagaacuaaaaugcuucggaaacaccgcaguagcaaaaugcaacgaaaaacaugacgaagaauuuugcgauaugcuucgauuauucgacuucaauaaacaagcaauacaaagacuaaaagcagaagcacaaaugucaauacaauuaauaaacaaagcaguaaacgcacucaucaacgaccaacuaauaaugaaaaaucacuuaagggauauaaugggaauaccauacugcaacuacuccaaauacugguaccuaaaucacaccguaacaggaaaaacaagucuaccuaaaugcuggcucgucagcaauggcaguuacuuaaacgaaacacauuuuagcgaugauauagaacaacaagccgacaauaugauaacagaaauguuacaaaaagaauauauggaacgacaaggaaaaacaccacuagguuuaguagaccuauuuguauucagcacaucauucuaucuuauaucaauauuccuucacuuaguaaaaauaccaacucauagacacguaguaggaaaaccaugcccaaaaccacauagacuaaaccacaugggaauaugcucaugcggcuucuacggccaaccaggaguaccaguaagauggaagcgcuaa

SEQ ID NO: 2019 - RNA, 1476 nt, Artificial Sequence
  derived and/or modified protein sequence (opt6) from LASV(Mad63;Clade IV)__ANH09728__GPC
augggacaaauaguaacauucuuccaagaaguaccacauguaauugaagaaguaaugaauauuguacuaauagcacuaucaguauuagcagucuuaaaaggauuauacaacguagcaaccuguggacuaauaggauuaguaacauuccucuuauuauguggaagaucauguaccacaacgcuauauaaaggaguauaugaauuacaagcacuagaacuaaacaugggaacucuaaacaugacuaugccacuaaguugcacaaaaaacaacucacaucacuauauaauggucggaaaugaaacaggacuagaauuaacacucacaaauacaaguaucauaaaucacaaauuuugcaacuuaagcgacgcccacaaaaaagacuuauaugaucaugcacucaugucaauaauaucaaccuuucauuuaucaguaccaaacuuuaaccaauacgaagcuaugucaugugacuuuaauggaggaaaaauaagcguacaauacaaccucagccacgcauacgccggagacacagcaaaccacugcgguacagucgcaaauggaguauuacaaacauucaugcgaauggcauggggaggaaguuauauagcucuagauagcggcagaggaggcugggacuguauaaugacaucguaccaguacuuaaucauacaaaauaccacaugggaagaucacugccaauuuucacgcccaucaccuauaggauaucuaggucuacuaucacaaagaacacgugacauauauauaaguagacguuuacucggaacauucaccuggacauuaagugacagcgaaggagaauacacaccaggaggcuacugcuuaacaagauggauguuaauagaagcugaauuaaaauguuuuggaaauacagccguagcaaaaugcaacgaaaaacacgacgaagaauuuugugacaugcuccgucucuucgauuucaauaaacaagcaauacaaagauuaaaagcagaagcccaaaugucaauacaauuaauuaacaaagcaguaaaugcacuuauaaacgaccaacuaauaaugaaaaaucaccucagagacauaaugggaaucccuuauugcaacuacagcaaauacugguaccuaaaccauacaguaacuggaaaaacaucauuaccaaaaugcugguuaguaaguaacggaucauaccuaaacgaaacucacuuuucagacgacauugaacaacaagcagacaacaugauaacagaaaugcuacaaaaagaauacauggaacgccaaggaaaaaccccccuaggauuagucgaccuauucguauucucaacaucauuuuaccuaauaucaauauuucuucaccuaguaaaaauacccacucacagacacguaguaggaaaaccuugcccaaaaccacauagauuaaaccauauggguauauguucaugcggauucuacaaacaaccaggaguaccagucagauggaaaagauaa

SEQ ID NO: 2020 - RNA, 1476 nt, Artificial Sequence
  derived and/or modified protein sequence (opt6) from LASV(Mad69;Clade IV)__ANH09730__GPC
augggucaaaucguuacauucuuccaagaagucccacaugucauagaagaaguaaugaacauaguauuaauugcuuuaucaguauuagccguacuaaaaggacuauacaacguagcaacaugcggccuaauaggcuuaguaaccuucuuacuuuuaugcgguagaucaugcacuaccacauuauacaaagguguauacgaauuacaagcauuagaacuuaacauggaaacacucaacaugacuaugccccuaucuuguacaaaaaacaacucucaucacuacaucaugguuggaaacgaaacuggauuagaacuaacacuuacaaauacauccauaaucaaccacaaauucuguaaccuauccgacgcacacaaaaaaaaucucuacgaucacgcauuaaugucaauaauuucaaccuuucacuuaucaauuccaaacuucaaccaauacgaagcaauguccugugauuuuaaucaaggaaaaaucucaguacaauacaacuuaucacaugcuuaugcaggagacgcagccaaccauugcggaacaguugcaaauggagucuuacaaacauucaugcgaauggcauggggaggaucauacauagcacuagauucaggcaggggugguugggacugcauaaugacaucauaccaauaucuaaucauacaaaacacuacaugggaaaaucacugucaauucucaagaccaucaccaauuggcuacuuaggauuacuaagccaacgaacaagagacaucuacaucagcagaagacuucuaggaacauuuacauggacacuauccgauucagaaggaaaaggaacaccuggagguuacugucucacacgauggaugcuaauagaagcagaacucaaaugcuuuggcaacacagccguagcaaaauguaacgaaaaacacgacgaagaauuuugugacauguuacgacuauucgacuucaacaaacaagccauacaaagauucaaagcagaagcacaaaugaguauacaguuaauuaauaaagcaguaaacgcacuaauuaacgaccaacuaaucaugaaaaaccaccuaagagacauaaugggaauacccuacugcaacuauucaaaauauugguauuuaaaccacacagugaccggaaaaacaucacuccccaaauguuggcuaguaucaaacgguucguacuuaaacgaaacccacuucucugacgauaucgaacaacaagcagacaacaugaucacagaaauguuacaaaaagaauauauggaaagacaaggcagaacuccccuaggacuagucgauuuauucguauuuucaacaucauucuaucuaauaucaaucuuccuacaucuaguaaaaauaccaacccacagacacguaguaggaaaaccgugcccaaaaccacauagacuaaaccauaugggaauaugcucauguggauucuauaaacaaccaggaguacccguuagauggaaaagauaa

SEQ ID NO: 2021 - RNA, 1476 nt, Artificial Sequence
  derived and/or modified protein sequence (opt6) from LASV(Mad83;Clade IV)__ANH09732__GPC
augggacaaauaguaacauuuuuccaagaaguaccacacguaauagaagaaguaaugaauauuguacuuauagcacuauccauacuagcaguccuaaaaggaguauacaauguagccacuugcggauuaauaggccuaguuacuuuccuacuacuaucuggaagaaguugcacuacaacaauauauaaaggaguauacgaacuacaagcacucgaacuaaauauggaaacacuaaacaugacaaugccacuaagcugcaccaaaaacaacucacaccacuacaucaugguaggaaacgaaacaggacuagaacucacacuaacaaacacaagcauaauaaaucacaaauuuuguaaccuauccgacgcacauaagaaaaaccuauacgaucacgcacuaauguccauaauaucuacauuccauuuaaguauaccuaacuuuaaucaauaugaagcuaugucaugcgacuuuaacggaggcaaaauaucaguccaauauaaucucucucacacauacgcaggagacgccgcaaaccacugcggaacaguagcaaacggcguacuucaaacauucaugcgcauggcauggggaggaucauauauagcacuagacuccggacauggaggaugggacuguauaaugacaucauaccaauacuuaauaauccaaaacaccaccugggaaaaucacugccaauucucacgaccaucacccauaggcuaccuaggccuauuaucacaacgcaccagagacauuuacauaucacgaagacuauuaggaacauuuaccuggacacuuucagacucagaaggaaaagacacaccuggaggauauugccuaacccgauggauguuaaucgaagcagaacuaaaaugcuuuggcaauacagcaguagcaaaauguaacgaaaaacaugaugaagaauuuugcgacaugcuacgacuauucgacuuuaauaaacaagcuauacaacgacuaaaagccgaagcacaaauguccauacaauuaauaaacaaagcagucaacgcauuaauaaacgaccaacuaauaaugaaaaaccacuuaagagacauaaugggaauaccauauuguaacuauuccaaauacugguaccuaaaucauacuguaacaggaaaaacaucacucccaaaaugcuggcuaguaucaaacggaucauacuuaaaugaaacacauuucucagacgacauagaacaacaagcagacaauaugauaacagaaaugcuacaaaaagaauacauggaaagacaaggaaaaacgccauuaggccuaguagaccuuuucguauucagcacaucauucuaucuaauaucaauauuucuacauuuaguuaaaauaccaacacacagacacauaguaggaaaacccugcccaaaaccacaccgucuaaaccauaugggaaucugcucauguggauucuacaaacaaccaggaguacccguaagauggaaacgauaa

SEQ ID NO: 2022 - RNA, 1476 nt, Artificial Sequence
  derived and/or modified protein sequence (opt6) from LASV(NL;Clade IV)__AAO59512__GPC
augggacaaauaguaacauucuuccaagaaguaccccacguaaucgaagaaguaaugaauauaguauuaauagcacucucaauacuagcaguauuaaaagguuuauauaacuucgccaccugcggacuagucggacucguugcuuuccuacuccuaugcggaagauccugcacauccucacuauauaaaggaguauacgaacuacaaaccuuagaacuaaauauggaaacucuaaacaugacaaugccacucucuugcacuaaaaauaauagccaucauuacauaagaguaggaaacgaaacaggccuugaacucacuuuaacaaacacaaguauaauaaaucacaaauucuguaaucuauccgaugcacacaaaaaaaaccuuuacgaucacgcauuaaugucaauaauuuccaccuuccacuuaucaauaccuaacuucaaccaauacgaagcaaugagcugugacuucaacggaggaaaaauaaguguacaauacaacuuaucacacuccuacgccgucgaugccgcaaaacauugcggaacaguagcaaacggcguucuucaaaccuuuaugcgaauggcuugggguggcucauacauagcacuagacucaggacacggaagaugggacugcauaaugacaucauaccaauacuuaauaauacaaaauaccacaugggaagaccacugucaauuuuccagaccaucacccauaggcuaccuaggauuacuaagccaacgaacaagagacauauacauaucaagacgauuauuaggaacuuucacauggacacucuccgacuccgaaggaaaagauaccccaggaggauacugccucaccagauggauguuaauagaagcugaacuaaaaugcuucggcaacacugcaguagcaaaauguaacgaaaaacacgacgaagaauuuugcgauauguuaagacucuucgauuuuaacaaacaagcaauacaacgacuaaaaacagaagcacaaaugucaauacaacuaauaaacaaagccguaaacgcauuaauaaacgaucaacuaaucaugaaaaaucaccuuagagacauaaugggcauuccauacuguaacuacuccagauauugguacuuaaaccacacaacaacaggcaaaacuucacuaccuaaauguuggcucguuucaaacgguagcuacuuaaaugaaacaagauucagugaugauauagaacaacaagcagacaacaugauaacagaaauguuacaaaaagaauacauggaaagacaaggaaaaacaccacuaggauuaguagaccuauucguauucucuacuucuuucuacuuaauaucaauuuucuuacaccuaguaaaaaucccaacacauagacacauaguuggaaaaucaugcccaaaaccacauagacuaaaccacaugggaauaugcucaugcggacucuauaaacaacccggcguaccaguaaaauggaaaagauaa

SEQ ID NO: 2023 - RNA, 1476 nt, Artificial Sequence
  derived and/or modified protein sequence (opt6) from LASV(Z0947-SLE-2011;Clade IV)__AIT17840__GPC
augggacaaauagucaccuucuuccaagaagucccacauguaauagaagaaguaaugaauauaguccuuauagcacuaucaauccuugccguacuaaaaggacuauacaacuucgccacaugcggucuagucggccuaguaacauucuuacuauuaugcggacgaucuuguacuaucagccucuacaaaggaguuuacgaauuacaaacacuagaacuaaauauggaaacauuaaacaugacuaugccccugucauguaccaaaaauaacucacaucacuauauuaugguuggcaaugaaacaggacucgaacucacacuaacaaacacaucaauaaucaaccauaaauucuguaacuuauccgaugcacacaagaaaaaccuauaugaccaugcacuaauguccauaauaucaacauuucaccuaucaauucccaauuucaaccaauacgaagcaaugucaugcgacuuuaauggagguaaaauaucaguacaauauaaccuaucacacucuuaugcaggagaugcagcaaaccauugcggaacaguagcaaacggaguauuacaaacauucaugcguauggccuggggaggaucuuauauagcauuagacucaggaagagauagaugggauuguauaaugacaucauaccaauacuuaauaauacaaaauacaaccugggaagaccacugccaauucucaagacccuccccaauaggauaucucggauuacuuucacaacgcacaagagauauauacauaucaagaagauuacuaggaacuuucacauggacccuauccgauucugaaggaaaagauacaccagguggauacugccuaacccgauggaugcuaauagaagcagaacuaaaauguuucggaaacacagcuguagcaaaaugcaacgaaaaacacgacgaagaguucugcgacaugcuaagauuauucgauuucaacaaacaagcaauccaaagauuaaaagcagaagcacaaauguccauccaacuaauuaacaaagcagucaacgcauuaauaaacgaccaacuaauaaugaaaaaccaccuucgagacaucauggguauuccauacugcaauuacucaaaauacugguacuuaaaucacacuaccacaggaaaaacaucauuacccaaaugcuggcuaguaucuaacggauccuaucuaaaugaaacacacuucucagacgacauagaacaacaagcugauaacaugauaacagaaauguuacaaaaagaauacauggaacgccaaggcaaaacaccacucggauuaguagaucuauucguauucucaacaucauucuaucuaauaucaauauuucuccaccuaguuaaaauccccacacauagacauauaguaggaaaacccugcccaaaaccacaccgacuaaaccacauggguaucugcucaugcggauuauacaaacaaccuggaguaccuguaaaauggaaaagauaa

SEQ ID NO: 2024 - RNA, 1476 nt, Artificial Sequence
  derived and/or modified protein sequence (opt6) from LASV(Z0948-SLE-2011;Clade IV)__AIT17844__GPC
augggacaaauaguaacauucuuccaagaaguaccucacguaauugaagaaguaaugaacauaguucuaauagccuuaucaauauuagcaguauuaaaaggauuauauaacuucgccacaugcggacuagucggauuaguaacauuccuacuucucuguggaagaucaugcacuaucucauuauacaaaggaguauacgaacuccaaacacuagaauuaaacauggaaacacuaaacaugacaaugccccuaucauguacaaaaaacaacucacaucauuacaucaugguaggaaacgaaacuggauuagaacuaacacuaacuaauacaucaauuauaaaccacaaauucugcaaccuuucugacgcccacaaaaaaaauuuauaugaccacgcauuaaugucaauaauuucaacauuucaccuaucaauacccaauuucaaccaauacgaagcaaugucuugcgauuucaauggaggaaaaauaucaguacaauacaaccucucccacagcuacgcaggagacgcagcaaaccacugcggcacagucgcaaacggaguacuacaaacauuuaugagaauggcaugggguggaucauauauugccuuagacuccggccgagaccgaugggacugcauuaugacaucauaucaauaccuuauaauacaaaacacaacaugggaagaucacugccaauuuucacguccaucuccaaucggauaucuaggacugcuaucacaaagaacaagagacauauauaucucaagaagauuacuaggcacauucacauggacauuauccgacucagaaggaaaagacaccccaggcggauacugucuaaccagauggaugcuaauagaagcagaauuaaaaugcuucggaaacacagcaguagcaaaaugcaacgaaaaacacgaugaagaauuuugugacauguuaagacuauucgacuuuaacaaacaagcaauacaaagacuaaaagccgaagcacaaaugagcauacaauuaauaaauagagcuguaaaugcacuaaucaacgaccaacuaaucaugaaaaaccaccuaagggacauaaugggaauaccauacugcaauuacucaaaauauugguaucuaaaccacacaacaacaggaaaaacaucacugccaaaauguuggcuaguaucaaauggaucauacuuaaacgaaacccacuucucagacgacauagaacaacaagcagacaauaugauaacagaaaugcuacaaaaagaauauauggaaagacaaggaaaaacaccccuaggucuaguugaccuauuugucuucucaacuucauucuacuuaauaucuauauuccuccaccuaguaaaaauacccacacaucgacacauaguaggaaaaccuugcccaaaaccacacagauuaaaccacaugggaauauguaguuguggauuauacaaacaaccuggaguaccaguaaaauggaaaagauaa

SEQ ID NO: 2025 - RNA, 1476 nt, Artificial Sequence
  derived and/or modified protein sequence (opt6) from LASV(Z148;Clade IV)__AAT49008__GPC
augggacaaauaguaacauucuuucaagaaguaccacauguaauugaagaaguaaugaacauaguccuaauagcacuaucaaucuuagcaguacuaaaaggacuauacaacguagccacuugcggacuaauuggauuagucacauuccuauuucuaugcggacguucaugcucaaccacauuauacaaaggaguuuacgaacuacaaacucuagaacuaaauauggaaacacuaaacaugaccaugccacuaucauguacaaaaaacaauucacaccacuacauaaugguaggaaaugaaacuggacuagaauuaacacucacaaacacaucaaucauaaaucacaaauuuugcaacuuaucagacgcacauaaaaaaaacuuauacgaccacacacuaauguccaucaucucaacauuccaccuaucaauaccaaacuuuaaucaauacgaagcaaugucaugcgauuucaacggaggaaaaauaucaguacaauacaacuuaucacacucauacgcaguagacgcagcaaaccauuguggaaccguugcaaacggcguccuacaaacauuuaugagaauggcauggggaggaucuuauauagccuuagacuccggacgaggcaauugggacuguauaaugacaucauaccaauauuuaauaauacaaaacaccacuugggaagaccauugccaauuuucacgacccucaccuaucggauaccuaggccuacuuucacaacgcacaagagacauauacauaucaagaagacuucucggaacauuuacauggacucuauccgacucagaaggcaaagacacuccaggaggauacugccuaacccgauggaugcucauagaagccgaacuuaaaugcuucggaaacacagcaguagcuaaaugcaacgaaaaacacgacgaagaauuuugcgacaugcucagacuauuugauuuuaacaaacaagcuauccaacgacuuaaagcagaagcacaaaugucaauacaacuaauaaacaaagcaguaaaugcacuuauaaaugaccaacuaauaaugaaaaaccacuuaagagacauaaugggaauaccauacugcaacuacucaagauacugguaucuaaaccacacagucacuggaaaaacaucacuaccaaaaugcuggcuagucucuaacggauccuaccuaaaugaaacccacuucucggacgacauagaacaacaagcagacaacuuaauaacagaaaugcuccaaaaagaauacauggaacgacaaggaaaaacaccucucggucuuguagaccucuucguauucucuacauccuucuauuuaauauccauuuuuuuacauuuaguaaaaauaccaacacaccgacauauaguaggaaaaccauguccaaaaccucauagacuuaaccacaugggcaucugcucuuguggcguuuacaaacaacccggaguacccguaagauggaaaagauaa

SEQ ID NO: 2026 - RNA, 1476 nt, Artificial Sequence
  derived and/or modified protein sequence (opt6) from LASV(Bamba-R114;Clade V)__AHC95555__GPC
augggacaaauaguaacauucuuccaagaaguaccacacguaauagaagaaguaaugaacauuguacuaauagcucuaucaauacuagccguuuuaaaaggauuauauaauauagcaacauguggauuaaucggacuaguaacauuucuacuucuaugcggaagaucaugcucuucaaaccuauacaaagguguauaugaauuacaaucacucgaccuaaauauggaaacccucaacaugacaaugccacuauccugcacuaaaaacaacucacaucacuacauucgagcaggaaacgaaaccggauuagaacuaacacucaccaacacaucacuaaucaaccacaaauucugcaacuuaucugaugcacacaaaaaaaaccuguacgaccauacacuaaugucaauaauuucaacuuuccaccuguccauaccaaacuucaaccaauacgaagcuaugucaugcgacuuuaacggaggcaaaaucucaguucaauacaaccuaagccacgcauacgcaauagaugccgcagaacacugugguacaguagcuaacggaguacuacaaacauuuaugcgcauggcauggggaggaucauacauagcacuugacucaggaagaggaaacugggacugcauaaugacaucauaccaauaccuaaucauacaaaacaccacaugggaagaccauugccaauucucaagaccaucaccaaucggauacuuaggacuacuaagccaaagaacaagagacauauacauaucccgaagacuauuaggaacauucacauggacacuaucagacucagaaggaaacgcaacacccggaggcuacugcuuaacaagauggauguuaauagaagcagaacucaaaugcuuuggaaauacugcaguagcaaaauguaaugaaaaacacgacgaagaauucugcgacaugcuaagacuauucgauuucaauaaacaagcaauaucacgacuaaaaucugaagcacaaaugucaauacaacucauaaacaaagcaguaaacgcccuaaucaacgaucaacuaauaaugaaaaaucaccuuagagauaucaugggaauaccauacugcaauuauuccaaauauugguaucuaaaccacacaaucacaggacgaacaucauuacccaaaugcuggcuaguaaguaacggauccuaucuaaacgaaacacacuuuucagacgacauagaacaacaagccgacaacaugaucaccgaaaugcuacaaaaagaauacauggaaagacaagggaaaaccccacuaggauuagucgaucuauucguauucuccacaucauuuuaccuaaucaguauuuuccuacaccuaguaaaaauaccaacccacagacauauaguaggaaaaccaugccccaaaccacaucgacuaaaccacaugggaauaugcuccugcggacuauacaaacaaccaggcguaccucuaaaauggaaaagauaa

SEQ ID NO: 2027 - RNA, 1476 nt, Artificial Sequence
  derived and/or modified protein sequence (opt6) from LASV(Komina-R16;Clade V)__AHC95557__GPC
augggccaaauaguaacauucuuccaagaaguaccacacguaaucgaagaaguaaugaacauuguccuaaucgcccuuucuauccuagcaguauuaaaaggacuuuacaauaucgccacaugcgguuuaauaggauuaguuacuuucuuccuacuauguggaagaucauguucuucaaacuuauauaaaggagucuacgaacuacaaucauuagauuuaaacauggaaacacuaaacaugaccaugccauuaucaugcacuaaaaacaacucccaccacuacauuagaguaggaaaugaaaccggccucgaacuaacccuaacaaacacauccuuacuaaaccacaaauucugcaaucuaucagacgcacacaaaagaaauuuauaugaucacgcacucauguccauaauauccacauuucaccuaucaauaccaaacuucaaccaauaugaagcaaugucaugcgacuucaauggaggcaaaauaaccguacaauacaaccucucccauucauacgcaggcgacacagcaaaacacugcggaacaaucgcuaauggagucuuacaaacauuuaugcgaauggcauggggaggcucuuacauagccuuagauucaggccaugggaacugggauugcaucaugacaucauaucaauauuuaauaauacaaaacacaacaugggaagaucacugccaauucucccgaccaucacccauuggauaucuaggacuauuaucacaaagaaccagagacauauauaucucacgacgauuacuaggaacauucacauggacauuauccgacucagaaggaaacgccacacccggcggauacugccuaacaagauggaugcuaauagaagcagaacuuaaaugcuucggaaauacagcaguagcaaaaugcaacgaaaaacacgacgaagaauuuugcgacaugcuaagacuauucgauuuuaauaaacaagcaauaucaagacuacgaucagaagcccaaaugucaauacaacuuauaaacaaagcaguaaaugcacuaaucaacgaucaacucauaaugaaaaaucaccuaagagauauaaugggaauaccauacugcaacuacucaaaauacugguacuuaaaucauacaguaacaggacgaacuucauuaccaaaaugcuggcucguauccaacggaucuuaucucaaugaaacacacuuuuccgaugacauagaacaacaagcagacaauaugauaaccgaaauguuacaaaaagaauauauggacagacaaggaaaaaccccacucggacuuguagaucuuuucguuuucucaacuagcuucuaccuaaucucuauauuucuacaucuaguaaaaauaccaacacaccgacacauaguaggaaaaccaugcccaaaaccacacagacuaaacagaauggguaucugcucaugcggauuauacaaacaacccggcguaccaguaaaauggaaacgauaa

SEQ ID NO: 2028 - RNA, 1476 nt, Artificial Sequence
  derived and/or modified protein sequence (opt6) from LASV(Ouoma-R123;Clade V)__AHC95559__GPC
augggccaaauaauaacauuuuuccaagaaguaccacacguaauagaagaaguaaugaauauuguacuaauugcacuaucaauacucgcaguacuaaaaggauuauauaacaucgcaaccuguggccuaaucggauuaguaacauuccuauuacuauguggacgauccuguucuucaucacuauacaaaggcguauacgaacuccaaucacuagaccuaaacauggaaacauuaaauaugacaaugccacuaucauguacaaaaaacaacucacaccacuacauaagaguaggaaacgaaacaggacuagaacuaacccuaacaaauacauccuuaauaaaucauaaauuuuguaacuuaucagacgcccacaaaaaaaaucucuaugaucacgcuuuaauguccaucaucucuacauuccaccuaucaauaccuaacuuuaaucaauaugaagcaaugucaugugauuucaacggaggaaaaauaucaguacaauacaaccuaucacacgcauacgcaauagaugcagcaucacacugcggaacaguagcaaauggaguacuccaaacauucaugcgaauggccuggggaggaucauacaucgcauuagacucaggacacggaaacugggauuguauaaugacaucauaccaauaucucauaauacaaaacacaacaugggaagaccauugucaauucucaagacccucacccauuggauaucucggacuauuaucacaaagaacaagagacaucuauauaagccgacgacuacucggaacauucacauggacuuuauccgacuccgaagggaacgcuacaccuggugguuacugccucacaagauggaugcucauagaagcugaacuaaaauguuuuggaaauacagcaguugcaaaaugcaacgaaaaacacgacgaagaauuuugcgacauguuacgacucuucgacuucaacaaacaagcaaucuccagauuaaaaucagaagcacaaaugucuauacaauuaauuaacaaagcaguaaacgcacuaauaaacgaccaacuuauuaugaaaaaccaccuaagagacauaaugggaauuccauauuguaacuauucaaaauauugguaucuaaaccacacaguaacaggaaaaacaucacuaccuaaaugcugguuaguaucuaacggauccuaccuaaacgaaacacauuuuuccgacgauauugaacaacaagcagacaacaugauaacagaaauguuacaaaaagaauacauggaacgucaaggaaaaacuccacuuggacucguagaccuauucguauucucuacaucauucuaucuaauaucaaucuuccuucaucucguaaaaauacccacacacagacacauaguaggaaaaccaugucccaaaccacacagacuaaaucauaugggaauaugcagcugcggauuauacaaacaaccaggaguaccaguaaaauggaaacgauaa

SEQ ID NO: 2029 - RNA, 1476 nt, Artificial Sequence
  derived and/or modified protein sequence (opt6) from LASV(Soromba-R;Clade V)__AHC95553__GPC
augggacaaauaguaacauucuuccaagaaguaccacacguaauagaagaaguaaugaacaucguauuaauugcacucucaauauuagccguucuaaaaggacuauacaauauagcaacaugcggauuaauaggauuaguaacauucuuccuacuaugcggccgcucauguucaucaaaccucuacaaaggagucuacgaauuacaaucacuagaccucaauauggaaacauuaaacaugacaaugccauuaucauguacaaaaaacaacagccaccauuacauaaggguaggaaaugaaacaggauuagaauuaacacuuacaaacacaucauuauuagaucacaaauuuugcaacuuaagcgacgcucacaaaaaaaauuuauaugaucacgcacuuaugucuauaaucucaacuuuccacuuaucaauaccaaacuucaaucaauacgaagcaaugucaugcgacuucaacgguggaaaaauaacaguacaauacaaccuaucucacucuuaugcaggagacgcagcacgccauuguggaacaauagcaaacggcguccuacaaacauuuaugagaauggcauggggaggauccuacauagcacuagacuccggacacggaaauugggacugcaucaugaccaguuaucaauauuuaauaauacaaaacacaacaugggaagaucauugucaauuuucacgaccaucaccaauaggauacuuaucacuacuaucacaacgaacaagagauauauacauaucacgacgauuacuaggaacauucacauggacccucucagauuccgaaggaaacgcuacuccaggaggauacugccuaacacgauggaugcuaauagaagcagaacuaaaaugcuucggaaacacagccguagcuaaaugcaacgaaaaacacgacgaagaauucugcgacaugcucagacuuuucgacuucaacaaacaagcaauuuccagacuacgcucagaagcacaaaugaguauacaacuuauaaacaaagcagucaacgcauuaauaaacgaccaauuaauaaugaaaaaucaccuacgagauauaaugggaauaccauauugcaacuacuccaaauacugguacuuaaaucacacaguuacuggaagaacaagccuaccaaaaugcuggcuaguaucaaacggcucauauuuaaacgaaacacauuucucugaugacaucgaacaacaagcagacaacaugauaacagaaaugcuccaaaaagaauacauggacagacaagguaaaacucccuuaggacucguagaucuauuuguauucagcacaucauucuaccuaaucucaauauuccuccaccuaguaaaaauaccaacacacagacauauagucggcaaaccaugcccaaaaccucauagacuaaauagaauggguaucuguucaugcggacuuuacaaacaaccaggagucccuguaaaauggaaaagauaa

SEQ ID NO: 2030 - RNA, 1473 nt, Artificial Sequence
  derived and/or modified protein sequence (opt6) from LASV(Alzey;Clade VI)__SCA79105__GPC
augggacaaauuauaacauuuuuccaagaagucccacacguaauagaagaaguaaugaacauaguacuuauagcacuaucacuauuagcuauauuaaaaggugucuacaauguugcaacaugcgguauaaucggauuaguaacuuuccuauuucuauguggaagaucauguucccuaauauacaaaggaucauacgaauuacaaacauuagaauuaaauauggaaacauuaaacaugacaaugccacuaucauguaccaaaaacucaucucaccacuacauaagaguaggaaacgaaacaggccuugaacuuacacuaacaaauacaucaauaauaaaucacaaauuuugcaaccuaucagacgcacauaaaaggaacuuauacgaucacgcacuaaugucaauauuaucaacauuccacuuaucaauaccaaauuuuaaccaauaugaagcaaugucaugcgauuucaacggaggaaaaaucucaguccaauauaacuuaagccaugcauaugcaguagacgcagcagaacacugcggcacaguugcaaacggaguucuccaaacauucaugagaauggcuuggggcggaucauacauagcccuagacucuggacgcggaaauugggacugcauaaugacaucauaucaauaccuaaucauacaaaacacaacaugggaagaucacugucaauucagcagaccaagcccaauuggguacuuaggacuauuaucccaaagaacaagagacauauacauaagcagacgucuuuuaggaacauuuacauggacauuaucagacucugaaggaaacgaaacaccaggcggauacugccucacaagauggauguuaauagaagcagaauuaaaaugcuucggaaacacugcaguagcaaaaugcaacgaaaaacaugacgaagaauuuugcgacauguugcgcuuauucgacuucaacaaacaagcaauacaacgcuuaaaaagcgaagcacaaaugucaauacaacuaauaaacaaagcagucaaugccuuaauuaaugaccaauuaauaaugaaaaaccaccuacgagacaugaugggcauaccauauuguaacuacucaaaauauugguaucuaaaccacacaucaucaggaagaaccucacucccaaaaugcuggcuaguaucuaacggaagcuacuuaaaugaaacacauuucucagaugacaucgaacaacaagcagacaauaugaucacugaaaugcuacaaaaagaauacauagaccgacaaggaaaaaccccucuuggccuaguagacuuauucgucuucucaacaucauucuaccuaauuaguauauuccuacaccuaaucaagauaccaacacacagacacauaguaggaaaaccauguccaaaaccacauagauuaaaucacaugggaauauguuccuguggauuauauaagcagccaggaguaccaacacgauggaaacgauaa

SEQ ID NO: 2031 - RNA, 1473 nt, Artificial Sequence
  derived and/or modified protein sequence (opt6) from LASV(Lassa/H.sapiens-wt/TGO/2016/201600568;Clade VI)__AVN98153__GPC
augggccaaauaauaacauuuuuccaagaaguuccacauguaauagaagaaguaaugaauauaguuuuaauagcacuaucauuauuagcaauacucaaaggcguauauaauguugcaacaugcggcauaaucggauuagucacauucuuauuccuaugcggccgaucuugcucccuuauauacaaagguuccuaugaauuacaaacauuagaacucaauauggaaacucucaacaugacaaugccuuuauccugcaccaaaaacucaucacaccauuacauaagagucggcaaugaaacaggcuuagaacuuacacuaacaaacacaucuauaauaaaccacaaauuuugcaaucuuucagacgcucacaaaagaaauuuauaugaccacgcauuaauguccauacuauccacuuuucaucuaucuauuccaaacuucaaccaauacgaagccaugucaugcgacuuuaacggaggaaaaauuucaguacaauacaacuuaucucacgccuacgcaguagacgcugcagaacacuguggcacagucgcaaacggcguauuacaaacauucaugagaauggcauggggaggcucauacauagcucuagauucaggcagaggaaacugggauuguauaaugacaucauaucaauacuuaauaauacaaaacacaacaugggaagaucauugucaauucagccgcccaaguccaaucggauaccuuggcuuauuaucccaacgaacaagagauauauacauauccagaagacuacuugguacauucacauggacacuauccgacucugaaggaaaugaaacaccaggcggauacugccuaacacgauggauguuaaucgaagcagaauuaaaauguuucggcaacacagcaguagcaaaauguaaugaaaaacacgacgaagaauuuugcgacaugcuaagauuauucgauuucaacaaacaagcaauacaaagacuaaaaucagaagcacaaaugucaauacaauuaauaaacaaagcaguaaacgcacugauaaacgaccaacuaauaaugaaaaaccacuuaagagacaugaugggaauacccuacugcaauuauuccaaauacugguaccuaaaccauacaucaagcgggagagcaucauuacccaaaugcuggcuaguauccaacggaucauaucuaaacgaaacacacuucucagacgacauagaacaacaagcagauaacaugauaacagaaaugcuacaaaaagaauacauugauagacaaggaaaaaccccacuaggacucguagaccuauucgucuuuuccacuucauucuaccuaauuucaauauuuuuacacuuaauaaaaaucccaacacauagacauauagucggaaaaccaugcccaaaaccacacagacuuaaucauaugggaaucugcucaugcggauuauacaaacaaccaggaguuccaacacgauggaaaagauaa

SEQ ID NO: 2032 - RNA, 1473 nt, Artificial Sequence
  derived and/or modified protein sequence (opt6) from LASV(NIGERIA IKEJI;Clade II)__AMZ00373__GPC
augggacaaaucauaaccuuuuuucaagaaguaccacauguaauagaagaaguaaugaacauagucuuaauagcacuaucacuucuagcuauacuaaaaggcauauacaacguagcaacaugcggacucuucggacuuauaucauuccuauuccuauguggaagauccugcucaacaauguauaaaggaguauaugaacuacaaacacuagaacuagacauggcaaaccuaaacaugacuaugccauuaagcuguacaaaaaacaauucacaccacuacauuaugguaggaaacgaaacaggacuagaacuaacauuaaccaaccaaucaauaauuaaccauaaauucugcaaccucucagacgcacacaaaaaaaauuuauacgaccacacacuaaugucaauaaucucaacuuuccaucuuucaauacccaauuuuaaccaauacgaagcuaugucaugcgacuuuaacggaggaaaaaucucuguacaauauaacuuaagccacucauacgcaguagaugcagcaaaccacugcggcacaguagcaaacggaguauuacaaacuuuuaugagaauggcauggggaggaucauauaucgcauuagacucaggaaaaggaaacugggacuguaucaugacaucauaccaauaccucauaauacaaaacacuacaugggaagaccacugccaauuuucacgaccaucacccaucggauaucuuggccuacuuucacaaagaacaagagauauauacaucucaagaagauuacuaggaacauuuacuuggacacucucugacuccgaaggaaacgacgcaccaggaggauacugccucacaagauggaugcuaauagaagccgaacuuaaaugcuucggcaauacagcuauagcaaaauguaacgaaaaacacgacgaagaauucugcgauaugcuaagauuauucgacuuuaacaaacaagcaauaaaaagacucaaagcagaagcacaaaugucaauucaauuaaucaacaaagcaguaaacgcacuuaucaacgaccaacuaaucaugaaaaaucaccuaagagauauaaugggaauuccauacuguaacuauucaaaauacugguauuuaaacaacaccguaacaggaaaauccucucuccccaaaugcugguuagucucaaauggaucauauuuaaacgaaacccacuuuucagacgacauagaacaacaagcagacaacaugauuacagaaaugcuacaaaaagaauauauggaucgacaaggaaaaacaccauuaggucuaguugacuuauucguauucucaacaucauuuuacuuaauaucaaucuuccuacacuuaguaaaaauaccaacacacagacauauaacuggaaaaccauguccaaaaccacaucgauuaaaccauaugggaauauguucauguggacucuacaaacaaccaggaguuccagucaaauggaaaagauaa

SEQ ID NO: 2033 - RNA, 1476 nt, Artificial Sequence
  derived and/or modified protein sequence (opt11) from LASV(Josiah;Clade IV)__NP_694870__GPC
augggccaaauagucaccuucuuccaagaagucccccacguaaucgaagaaguaaugaacaucguccucaucgcacucucaguccucgccguccucaaaggccucuacaacuuugccacaugcggccuagucggacucgucaccuuccuccuccuuugcggccgcuccugcacuaccagccuuuacaaaggcgucuacgaacuccaaacccuugaacucaacauggagacccucaacaugaccaugcccuuauccugcaccaaaaacaacucacaccacuacauaauggucggcaacgaaaccggcuuagaacuaacccucaccaacaccuccauaaucaaccacaaauucugcaaccucagcgacgcccacaagaaaaaccuauacgaccacgcccucaugucaaucauauccaccuuccaccucucuauacccaacuucaaccaauacgaagcaauguccugcgacuucaacggcgguaaaauauccguucaauacaaccugucucacuccuacgccggcgacgccgccaaccacuguggcaccgucgcuaacggcguacuacaaacauucaugcgaauggccuggggcggcagcuacaucgcccucgacucagggagaggaaacugggacugcaucaugaccucuuaccaauaccucaucauacaaaacaccaccugggaagaccacugccaauucagccgaccaucccccaucggcuaccuaggccuacuaucacaacguacccgcgacaucuauauaagccgccgccuacucggcaccuucaccuggacacucuccgacuccgaagguaaagacacccccggaggcuacugccuaacccgcuggaugcuaaucgaagccgaacuuaaaugcuucggcaacaccgcggucgccaaaugcaacgaaaagcacgacgaagaguucugcgacaugcucaggcucuuugacuucaacaaacaagccauccaacgccucaaagcagaagcccaaauguccauccaacucauaaacaaagccgucaaugcccucauuaacgaccaacucauuaugaaaaaccaccuacgagacaucauggguauccccuacugcaacuacagcaaauacugguaccucaaccauacaacuaccggccgcacuagccugcccaagugcuggcucguauccaauggcuccuaccucaacgaaacccacuucuccgacgacauugaacaacaagccgacaacaugaucaccgaaaugcuucaaaaggaauacauggaacggcaaggaaaaacuccccucggccucgucgaccucuucgucuucagcacauccuucuaccucauauccaucuuccuccaccuagucaaaauccccacacacagacacauagucggaaaauccugccccaaaccccacagacucaaccacaugggcaucuguuccugcggucucuacaaacaaccuggcguacccgucaaauggaagcgcuaa

SEQ ID NO: 2034 - RNA, 1473 nt, Artificial Sequence
  derived and/or modified protein sequence (opt11) from LASV(LP;Clade I)__AAF86701__GPC
augggccaaaucaucaccuucuuccaagaagucccacacgucauagaagaagugaugaacaucguccucauagcccuaucacuccuugccauccucaaaggccucuacaacaucgcaaccugcggcaucaucggccucgucgccuuccucuuucucugcggcaagagcuguucccuaacccuuaaaggagguuacgaacuccaaacacuagagcuaaacauggaaacacuuaacaugaccaugccccuaagcugcaccaaaaacuccucacaccacuacauccgcgucggaaacgaaaccggccucgaacucacucucaccaacacguccaucaucaaccacaaauucugcaaccuaucugacgcccauaagaaaaauuuauacgaccacgcccuaaugagcaucaucucgaccuuccaccuuuccauccccaacuucaaccaauacgaagccauguccugcgacuucaauggcggaaaaauauccguccaauacaaccucucacacagcuacgccggggacgccgccgaacacugcggcaccgucgccaacggcguccuacaaaccuucaugcgcauggccuggggaggccgcuauauagcccucgauuccgguaaaggcaacugggacugcauaaugaccuccuaccaauaccuuaucauacaaaacaccacaugggaagaccacugccaauucucccgcccgagccccauuggauaccucggccuacucucucaacgcacuagagacaucuacaucucccgccgucuccucggcaccuucaccuggacccucuccgacucagaaggcaacgaaacacccggaggcuacugccuuacccgauggaugcucaucgaagcagaacuaaaaugcuucggcaacacugccgucgccaaauguaacgaaaaacacgacgaagaguucugcgacaugcuccgccucuucgacuucaacaaacaagccauccgucgccucaaagcugaagcacaaauguccauacagcucaucaacaaagccgucaacgcacuaaucaacgaccaacucaucaugaaaaaccaccuccgagacaucaugggcauaccauacugcaacuacuccaaauacugguaccugaaccacaccuccucuggccgaaccucccuaccaaagugcuggcucauaucaaacggcuccuaccuuaacgaaacccaauucucagacgacaucgaacaacaagcagacaacaugaucaccgaaaugcugcaaaaagaguacauagaacgccagggcaaaacaccccuuggccuugucgacauauucaucuucucaaccagcuucuaccucaucagcaucuuccuccaucucauaaaaauccccacccaucgucacaucgucggaaaaccaugcccaaaaccccaucgucucaaccacaugggcgucugcuccugcggucucuacaagcaccccggcguacccaccaaauggaagcgcuaa

SEQ ID NO: 2035 - RNA, 1473 nt, Artificial Sequence
  derived and/or modified protein sequence (opt11) from LASV(803213;Clade II)__AAF86703__GPC
augggccaaaucauaacauucuuccaagaagucccccacgucaucgaagaagucaugaacaucguacucaucgcucucucacuccuagccauccucaaagguaucuacaauguagcgaccugcggccucuucggccucaucucauuccuucuccucugcggccgcuccugcuccgucaccuacaaaggcgucuacgagcuccagacccuagaacuaaacauggccaaccucaauaugaccaugccccucuccugcacuaaaaacaacagccaucacuacaucauggucggaaacgagaccggacucgaacucacacuuacuaacaccuccaucaucaaccacaaauucugcaaccucuccgacgcccacaagaaaaaucucuaugaccacgcccucauguccauuaucucaacguuccaccucuccaucccuaacuucaaccaauacgaagccaugucaugcgacuucaacggcggcaaaauaagcguccaauacaaccuaucccacuccuucgccguagacgccgccaaccacugcggcaccaucgccaacggcguucuccaaacauucaugcgcauggccugggguggcuccuacauugcccucgacucaggcaaaggcaacugggauugcaucaugacauccuaccaauaccucauuauccaaaacacaacuugggaagaccacugccaauucagccgcccaucccccauaggcuaccucggccuccucucccaacgcacacgcgacaucuacaucucccgccgccuacuaggaaccuucaccuggacccucagcgacucggaaggcaacgaagccccaggcggcuacugccucacuagauggaugcucaucgaagccgaacucaaaugcuucggcaacaccgccguggccaaauguaacgaaaaacacgacgaagaguucugcgacaugcuccgccucuucgacuucaacaagcaagccaucaaacgccucaaaaccgaagcgcaaaugucaauccagcucauaaacaaggcagucaacgcccucaucaaugaucaacuuaucaugaaaaaccaccuccgcgacauaaugggcauccccuacuguaacuacucucgcuacugguaccucaaccacacugugacaggcaaaaccucacuaccccgcuguuggcucguauccaacggcuccuaccucaacgaaacccacuucagcgacgacaucgaacaacaggccgacaauaugaucaccgaaaugcuacaaaaggaauacauggaccgacaaggcaaaacaccccuuggccucgucgaccuauucgucuucuccaccucauucuaccucaucuccaucuuccuccaccucgucaaaaucccaacccaccgccacaucgucggcaagcccugccccaaaccccaccgccucaaccauaugggcaucugcucaugcggccucuacaaacaccccggaguaccaguaaaauggaaacgcuaa

SEQ ID NO: 2036 - RNA, 1473 nt, Artificial Sequence
  derived and/or modified protein sequence (opt11) from LASV(GA391;Clade III)__CAA36645__GPC
augggucaaaucgucaccuucuuccaagaaguaccccacgucaucgaagaagucaugaacauaguccucaucgcccucuccauccucgcgauccucaaaggacuauauaacgucgcaaccugcggccucaucggccucgucaccuuccuccuccucagcggacguuccugcagccucaucuacaaaggcaccuacgaacuccagacucucgaacuuaacauggaaacacucaacaugaccaugccccucuccugcaccaagaacaacucccaccacuacauccgcguaggcaacgaaaccggccuagagcuaacccuaacaaacacaucaauccucaaccacaaauucugcaaccucuccgacgcccacaaacgcaaccuauacgaccacucccucauguccaucaucuccaccuuccaccucucaauccccaacuucaaccaauacgaagccauguccugcgacuuuaacggaggcaagaucaccguacaauacaaccucucccacuccuucgccgucgacgccgccggccacugcggcacccucgccaacggaguacuacaaaccuucaugcgcauggcauggggcggcucauacaucgcgcucgacuccggccgcggcaacugggacuguaucaugacauccuaucaauaccuuauaauccagaacaccaccugggacgaccacugccaauuuucccgccccucacccaucggauaucuaggccuccucucccaacgcacccgagacaucuacaucucccgacgacuccucggcacauucacauggacccucuccgacucagaaggcaacgaaacccccggcggauauugccuaacacgcuggaugcucaucgaagcugaacuuaagugcuuuggcaacaccgcaguagcuaaaugcaacgaaaaacacgacgaagaguucugcgacaugcuccgacucuucgacuucaacaaacaagcaauccgccgguuaaaaacugaagcacaaauguccauccaacucaucaacaaagcaguaaacgcucucaucaacgaucaacucauaaugaaaaaccaccuccgagacauaaugggcauacccuacugcaauuacucaagauacugguaccucaaccacaccucaaccgguaaaaccucccuaccccgcugcuggcuaaucucaaauggcucauaccucaacgaaacuaaauucuccgacgacaucgaacaacaagcagacaacaugauuaccgaaaugcugcaaaaagaauacaucgaccgacaaggcaagacccccuuaggccuugucgaccucuucgucuucuccaccucauucuaccucaucucaaucuuccuccaccucgucaaaaucccaacccaccgccacaucgucggcaaacccugccccaaaccccaccggcucaaucacaugggcaucugcagcugcggacucuacaaacaacccggcgucccaguccgcuggaaacgcuaa

SEQ ID NO: 2037 - RNA, 1476 nt, Artificial Sequence
  derived and/or modified protein sequence (opt11) from LASV(AV;Clade V)__CCA30314__GPC
augggacagaucguaacauucuuccaagaagucccccacguaaucgaagaagucaugaacaucguacuuaucgcccucuccauccucgccguccucaaaggccuauacaacaucgccacaugcggccuaaucggacuuauaaccuuccuccuccuuugcggccguucaugcucaagcaaccuuuacaaaggagucuacgaacuacaaagucucgaccucaacauggaaacacucaacaugaccaugccccucagcugcaccaaaaacaacucccaccacuacauccgcgucggcaacgacacaggacucgaacucacucucacaaacaccaguauccucaaccacaaguucugcaaccucuccgacgcccacaagaaagaccucuacgaccacgcacugauguccauaauuuccacuuuccaccuuuccauucccaacuucaaccaauacgaagccaugucaugcgacuuuaacggcggaaaaaucagcguacaauacaaccucucucacuccuaugccaucgacgcugcaaaccacugcggcaccgucgcaaacggcauccuccaaaccuucaugagaauggccuggggcggcucuuacaucgcccuagauucaggccgcggcaacugggacuguaucaugacauccuaccaauaccucaucauacaaaacaccaccugggaaaaccacugccaauuuucccgccccagcccaaucgguuaccucggccuccucucucaacggacccgcgacaucuacaucucccggcgacuauuagggacguucaccuggacccucucagacagcgaaggcaacgccacccccggcggauacugccuaacucgcuggaugcuuauagaagccgaacuuaaaugcuucggcaacacugcaguugccaaaugcaacgaaaaacacgacgaggaguucugcgacaugcuccgccucuucgacuucaacaagcaagccaucagccgccuuaaauccgaagcccaaauguccauucagcucaucaacaaagcuguaaacgcccucauaaacgaccaacucaucaugaaaaaucaccuccgcgacauaaugggcauacccuacugcaacuacuccaaauacugguaccuaaaucacaccaucaccggcaaaaccucucuccccaaaugcuggcucgucuccaacggcucauaccucaacgaaacccacuucucggacgacaucgaacaacaagccgacaacaugaucaccgaaaugcuccaaaaagaauacauggaacgccaaggcaaaacaccacuaggccuagucgaccuauucgucuucucgacuuccuucuaccuaauauccaucuuccuucgacucguaaaaauccccacacacagacacauugucggcaagcccugccccaaaccccaccgccuaaaccacaugggcaucugcucaugcggccucuacaaacaacccggcgucccaguccgcuggaaacgcuaa

SEQ ID NO: 2038 - RNA, 1473 nt, Artificial Sequence
  derived and/or modified protein sequence (opt11) from LASV(Togo/2016/7082;Clade VI)__AMR44577__GPC
augggacaaaucaucaccuuuuuccaagaagucccccacguuaucgaagaagucaugaacauaguccucaucgcacuuucacuccucgccauacucaaaggcguauacaacgucgcaaccugcggaauaaucggccuggucaccuuccuguuccuaugcggacgauccugcucccuaaucuacaagggguccuacgaacuacaaacccuagaacucaacauggaaacacuuaacaugacaaugccacucucaugcaccaaaaacucaucccaccacuacaucagaguuggcaacgaaacaggccucgagcuaacccucaccaauacaucaaucaucaaccacaaauucugcaaccucuccgacgcccacaaacgaaaccucuaugaccacgcacucauguccauccuuagcaccuuccaccuuagcauccccaacuucaaccaauacgaggccaugagcugcgacuucaacggaggaaaaaucuccguccaauacaaccuaucccacgccuacgccgucgacgcagccgaacacugcgguaccgucgcgaacggcguccuccaaaccuucaugcgcauggccuggggcggcagcuacaucgcccucgacagcggccgcgggaacugggacugcaucaugaccucauaucaauaccuaauuauccaaaacaccaccugggaggaucacugccaauucucccgcccauccccaaucggcuaccuuggccuccucucccaacgcacccgugacaucuacaucucccgcagacuacucgguaccuucacauggacccucuccgacuccgaaggcaacgaaaccccaggcggcuacugccugacacgcuggaugcucaucgaagccgagcucaaaugcuucggcaacaccgccgucgccaagugcaaugaaaaacacgacgaagaguucugcgacaugcuucgccucuucgacuuuaacaaacaggccauccaacgccuaaaaagugaagcccaaaugagcauccaguuaaucaacaaagccgucaaugccuuaaucaacgaccaacucaucaugaaaaaccaucuccgcgacaugaugggcauaccuuacugcaacuauuccaaauacugguaccuaaaccacacuuccucgggccgaacaagccucccaaaauguuggcucgucuccaacggaucauaccucaacgaaacccacuucuccgacgacaucgaacaacaagccgacaauaugauuaccgaaauguuacaaaaggaauacaucgaccgccaaggcaaaacaccccuaggccucgucgaccuuuucguauucucgacgucauucuaccuaaucaguaucuuccuccaccucaucaaaauccccacccaccgucacaucgucggcaaaccgugccccaaaccccaccgccugaaccacaugggaaucugcucuuguggccuauacaaacaacccggaguacccaccagguggaaacgguaa

SEQ ID NO: 2039 - RNA, 1473 nt, Artificial Sequence
  derived and/or modified protein sequence (opt11) from LASV(KAK-428;Clade n.d. (VII))__ANH09740__GPC
augggccaaaucgucaccuucuuccaagaagucccccacgucaucgaagaagucaugaacauaguccuaauagcccucucccuccuagccauccucaagggacuauauaacuucgccacaugcggcgucaucggccuuauaacuuuccuccuacucugcggccgcuccugcucugccaccuacaaaggccaauacgagcuucaaacucuugaacucaacauggaaucacuaaacaugaccaugccccuauccugcaccaaaaauaacucacaccacuacauccgcgccgggaacaacacaggccuagaacucacgcucaccaacaccuccaucaucucacauaaauucugcaaccuauccgacgcccacaagaaaaaccucuaugaccacacacucauguccaucauaacaaccuuccaccucuccaucccuaacuucaaccaguacgaagccaugagcugcgacuucaacggcggcaaaauauccauccaauacaaucugucccacuccuacgccggcgacgcagcccagcacugcggcaccgucgccaacggcguccuccagaccuucaugcguauggcauggggaggcuccuaccucgccuuagacagcggacgacguggaugggacugcauaaucuccuccuaccaauacuuaauaauccaaaacaccaccugggacgaucacugccaauucucacgccccucccccaucggcuaccucggauucgucucacagaaaacccgagacaucuacaucuccagacgccuacucggaacguucaccuggacacucagcgacuccgagggccacgacaugcccggcggauacugccucacccgcuggaugcucaucgaagccgaccugaaaugcuucggcaacacagccgucgccaaaugcaacgaaaaacacgacgaagaguucugcgacauguggcgacucuucgacuucaacaaacaagcaauccaaagacucaaagccgaagcccaaaugaacauccaacuaaucaacaaggccgucaacgcccugauaaacgaccaacucaugaugaaaaaccaccucagagacaucaugggcaucccauacugcaacuacuccaaauucugguaccucaacaacaccacaaccggccgcaccucccuaccgcgcugcuggcuaaucucaaaugguuccuaccucaacgaaacccauuuuagcgacgacaucgaacaacaagccgacaacaugaucaccgaaaugcugcaaaaggaauacauggaccgccaaggaaaaacaccccucggccucguagaccucuucgucuucuccaccagcuucuaccuaaucacaaucuuccuccaucuggucaaaauaccgacucacagacacaucgucggaaaacccugccccaaaccccaccgacucaaccacauggguaucugcuccugcggccucuacaaacaacccggagucccaguucgauggaaacgcuaa

SEQ ID NO: 2040 - RNA, 1473 nt, Artificial Sequence
  derived and/or modified protein sequence (opt11) from LASV(Acar 3080;Clade I)__AAT49014__GPC
augggccaaaucaucaccuucuuccaagaagucccccacgucauagaagaagucaugaacaucguauuaaucgcccuaucccuucucgccauccugaaagggcucuacaauaucgccacuugcgguaucauaggccucguagcauuccuauuccucugcggcaaauccugcucucucacacucaaaggcggcuacgaacuacaaacccucgaacuaaacauggaaacccucaacaugaccaugccccuaaguugcaccaaaaacuccucgcaccacuacauacgagucggcaacgaaaccggccucgaacucacucuaacaaauacaaguaucaucaaccacaaguucugcaaccuauccgacgcccacaagaaaaaccuauacgaucacgcccucaugucaaucauauccaccuuccaucuauccauccccaauuucaaccaauacgaagcaaugucaugcgacuucaacggcggaaaaaucagcguccaauacaaccucagccacucauacgcaggagacgcagccgaacacugcggcaccgucgcaaacggcguacuccaaaccuucaugcggauggccuggggcggacgcuacaucgcccucgacuccggcaaaggcaacugggacugcaucaugaccagcuaccaauaccucaucauccagaacaccacaugggaagaccacugccaauucucacgacccucccccaucggauaccucggacuccuaucccaacgcacccgagacaucuauaucagucgccgccuccucggaaccuucacauggacacuauccgacuccgaaggcaacgagacccccggcggcuacugccucacacgcuggaugcucaucgaagcugaacucaaaugcuucggcaacaccgccgucgccaaaugcaacgaaaaacacgacgaggaguucugcgacaugcuucgccuuuucgacuucaacaaacaagccauccgccgacuaaaagccgaagcacaaaugagcauccaacuaaucaacaaggccgucaacgcccucauuaacgaccagcuuaucaugaaaaaccaccuccgcgacaucaugggcauccccuacugcaauuacuccaaauacugguaccuuaaucacaccucaucaggacgaaccucucucccaaaaugcuggcuaaucuccaacggcagcuaccucaacgaaacacaguuuuccgacgauauagaacagcaagccgaccacaugaucacagaaaugcuccaaaaagaauacaucgaacgacaagguaagacaccucucggccucguugauaucuucaucuucuccaccuccuucuaccucaucucaaucuuccuacaccucauaaaaaucccaacccaccgccacaucguaggcaaacccugcccuaaaccgcacagacuaaaccacaugggcguaugcuccugcggccucuacaaacacccaggaguuccuaccaaauggaaacgcuaa

SEQ ID NO: 2041 - RNA, 1473 nt, Artificial Sequence
  derived and/or modified protein sequence (opt11) from LASV(Pinneo-NIG-1969;Clade I)__AIT17836__GPC
augggccaaaucauaacuuucuuucaagaagucccacacgucaucgaagaagucaugaacauaguccucaucgcccuaucccuccuagcaauccuaaaaggccuauacaauaucgcaaccuguggcaucaucggccuugucgccuuccucuuccucugcggcaaauccuguucccuuacccuaaagggcggcuacgagcuccaaacccucgaacucaacauggaaacccucaacaugacuaugccccucuccugcaccaagaacuccucccaccacuacauccgcguuggcaaugaaaccggacucgaacugacccuaaccaacaccucaaucaucaaccacaaauuuugcaaccuuuccgacgcacacaagaaaaaccucuacgaccacgcccucaugagcaucaucucaaccuuccaccucucaauccccaacuucaaucaauacgaagccauguccugcgacuucaacggcggaaaaaucagcguccaguacaaccugucacacagcuacgccggcgacgccgccgaacacugcggaacagucgcuaacggagucuuacaaacauucaugcgcauggcauggggcggccgguacaucgcccucgacuccggcaaaggcaacugggacugcaucaugaccuccuaccaauaccucauaauccaaaacaccaccugggaagaccacugccaauucucccgcccuucccccaucggcuaccuaggccuccuaagccaacgaacccgagacaucuacaucucaagacgccuccucggcacuuucaccuggacccucuccgacucagagggaaacgaaacccccggaggcuacugccuuacccgcuggauguuaaucgaagccgaacucaaaugcuucggcaacaccgccguagccaaaugcaacgaaaaacacgacgaagaguucugcgacaugcuacgccucuucgacuucaacaaacaagccauacgccgacucaaagcagaagcccaaauguccauccaauuaaucaacaaggccgucaacgcccuaauaaacgaccagcuaauaaugaaaaaccaccuccgcgacaucauggguauccccuacugcaacuacuccaaauacugguaccuaaaccacaccucauccggccgaacaucccuccccaaaugcuggcucaucuccaacggcuccuaccucaacgaaacacaauucuccgacgacaucgaacaacaagccgacaacaugaucacugagaugcuacaaaaagaauacaucgaacgacaaggcaaaacaccccuaggacucgucgauaucuucauauucucaaccucuuucuaccucaucucuaucuuccuucaccucaucaaaauccccacucaccggcacauagucggcaaacccugccccaaaccacaccgccuaaaccacaugggugucugcuccugcggccucuacaaacaccccggcguccccacaaaauggaaacgauaa

SEQ ID NO: 2042 - RNA, 1473 nt, Artificial Sequence
  derived and/or modified protein sequence (opt11) from LASV(ISTH0009-NIG-2011;Clade II)__AIT17404__GPC
augggccaaaucaucaccuuuuuccaagaagucccccacgucaucgaagaagucaugaacaucguccuaaucgcacucucccuacucgccauccucaaaggaaucuacaacguugcuacaugcggacucuucggccucgucuccuuccuccuccucugcggccgcucaugcuccaccaccuacaaaggcgucuacgaacuccaaacacucgaacucgacauggccucccuaaacaugaccaugccccucuccugcaccaaaaacaacucccaccacuacaucaugguaggcaacgaaaccggccuagaacucacccucacaaacacaucaaucaucaaccacaaauucugcaaucucuccgacgcacacaagaaaaaccucuacgaccacgcccucaugucuaucaucuccacauuccaccucucaauccccaacuucaaccaauacgaagcaauguccugcgacuucaacggaggcaaaaucucggugcaauacaaccucucgcacgccuacgcuguagacgccgccaaccacugcggcacuaucgccaacggcguccuacagaccuucaugcgcauggccuggggcggcuccuacaucgcccucgacucgggcaaaggcuccugggacugcaucaugacguccuaccaauaccucaucauccaaaacacaaccugggaagaccacugccaauucucccgacccagccccaucggguaccucggccuucuaucacaacggacccgagauauauacaucucccgcagacuacucggcacuuucaccuggacacucucagacuccgaaggcaacgaaacccccggcggcuacugccucacacguuggaugcuuauagaagccgaacucaaaugcuucggcaacaccgccgucgccaaaugcaacgaaaaacacgacgaagaauuuugcgacaugcucagacucuucgacuucaacaaacaagccauaagacgcuuaaaaacagaagcacaaaugucuauacaacucaucaacaaagccgucaaugcacuaaucaacgaccagcuaaucaugaaaaaccaccuccgcgacaucaugggcauccccuacugcaacuacuccaaauacugguacuugaaccacaccgucaccggcaaaaccucccucccgcgcugcuggcuagucagcaacggcagcuaccucaacgaaacccacuucucugacgacauagaacaacaagccgacaacaugaucaccgaacuccugcaaaaagaauacauggaccgccaaggaaagacuccccucggccucguggaccuauucgucuucucaaccucauucuaccuuaucagcaucuuccuccaccuuaucaaaauaccuacacaccgccacaucacaggcaaaccaugccccaagccccaccgauuaaaccauaugggcauaugcuccugcggccucuacaaacaccccggaguaccagucaaauggaaacgauga

SEQ ID NO: 2043 - RNA, 1473 nt, Artificial Sequence
  derived and/or modified protein sequence (opt11) from LASV(ISTH0012-NIG-2011;Clade II)__AIT17408__GPC
augggacaaaucauaaccuucuuccaagaagucccacacgucaucgaggaaguaaugaacaucguccucaucgcccucucccuccucgccauccucaaaggaauauacaacgucgcaaccugcggccucuucggccuagucuccuuccuccucuuaugcggccguucgugcuccacaacuuacaaaggcguuuaugaacuccaaacccucgaacucgacauggccucccucaacaugaccaugccucuauccugcaccaaaaacaauucccaccacuacaucauggucggcaacgaaaccggacuagagcucacccuaaccaacaccuccaucaucaaccacaaauucugcaaucucuccgacgcacacaagaaaaaccucuacgaucacgcacuaauguccauaaucuccaccuuucaccucucaauccccaacuuuaaccaauacgaagcaaugagcugcgacuucaacggcggaaaaaucuccguacaauacaaccucucccacacuuacgccgucgacgccgccaaccacugcggaaccguagcuaacggcguccuccaaaccuucaugcgcauggccuggggaggcuccuacaucgcccucgacucuggaaaagguuccugggacugcaucaugaccagcuaccaauaccuuauaauacaaaacacuaccugggaagaccacugucaauucucccgaccaagccccaucggcuaccucggccuccuaucccaacgcacccgcgacauauacauaucccgucgccuccucggcacauucaccuggacccucuccgacucagaaggaaacgagacacccggcggauacugccuaacacgauggaugcucauugaagccgaacucaaaugcuucggcaacaccgccguagccaaaugcaacgaaaagcacgacgaagaguucugcgacaugcuacgacucuucgacuucaacaaacaagccaucagacgucucaaaacugaagcccaaauguccauccaacucauuaacaaagccgucaacgcccuaaucaacgaccaacucauaaugaaaaaucaccuccgagacaucaugggcaucccauacuguaacuacaguaaguacugguaccugaaccacaccguaaccggcaaaaccucccuaccaagaugcuggcucguuuccaacggcuccuaccucaacgaaacccacuucagcgacgacaucgaacagcaggccgacaacaugaucacagaacuccuccaaaaagaauacauggaccgccaagguaaaacaccccucggacucgucgaccucuucgucuucuccaccuccuucuaccuaaucuccaucuuccuucaccucguaaaaaucccgacccaccgccacgucauaggcaagcccugccccaaaccccaccgacuuaaccacaugggcaucugcucuugcggccuauacaaacacccaggcguucccguaaaguggaaacguuaa

SEQ ID NO: 2044 - RNA, 1473 nt, Artificial Sequence
  derived and/or modified protein sequence (opt11) from LASV(ISTH0047-NIG-2011;Clade II)__AIT17412__GPC
augggccaaaucauaaccuucuuccaagaaguuccacacguaaucgaagaaguuaugaacaucguacucaucgcccucucccuccuugccauccuaaaaggcaucuacaacgucgccaccuguggccucuuuggucucgucuccuuccuccuccuuugcggccgcucgugcuccaccaccuacaaaggcgucuacgagcuccaaacccuagagcucgacauggccagucuuaacaugaccaugccccucuccugcaccaaaaacaacucccaccauuacauaauggucggaaacgaaaccggccucgaacucacucucacuaacaccuccauaauaaaccacaaauucugcaaccucuccgacgcccacaaaaaaaaccuauacgaccacgcccuaauguccaucaucuccaccuuccaccuauccauccccaacuucaaccaguacgaggccauguccugcgacuucaacggcggcaaaaucuccguccaauacaaccucucacacgcauacgccgucgacgccgcaaaucacugcgguacaaucgccaacggcguccuacaaaccuucaugcgcauggccuggggaggguccuacaucgcccuggacuccggcaaaggaagcugggacugcaucaugaccuccuaccaauaccucauaauccaaaacaccuccugggaagaccacugccaauucucccgccccucacccaucggauaccugggacuacucucccaacgcacccgcgauaucuacauaagccgccgccuucuuggcacauucaccuggacccucagugacuccgaaggaaacgagacacccggcggauacugucuaacccgauggaugcucaucgaagccgaauuaaaaugcuucggcaacaccgcugucgcaaaaugcaacgaaaaacacgacgaagaauucugcgacaugcuccgccucuucgacuucaacaaacaagccauccgccgccucaaaaccgaagcacaaaugucgauccaacuaauaaacaaagcaguaaacgcccuaaucaacgaccaacucaucaugaaaaaccaccuccgcgacaucaugggcauccccuacugcaacuacuccaaauacugguaccucaaccacaccgucacaggaaaaaccucccuaccccgaugcuggcuagugucaaacggcuccuaccucaacgaaacccacuucuccgacgauaucgaacaacaagcagacaacaugaucaccgaacugcuacaaaaagaauacaucgaccgccaaggcaaaaccccccucggccuagucgaccuauucgucuucuccaccuccuucuaccuaaucuccaucuuccuccaccuagucaaaauccccacccaccgccacgucaucggaaaacccugcccuaaaccccaccgccucaaccacauggguaucugcuccugcggacucuacaaacacccaggcguccccguaaaauggaaacguuag

SEQ ID NO: 2045 - RNA, 1473 nt, Artificial Sequence
  derived and/or modified protein sequence (opt11) from LASV(ISTH0073-NIG-2011;Clade II)__AIT17416__GPC
augggacaaaucauaacauucuuccaagaagucccccacgucaucgaagaaguaaugaacaucguccucaucgcacucucccuccucgccauccucaaaggcaucuacaacgucgcaaccugcggacuauucggccuagucuccuuccuccuccucugcggccgcuccugcaguaccacguacaaaggaguauacgaacuacagacccucgaacuagacauggccucccucaauaugaccaugccccugucauguaccaaaaacaacucccaccacuacaucauggucggcaacgaaaccggacucgaacuaacccuaaccaacaccaguaucauuaaccacaaguucugcaaccucucagacgcccaccgcaaaaaccucuacgaccacgcccucauguccaucaucagcaccuuccaucucagcauacccaacuucaaccaauacgaagccauguccugcgacuucaacgggggaaaaauuagcguccaauacaaccuaucccacgccuacgccgucgacgccgcaaaccacugcggcaccaucgccaacggaguccuccaaacauucaugcgaauggccuggggcggauccuauauugcccuugacucaggaaaaggcuccugggacugcaucaugaccucauaccaauaccucaucauacaaaacaccucaugggaagaccacugccaauucucucgcccaucccccaucggcuaccuaggccuacucucacaacggacccgcgacauuuacaucucccgcaggcuccucggaacguucaccuggacccuuuccgacucugaaggcaacgaaacacccggcggcuacugccucacccgauggaugcuuaucgaagccgaacuaaaaugcuucggcaacaccgcagucgccaaaugcaacgaaaaacacgacgaagaguucugugacaugcuccgccuauucgacuucaacaagcaagccauccgcagacucaaaacugaagcacaaaugucgauccaacucaucaacaaagcuguaaacgcgcucaucaacgaccaacuuaucaugaaaaaccaccuuagagacaucauggggauccccuacugcaacuacuccaaauacugguaccucaaccacaccgucaccggcaaaacaucccuccccagaugcuggcucgucuccaacggcuccuaccucaacgaaacacacuucucagacgacaucgaacaacaagccgacaauaugaucaccgaacuacuccaaaaagaauacauagaccgccaaggcaaaaccccucucggccuagucgaccucuucgucuucagcaccuccuucuaccuaaucuccaucuuccuccaucuugucaaaauccccacccaccgucaugucaucggcaaaccaugccccaaaccacaccgccucaaccacaugggcaucugcuccugcggccuuuacaaacacccuggcguccccgucaaauggaaacgcuaa

SEQ ID NO: 2046 - RNA, 1473 nt, Artificial Sequence
  derived and/or modified protein sequence (opt11) from LASV(ISTH0230-NIG-2011;Clade II)__AIT17420__GPC
augggccaaaucaucaccuucuuccaagaagucccucacgucaucgaagaagucaugaacauagucuuaauugcucucucccuacucgcaauccucaaaggcauauacaacgucgcaacuugcggacucuucggccuaguauccuuccuacuccucugcggacgcuccugcuccacaaccuacaaaggcgucuacgaacuccaaacccuugaacucgacauggccucccuaaacaugaccaugccccucuccugcaccaaaaacaauucccaccacuacaucauggucggcaacgaaaccggccucgaacuuacauuaacaaacacguccaucaucaaccacaaauucugcaaccuguccgaugcccauaagaaaaaccuauacgaccacgcacucauguccaucaucucaaccuuccaccucucaaucccgaacuucaaccaauacgaagcaauguccugcgacuucaacgggggcaaaaucucaguccaauacaaccuuucccacacauacgccguagacgccgccaaccacugcggcaccaucgccaacggaguccuccaaacguucaugcgcauggccuggggcggaucuuacauugcccucgacuccggcaaaggauccugggacugcauaaugaccagcuaccaguaccucaucauccaaaacacuaccugggaagaccacugucaauucucccgacccuccccaaucggauaccugggucuccucucccagcgcacccgagauaucuacaucagccgcagacuacucggcaccuucaccuggacccuaucagacucagaaggcaacgaaacccccggcggcuacugccucacccgcuggaugcucaucgaagcugagcuaaaauguuucggcaacaccgccgucgcaaaaugcaacgaaaaacacgacgaagaguucugcgacaugcuacgccuauucgacuucaacaaacaagccauccgucgacucaaaaccgaagcccagauguccauacaacucaucaauaaagccgucaacgcccucaucaacgaccagcuuauaaugaaaaaccaccuccgcgacaucaugggcaucccauacugcaacuacuccaaauacugguaccucaaccacaccgucaccggaaaaaccucacucccacgcugcuggcuagucucuaacgggucauaccuaaacgaaacccacuucagcgacgacaucgaacagcaagccgacaauaugauaacagaacuccuacagaaagaauauauggaucgccaaggcaaaacuccccuaggccucgucgaccucuucgucuucucuaccagcuucuaccuaauauccaucuuccuccaccucaucaagauacccacccaccgacacaucaccggaaaacccugccccaaaccccaccgccucaaccacaugggaaucugcuccugcggccucuacaaacaccccggaguccccguuaaguggaaacgcuga

SEQ ID NO: 2047 - RNA, 1473 nt, Artificial Sequence
  derived and/or modified protein sequence (opt11) from LASV(ISTH0531-NIG-2011;Clade II)__AIT17424__GPC
augggccaaauaauaaccuucuuccaagaagucccacacguuauagaagaagucaugaauauaguacuaaucgcccucucccuccucgccauucucaaaggcaucuacaauguagccacaugcggcuuauucggccucgucucauuccuacuccugugcggccgcuccugcucaaccacuuacaaaggagucuacgaacuccagacccucgaacucgacaugaccaaccugaacaugaccaugccccuauccugcaccaagaacaacucccaucacuacaucauggucggcaacgaaacaggauuagaacuaacccucacuaacaccuccaucauaaaccacaaauucugcaaccuaucugacgcccacaagaaaaaccucuacaaccacgcacucauguccaucaucucaaccuuccaccuauccaucccaaauuuuaaccaauacgaagccaugucaugcgacuucaacggcggcaaaaucuccguacaauacaaccugagccacgcguacgccguagacgccgcaaaccacugcggcacaaucgccaacggcguccuacaaaccuucaugcgaauggccuggggcggcuccuacaucgcccucgauuccgguaaaggaagcugggacugcaucaugaccucauaccaauaccucaucauccaaaacacaacuugggaggaccacugccaauucucccgccccucuccaaucggcuaccucggacuccucucucaacgaacacgcgauauauacaucucacgucggcuccuaggcaccuucaccuggacacucucugacucagaggguaacgaaacucccggcggauacugccucacccgauggaugcucauagaagccgaacugaaaugcuucggcaacaccgcggucgcgaaaugcaacgaaaaacacgacgaagaguucugcgacaugcuucgccucuucgacuucaauaagcaggccauccgccgccucaaaaccgaagcacaaacaaauauccaacucauaaacaaagcagucaaugcacucaucaacgaucaacucauuaugaaaaaccaccuccgagacaucaugggcauccccuacugcaacuacucaaaauacugguaccucaaccacaccgucaccggcaaaaccucccuaccacgcugcuggcuaguuuccaacggcuccuaucucaacgaaacacacuuuucagacgacaucgaacaacaagccgacaacaugaucaccgaacuccuccaaaaagaauacauggaccgacaaggcaaaacaccacugggccuagucgaccuauucgucuucuccaccagcuucuaccuaaucuccaucuuccuccaccucgucaaaauccccacccaccgccacaucauaggcaaacccugccccaaaccgcaccgccugaaucacaugggcaucugcuccugcggucucuacaaacaccccggcgucccagucaaguggaaaagauaa

SEQ ID NO: 2048 - RNA, 1473 nt, Artificial Sequence
  derived and/or modified protein sequence (opt11) from LASV(ISTH0595-NIG-2011;Clade II)__AIT17428__GPC
augggccaaaucaucaccuucuuccaagaagucccccacgucaucgaagaaguaaugaauaucguccucauagcccucucacuccuagccauccuaaaaggcaucuauaacgucgcgaccuguggccuauucggccucgucucauuccuccuccucugcggcagauccugcuccacuaccuacaaaggaguuuacgaacuacagacccuagaacucgacauggccucccuaaacaugacaaugccccucuccugcaccaaaaauaacagccaccacuacaucaugguaggcaacgaaacuggccuugaauuaacccuaaccaacacgucaaucaucaaccacaaauucuguaaccuaucggacgcccacaagaaaaaccucuacgaccaugcccucauguccaucaucucaacauuucaucucuccaucccgaacuucaaccaauacgaagcuauguccugcgacuucaacggcggcaaaaucucuguacaauacaaucucucccacaccuaugccgucgacgcagcaaaccacugcggcaccaucgccaacggcguccuacaaaccuucaugcggauggcauggggcggcucauacauagcccucgacuccggcaagggcuccugggacugcaucaugacuucauaccaauaccuaaucauccaaaacacgacaugggaagaccacugccaauucucucgccccucccccauuggcuaccuuggccuccucagccaacgaacacgagacauauacaucucccgacgccuccucggcacauucacauggacccucuccgacucagaaggcaacgaaacccccggaggcuacugccuaacccgcuggaugcucaucgccgccgaccuuaaaugcuucggcaauaccgccguagccaaaugcaacgaaaaacacgacgaagaguucugcgacaugcuccgccucuucgacuucaacaaacaagccauagaacgccucaaaaccgaagcacagauguccauacaacuaaucaacaaggcugucaacgcccuuauuaacgaccagcuaaucaugaagaaccaccuccgagacaucaugggcauccccuacugcaacuacucuaaauacugguaucucaaccauaccguaaccggacgcacaucccuaccccgcugcuggcucgucuccaacggauccuaccucaacgaaacccacuucagcgacgacauagaacagcaagccgacaacaugaucacagaacuccuccaaaaagaauacauggaccgccagggaaaaacaccccucggccucguagaccucuuugucuucuccaccuccuucuaccucauauccauuuuccuccaccuaguccgaauaccaacacaccgccacgucaucggcaaaccaugcccaaaaccccaucgccuuaaccacaugggcaucugcuccugcggucuauacaaacaccccggagucccaguaaaauggaaacgcuaa

SEQ ID NO: 2049 - RNA, 1473 nt, Artificial Sequence
  derived and/or modified protein sequence (opt11) from LASV(ISTH0964-NIG-2011;Clade II)__AIT17430__GPC
augggccaaaucaucaccuucuuucaagaagucccccacgucaucgaggaaguaaugaacaucguacucaucgcacuaucccuacuagccauacucaaaggcauauacaacguugccaccuguggacuguucggccuugucagcuuccuucuacugugcggcagaucaugcucaacaaccuacaaaggagucuaugaacuccaaacccuagaacuagacauggccucccuaaacaugaccaugccacucuccugcaccaaaaacaacucccaccacuacaucauggucggcaacgaaaccggccuugaacucacacucacaaacaccucaaucaucaaccacaaauucugcaaccuuuccgacgcccacaaaaagaaccucuacgaccacgcccucauguccauaaucuccacauuucaccucuccaucccaaacuucaaccaauacgaagccauguccugcgacuucaacggcggcagaaucuccguccaauacaaccucagccacaccuacgccgucgacgcagcaaaacacuguggaaccaucgccaacggcguccugcaaacauucaugcgcauggccuggggcggcucauacauagcccucgacuccggcaaaggcuccugggacugcauaaugaccuccuaccaguaccucauaauccagaacacaaccugggaagaccauugccaauucucccgucccuccccaauaggauaccugggccuccuaucccaacgaacccgagacauauacaucucccggcgacuccucggaaccuucaccuggacccucagcgacuccgaaggcaacgaaacccccggcggcuacugccucacaagauggaugcuaaucgaagccgaacucaaaugcuucggcaacaccgccgucgcaaaaugcaacgaaaaacacgaugaagaguucugcgacaugcuccgccuuuucgacuucaacaaacaggccauccgacgccuuaaaaccgaagcccaaaugucaauccaacuaaucaacaaagcaguuaaugcucucaucaacgaccaacuaaucaugaaaaaccaccuacgagacaucaugggaauacccuacugcaacuauagcaaauacugguaucucaaccacacagucacuggcaaaaccucccuaccccggugcuggcuagucuccaacggauccuaccucaacgaaacccauuucagcgacgacauagaacaacaagcagacaacaugaucaccgaauuacuccaaaaagaguacauagaccgccaaggcaaaacuccccucggccuaguagaccucuucguauucuccaccucauuuuaccuaaucucuaucuuccuacaccucguaaaaauacccacccaccgccacgucaucggcaaacccugccccaaaccccaccgccucaaccacaugggcauaugcuccugcggacucuacaagcaccccggcguccccguaaaauggaagcgcuaa

SEQ ID NO: 2050 - RNA, 1473 nt, Artificial Sequence
  derived and/or modified protein sequence (opt11) from LASV(ISTH1038-NIG-2011;Clade II)__AIT17438__GPC
augggucaaaucaucacuuucuuccaagaagugccccacgucauagaagaagucaugaacaucguccucauagcacucucccuccucgccauccuuaaaggaauauacaacguggccacaugcggucucuucggacucgucagcuuccuucugcucugcggacgauccugcucaaccaccuacaaaggcguauacgaacuccaaacacuugaacuagacauggcgaaccuaaacaugacuaugccccucagcugcacuaaaaacaacucccaccacuacauacgcgucggaaaugaaaccggccucgaacucacacuuacaaacacauccaucaucucccauaaauucugcaaccucucagacgcucauaagaaaaaccuuuacgaccacgcccucauguccaucauauccaccuuucaccuaucaauccccaacuucaaccaguacgaagccauguccugcgacuucaacggcggaaaaaucagcguccaauacaaccucucccacacauacgccguagacgccgccaaccacugcggcaccaucgccaacggaguccuccaaacauucaugcgaauggccugggguggaucuuauaucgcucuagacuccggcaaaggcucaugggacugcaucaugaccuccuaccaauacuuaauaauccaaaacaccacaugggaagaccacugccaauucucacgacccuccccaauaggauaccucggccuccuuucccaacgcacccgagacaucuacaucucaagaagacuucucggcacuuucaccuggacacuauccgacucagaaggcaaagaaacuccgggaggauacugccucacucgcuggaugcuaauagaagccgaacucaaaugcuucggcaacaccgccgucgccaaaugcaacgaaaaacacgacgaagaguucugcgacauguuacgccucuucgacuucaacaaacaagcaauacgccgccucaaaacggaagcccaaaugaacauccaacucauaaacaaggcagucaacgcucuaauaaacgaccaacucaucaugaaaaaccaccuccgagacaucaugggaauccccuacugcaacuacagcaaauacugguaccucaaccacacagucaccgguaaaacaucccuaccccgcugcuggcucgucuccaacggcucauaccucaacgaaacucacuucuccgacgacaucgaacaacaagcagacaacaugauaaccgaacuccuucaaaaagaauacauagacagacaaggaaaaacaccccuaggccucgucgaccuguucgucuucuccaccuccuucuaccucaucucaauuuuccuucaccucguaaaaauccccacgcaccgacacgucaucggcaaacccugccccaaaccccaccgccuaaaccaaauggguaucugcuccugcggacucuacaaacaacccggcguucccgucaaauggaaacgcuaa

SEQ ID NO: 2051 - RNA, 1473 nt, Artificial Sequence
  derived and/or modified protein sequence (opt11) from LASV(ISTH1048-NIG-2011;Clade II)__AIT17442__GPC
augggccaaaucaucacauucuuccaagagguaccccaugucauagaagaagucaugaacaucguacucaucgcccugucccuccucgcaauacucaaaggcaucuacaacguagcaaccugcggccucuuuggccuagucuccuuccuacuccucugcggacgcuccugcaguaccaccuacaaaggcguuuacgaacuacaaacacucgaacucgacauggccucacuaaacaugaccaugccacucuccugcaccaaaaacaacagccaccacuacaucauggucggcaacgaaaccggccuagaacucacccucaccaacacuuccaucauuaaccauaaauucugcaaccucucugacgcccaccgcaaaaaccucuacgaccacgcccugaugucaaucaucucaaccuuccaucuuucaauuccaaacuucaaccaguacgaggccauguccugcgacuucaacggagguaaaauauccguccaauacaaccucucccacgccuacgcagucgacgcggccaaccacugcggcaccauagccaacggcguacuacaaaccuucaugcgcauggccuggggaggcuccuacaucgcucucgacagcggcaaagguucaugggacugcaucaugacauccuaccaauacuuaauaauccaaaacacuuccugggaagaccacugccaauucucccgcccguccccaaucgguuaucucggccugcucucucaacgcacacgcgacaucuacaucucccgccggcuccucggcaccuucaccuggacccucagcgauucagaaggcaacgagacacccggcggcuacugccucacccgauggaugcucaucgaagccgaacucaaaugcuucggcaacacagccguugccaaaugcaacgaaaaacacgacgaggaguucugcgacaugcucaggcuauucgacuuuaauaaacaagccauacgccgacuuaaaacugaagcccaaauguccauccaacucaucaacaaagccgucaacgcccucaucaacgaccaacucauaaugaaaaaccaccuccgcgacaucaugggcauccccuacugcaacuacuccaaauacugguaccugaaccacaccgucaccggcaaaaccucacucccccgcugcuggcuagucucaaacggcucuuaccucaacgaaacccacuucuccgacgacauagaacaacaggccgacaauaugauaacagagcuccuccagaaagaauacaucgaccgccaaggcaaaaccccacuaggccucgucgaucucuucguuuucuccaccuccuucuaccucaucuccaucuuccuccaccuagucaaaauccccacccaccgccacgucauaggcaaacccugccccaaaccccaccgcaucaaccacaugggcaucugcuccugcggacuauacaaacaccccggcguccccgucaaauggaaacgcuaa

SEQ ID NO: 2052 - RNA, 1473 nt, Artificial Sequence
  derived and/or modified protein sequence (opt11) from LASV(ISTH1058-NIG-2011;Clade II)__AIT17446__GPC
augggacagaucaucaccuucuuccaagaaguaccccacguuaucgaagaaguaaugaacaucguacucauagcccuaucccuucucgccauccuaaaaggcaucuacaacgucgcaaccugcggacucuuuggacucgucucauuccugcuccuauguggucgcuccugcucaacaacauacaaaggcgucuacgaacugcaaacccucgaacucgacauggccucccuaaacaugacuaugccacucucaugcaccaaaaacaacucccaccauuacaucaugguaggaaacgaaaccggccucgaacuaacccucaccaacaccuccauaaucaaccacaaauucugcaaccucucagacgcccacaaaaagaaccuauacgaccacgcccucauguccaucaucagcaccuuucaccugucaaucccaaacuucaaccaauacgaagccaugucaugcgacuucaacggaggcaaaaucucgguccaauacaaccuaucacacacauacgcagucgacgccgccucccauugcggcaccguagcaaacggaguacuccaaaccuucaugcgcauggccuggggcggcuccuauaucgcccuugacuccggcaaaggcuccugggacugcaucaugacaagcuaccaauaccucauuauccaaaacaccaccugggaagaccacugccaguucagccgccccucccccaucggauaccucggccuccucucacaacgcacccgugacauuuacaucucccgacgccuacucggcaccuucaccuggacccuaucagacuccgaaggcaacgaaacacccggcggcuacugccucacacgcuggaugcuaaucgaagcagaacucaaaugcuucggaaacaccgccgucgcaaaaugcaacgaaaaacacgacgaagaguucugugacauguuacgacucuucgacuucaacaaacaagccauacgccgacucaaaaccgaagcccaaauguccauccagcuaaucaacaaagccgugaacgcccucaucaacgaccaacuaauaaugaaaaaccaccuccgcgacauaaugggaauccccuacugcaacuauuccaaauacugguaccucaaccacaccguaaccggaaaaaccucacucccccgcuguuggcuagucucaaaugggucuuaccucaacgaaacucacuucagcgacgacaucgaacagcaagccgacaacaugaucacagaacuccuccaaaaagaauacauggaccgccagggcaaaaccccacugggccuagucgaccucuucgucuucucuaccuccuucuaccuuaucuccaucuuccuacaucuaguaaaaauaccaacacaccgacacgucaucggcaagcccugccccaaaccacaccgacucaaccauaugggaaucugcucaugcggccucuauaaacacccaggcgucccggucaaauggaaacgcuga

SEQ ID NO: 2053 - RNA, 1473 nt, Artificial Sequence
  derived and/or modified protein sequence (opt11) from LASV(ISTH1064-NIG-2011;Clade II)__AIT17450__GPC
augggacaaaucaucacauucuuccaggaagucccccacgucaucgaggaagucaugaacauaguccucaucgcccucucccuccuagccauccucaaaggcaucuacaaugucgcgaccugcggccucuucggccucguaucauuccuacuccucugcggccgcuccugcucaaccaccuacaaaggcgucuacgaacuccaaacgcuugaacuggauauggccucccucaacaugaccaugccccucucaugcaccaaaaacaacucacaccacuacaucauggucggcaaugaaaccggacucgaacuaacacucacaaacaccucaauaaucaaccacaaauucugcaaccuauccgacgcccacaagaaaaaucucuacgaccacgcccucauguccaucaucuccaccuuucaccucuccaucccaaacuucaaccaauaugaagccaugucaugcgacuucaacgguggcaaaaucuccguccaauauaaccucucccauaccuacgcaguagacgccgcaaaccacugcgguaccaucgccaacggcguccugcaaaccuucaugagaauggccuggggaggcuccuacaucgcccuggacuccggcaaaggauccugggacugcauaaugacuuccuaccaauaccuaaucauccagaacaccacaugggaagaccacugccaguucagccgacccucgcccaucggcuaccucggccuccucucccaaagaacaagggacaucuacauaucccgacgucuccucggcacuuucaccuggacccucuccgacuccgaaggaaacgaaacccccggcggguauugccucacccgcuggaugcuaaucgaggccgaacuuaaaugcuucggaaacacagccguagcaaaaugcaacgaaaaacacgacgaggaguucugcgauaugcuccgccucuucgauuucaacaaacaagccauacgccgccuuaagacagaagcacaaaugucaauccagcucaucaacaaagccgucaacgcccucaucaacgaccaacucaucaugaaaaaccaccuccgcgacauuauggggaucccuuacugcaacuacuccaaauacugguaccucaaccacacagucaccggcaaaaccucacucccccgaugcuggcucguauccaacggaucauaccucaacgaaacccacuucucggacgacaucgaacaacaagccgacaacaugauuacggaacuccuccaaaaggaauacauagaccgacaaggcaaaacaccccuaggccuagucgaccucuucgucuucagcaccucuuucuaccucaucucaauauuccuccaccucgucaaaauaccgacccacaggcacauaauaggcaaaccaugccccaaaccacaccgccuaaaccacaugggaauaugcuccugcggacucuacaaacaccccggcguucccguaaaauggaaacgauaa

SEQ ID NO: 2054 - RNA, 1473 nt, Artificial Sequence
  derived and/or modified protein sequence (opt11) from LASV(ISTH1069-NIG-2011;Clade II)__AIT17454__GPC
augggacaaaucaucacauucuuccaagaagucccacacgucauagaagaagucaugaacauaguccucaucgcauuuucccuccuggccauucucaaaggcaucuacaacgucgccacaugcggccucuucggccucgucuccuuccuccuccugugcggacgcuccugcucuaccacauacaaaggcgucuacgagcuacaaacgcuggaacucgauauggccucccucaacaugaccaugccucuauccugcaccaaaaacaacucccaccacuacaucauggucggaaacgaaaccggacucgaacucacccucacaaacacauccaucauaaaccauaaauucugcaaccuauccgacgcacacaaacggaaccucuacgaccacgcccucaugagcauaaucuccacauuccaccucuccauccccaacuucaaccaguacgaagccauguccugcgacuucaacgguggcaaaauauccguccaauacaaccucucacacaccuacgccguagacgccgccggccacugcggcaccaucgccaacggaguccuccaaaccuucaugcgaauggccuggggcggauccuacaucgcgcuagacuccggcaagggcagcugggacugcaucaugaccucauaccaauaccuaauaauacaaaacacaacuugggaagaccacugccaauucagccgaccaucccccauagguuaccuaggacuucucucccaacgcacccgcgacaucuacaucucccgccgacuccucggcaccuucaccuggacccucucugacagcgaaggcaacgaaaccccaggcggguacugccucacccgcuggaugcuaaucgaagccgaacuaaaaugcuucggcaacaccgccgucgccaaaugcaacgaaaaacaugacgaagaguucugcgacaugcuccgccuguucgacuucaacaaacaagccauacgccgucucaaaaccgaagcccaaauguccauccaacucaucaauaaagccgugaacgcccucaucaacgaccaacugaucaugaaaaaccaccuuagagacaucaugggaauccccuacugcaacuacuccaaauacugguaccuuaaccacaccaucacuggcaagaccucacuuccacgcugcuggcucgucagcaacggcucauaccucaacgaaacccacuucucugacgacaucgagcaacaagccgauaacaugaucaccgagcuccuucaaaaagaauacauggaccggcaaggcaaaacaccccucggccuagucgaccucuucgucuucucaaccagcuucuaccucaucuccaucuuccuccaccucgucaaaauccccacccaccgacacaucaucggcaaacccugcccaaagccccaccgccugaaccacaugggaauaugcuccugcggccuauacaaacaccccggcgucccaguacgauggaaacgcuaa

SEQ ID NO: 2055 - RNA, 1473 nt, Artificial Sequence
  derived and/or modified protein sequence (opt11) from LASV(ISTH1096-NIG-2012;Clade II)__AIT17458__GPC
augggccaaaucaucacuuucuuccaagaagugccccacgucaucgaagaagucaugaauaucguucucaucgcacuuucacuccucgccauacuaaaagguaucuacaacguugcaaccugcggccucuucggccucguuagcuuccuacuccucugcggccgcuccugcucaacaacauacaagggcguauacgagcuccaaacccucgaacuagacauggccagccugaacaugaccaugccccucucaugcaccaaaaacaacucccaccacuacaucauggucggcaacgagaccggccucgaacucacccuaacaaacaccuccaucaucaaccacaaauucugcaaccucuccgaugcucacaagaaaaaucucuacgaccacgcccucaugucuaucaucucaaccuuccaccuguccaucccaaacuucaaccaauacgaagccaugagcugugacuucaacgggggcaaaaucuccguccaauacaaccucucucacacuuacgccaucgacgccgccaaccacugcggcaccaucgccaacggaguccuccaaaccuucaugcgcauggccuggggcgguuccuacaucgcccucgacuccgguaaaggcucaugggacuguaucaugaccacauaccaauaccuuaucauccaaaacaccaccugggaagaccacugccaauuuucccgccccucaccaaucggauaccucggacuucucucacagcgcacccgagacaucuacaucucccgccgccuccucggcacauucaccuggacacuuuccgacucagaaggcaacgaaaccccuggcggcuauugccucacucgcuggaugcucaucgaagcagaacucaaaugcuucggaaacaccgccguagcaaaaugcaacgaaaaacacgacgaagaguucugcgacaugcuucgccuguucgacuuuaacaagcaagccauucgccgccuaaagacagaagcccagauguccauccaacucaucaacaaggccgucaaugcccuaauaaacgaccaacucauaaugaaaaaccaccuccgugacaucaugggcauccccuacugcaacuacagcaaguacugguaccucaaccacaccgucacuggcaaaaccucccuaccccgaugcuggcucgucuccaacggcuccuaccucaacgaaacacacuucuccgaugacaucgaacaacaagccgacaacaugauaaccgaacuccuccaaaaggaauacauggaccgccaaggcaaaacaccccuuggccucgucgaccuauuugucuucucaaccucauucuaccucauuucgauauuccuccaccuagucaaaauccccacacaccgccacgucaucggcaaacccugccccaagccacaccgccuaaaccacaugggcaucugcuccugcggccuauacaaacaccccggcgucccugucaaauggaaacgauaa

SEQ ID NO: 2056 - RNA, 1473 nt, Artificial Sequence
  derived and/or modified protein sequence (opt11) from LASV(ISTH1107-NIG-2012;Clade II)__AIT17462__GPC
augggccaaaucauuaccuuuuuccaagaaguaccacacguaaucgaagaagucaugaacaucguccuaaucgcacucucccuccuagccauccucaagggaaucuacaacgucgccaccuguggacucuucgggcucgucuccuuccuccuacucugcggacgcaguugcucaacaacauauaaaggugucuacgaacuccaaacccucgaacucgacauggccucccucaacaugaccaugccccucuccugcaccaaaaacaacucccaccacuauauaaugguaggaaacgaaacaggccucgaacucacacuaaccaacaccuccaucauaaaccacaaauucuguaaccucuccgacgcccacaagaaaaaccuauaugaccacgcccucaugucaauaaucucuaccuuccaccuuagcauaccaaacuuuaaccaguacgaagccaugucaugcgacuucaacggcggaaaaaucagcguacaauacaaccuaucacacgcguacgccguggacgcggccaaccacugcggcaccaucgccaacggcgucuuacaaaccuucaugcgcauggccuggggcggcuccuauaucgcccucgacuccggcaaagguuccugggacugcaucaugacuucauaccaauaccucaucauccaaaacaccacaugggaggaccacugccaauucuccagacccucacccaucggcuaccuaggccuccuaagccaacgcacccgcgacaucuacauaucccgccgccugcucggcaccuucacauggacccugagcgacagcgaaggcaacgagaccccuggcggcuacugccucacacgcuggaugcuuaucgaagccgaacuaaaaugcuucggaaacaccgccgucgcaaaaugcaacgaaaaacacgacgaagaguucugcgacaugcuacgucuauucgacuucaacaaacaggccauccggcgucucaaaacagaagcacaaauguccauccaacucaucaacaaagcagucaacgcccucaucaacgaccagcucaucaugaaaaaccacuuacgagacauaaugggcaucccauacugcaacuauagcaaauacugguaccucaaccacaccgucacuggcaaaacaucccuacccaaaugcuggcucgucuccaacggaucuuaccucaacgaaacccacuucuccgacgacauagaacaacaagcugacaacaugaucaccgaacuccuccaaaaagaauacauagaccgucaaggcaaaacaccccucggccuagucgaccucuucguguuuucaaccuccuucuaccuaaucucaauauuccuccaucucgucaaaauacccacccaccgacacgucaucggcaaacccugcccuaaaccccaccgacucaaccacaugggcauaugcuccugcggccucuacaaacacccaggcguccccgucaaauggaaacgcuga

SEQ ID NO: 2057 - RNA, 1473 nt, Artificial Sequence
  derived and/or modified protein sequence (opt11) from LASV(ISTH1111-NIG-2011;Clade II)__AIT17466__GPC
augggucaaaucaucaccuucuuccaagaagucccccaagucaucgaagaggucaugaacaucguccuaaucgcccuuucgcuccucgccauccucaaaggcaucuacaacguagccacaugcggccucuucggacuugucucguuccuccuacucugcggucgauccugcucaacaaccuacaaaggcguuuacgaacuccaaacucucgaacuagacauggccucacucaacaugaccaugccacucucuugcaccaagaacaacucccaccacuacauaauggucggcaaugaaacaggccucgaacuaacccuaaccaaccaauccaucaucaaccacaaauucugcaaccuuuccgacgcucacaagaaaaaccucuaugaccacgcccuaaugucgaucaucuccacauuccaccuauccauccccaacuucaaccaauacgaagccaugagcugcgacuucaacggcggcaaaauaagcguacaguacaaccucucgcacaccuucgcagucgacgcagcgaaccacugcgguacaaucgccaacgguguccuacaaaccuucaugcgcauggccuggggcggcuccuacaucgcccuagacuccggacgaggcucaugggacugcaucaugaccuccuaccaauaccuuaucauccaaaacaccaccugggaagaccacugccaauucucacgaccaucacccaucggcuaccucggccuccuaucccaacguacacgagacaucuacaucucacgccgucuacucggcacauucacauggacccuuagcgacuccgaaggcaacgaaacaccuggcggcuacugccucacgcgcuggaugcuaaucgaagccgagcucaaaugcuucggcaacaccgcagucgcaaaaugcaacgagaagcacgacgaagaguucugcgacaugcuccgacucuucgacuucaacaaacaagcaauacgacgccuaaaaacagaagcccaaauguccauccaacucaucaacaaagccgucaacgcccuaaucaacgaccagcugauuaugaaaaaucaccuacgagauaucauggguaucccauacugcaacuacucaaaauacugguaucuaaaccacaccauaacaggaaaaaccucacucccccgcugcuggcucguuuccaacggcuccuaccucaacgaaacccacuuuucagacgacaucgaacaacaagcugauaauaugaucaccgaacuccuccagaaagaauacauggacagacaaggcaaaacaccccucggccuuguugaccucuucgucuucucuaccagcuucuaccuaaucuccaucuuccuccaccuugucaagauccccacccaccgacacgucaucgguaaacccugcccuaaaccccaccgacucaaccacaugggcauaugcucaugcggacucuacaaacaccccggcguccccgucaaauggaagcgcuaa

SEQ ID NO: 2058 - RNA, 1473 nt, Artificial Sequence
  derived and/or modified protein sequence (opt11) from LASV(ISTH1121-NIG-2012;Clade II)__AIT17470__GPC
augggccaaaucaucaccuuuuuccaagaggucccucacgucaucgaagaagucaugaacauaguucuuaucgcccuaucacuacucgcaauccuuaagggcaucuauaacgucgcaaccugcggacucuucggucucgucuccuuccuccuccucugcggccgcucgugcucaacuaccuacaaaggcguauacgaacuccaaacccucgaacucgacauggccucccucaauaugacuaugccacucucaugcacgaaaaacaacucccaccacuacauaauggucggaaacgagaccggccucgaacucacccucacaaacaccucaaucauaaaccacaaguucugcaaccucuccgacgcccaccgcaaaaaccuauacgaccacgcacuuaugucuauuaucuccaccuuucaccucucuauccccaacuuuaaccaauacgaggccaugucaugcgacuucaacggcggcaaaauaucuguacaauacaaccucucccacacuuacgccgucgacgcagcuaaccacugcggaaccaucgccaacggcguacuccaaaccuuuaugcgcauggccuggggcggcuccuacaucgcacucgacuccggcaaaggcucuugggacugcauuaugacauccuaccaauaccucaucauccaaaauaccacaugggaagaccacugccaauucucccgacccuccccgauuggcuaccucggacugcuaucccaacgcacucgcgacaucuacauaucacgacgccuccucgguaccuucaccuggacacuaucagacuccgaaggcaacgaaaccccaggcggcuacugccuaacccgcuggaugcuaauugaagccgaacucaaaugcuucggcaacacagccgucgccaaaugcaacgaaaaacacgacgaagaguucugcgacaugcuuagacucuucgauuucaauaaacaagcaauccggcgccucaaaaccgaagcccaaaugucaauacaacucaucaacaaggccgucaacgcccuaauaaacgaccaacucaucaugaaaaaccaccuacgagacaucaugggcauccccuacugcaacuacucaaaauacugguaccucaaccacacagucacgggcaagaccagccucccccgcugcuggcuagucucgaauggcagcuaccuaaacgaaacccacuucuccgacgacaucgaacaacaagccgacaacaugaucaccgaacuauuacaaaaagaauacaucgaccggcaaggaaaaacaccccucggccucgucgaccucuucgucuucuccaccuccuuuuaccucaucagcauauuccuccaccucgucaaaauacccacccaccgucacgucaucggcaaacccugccccaagccccaccgacuaaaucacaugggcaucugcuccugcggccuauacaagcacccaggcguccccgucaaauggaaacgcuaa

SEQ ID NO: 2059 - RNA, 1473 nt, Artificial Sequence
  derived and/or modified protein sequence (opt11) from LASV(ISTH1129-NIG-2012;Clade II)__AIT17474__GPC
augggccagaucaucacuuucuuucaagaagucccccacguaaucgaagaaguaaugaacaucguacuaauugcccucucacuccuagcaauccuuaaaggcauauacaacguagcaaccugcggccuauucggccucguuagcuuccuucuccucugcggacguuccugcucaaccaccuacaaaggcguauacgaacuacaaacacucgaacucgacauggccucccucaacaugaccaugccucucucaugcaccaaaaacaacucccaccacuacauaauggucggcaacgaaaccggccuggaacucacccucacaaacaccucuaucauaaaccacaaauucugcaaccucuccgacgcccacaagaaaaaccuauacgaccacgcccucauguccauaauaagcacauuccaccucucaauccccaacuucaaccaauacgaagccauguccugcgacuucaacggcggcaaaauuucgauacaauacaaucucucacauacauacgccgucgacgccgccaaccacugcggcacaaucgcaaacggaguccuccaaacauucaugcgcauggcauggggcggcuccuacauagcacucgauuccggaaaaggauccugggacugcaucaugaccucauaccaauaccuaaucauccagaacaccaccugggaagaccacugccaauucucccgcccaucccccaucggcuaccucggucuccucucacaacgaacccgcgacaucuacaucucacggcgccuccucggcaccuucacauggacacucucagauuccgaaggcaacgaaacacccggcggauacugccuaacccguuggaugcucaucgaagcugagcucaaaugcuucggaaauacagcgguggccaaaugcaacgaaaaacaugacgaggaguucugcgacaugcuacgccucuuugacuucaacaaacaagccaucagacgccucaaaaccgaagcacaaauguccauccaacucauaaacaaagcagucaaugcccugaucaacgaccagcucaucaugaaaaaccaccuccgagacaucaugggcauccccuacugcaacuacucaaaauacugguaccucaaccacaccaucacaggcaaaaccagccucccccgcugcuggcucgucucaaacggcuccuaccucaacgaaacccacuucuccgacgacaucgaacaacaagccgacaacaugaucacagaacuacuccaaaaggaauacaucgaccgccagggcaaaacaccccucggccucguagaccucuucguauucucgaccuccuucuaccucaucuccaucuuucuacaccuaguaaaaauccccacccaccgacacaucaccgggaaaccaugcccaaaaccccaccgccucaaccauaugggcaucuguuccuguggacuauacaagcacccaggcguccccguccgcuggaaacgauga

SEQ ID NO: 2060 - RNA, 1473 nt, Artificial Sequence
  derived and/or modified protein sequence (opt11) from LASV(ISTH1137-NIG-2011;Clade II)__AIT17478__GPC
augggccaaaucaucacauucuuucaagaaguaccccacguaaucgaagaagucaugaacaucguacuaauagcacucucacuacucgccauacucaaaggcaucuacaacgucgcuaccugcggccuuuucggccucgucuccuuccuccuacuuugcggccguagcugcucaaccaccuauaaaggugucuacgaacuccaaacacucgaacucgacauggccucucucaacaugaccaugccucucucaugcaccaaaaacaacucccaccacuacaucauggucggcaacgaaacaggacucgaacucacacucaccaacaccucuaucaucaaccacaaauucugcaaccucucugacgcccacaagaaaaaccuauacgaccacgcccucauguccauaauuucaaccuuccaccuaucaaucccuaacuucaaccaauacgaagccauguccugcgacuucaacggaggcaaaauauccguccaauacaaccucagccacacauacgccguagacgcagcagaccacugcggcacaaucgccaacggaguccuacaaacauucaugcgaauggccuggggcggcucguacauugcccucgacucaggcaaaggcagcugggacugcaucaugaccucuuaccaauaccucaucauccaaaacaccacaugggaagaccacugccaauucucacgaccuagcccaauaggcuaccucggccuccucucccagcguacucgcgacaucuacaucucccggcgacuccucggaacauucaccuggacccuauccgacuccgaaggcaacgagaccccuggcgguuacugccucacccgcuggaugcucauagaagccgagcucaaaugcuucgggaacacagccguggccaaaugcaacgaaaaacacgaugaagaguucugcgacaugcuccgccuauuugacuucaacaaacaggcgaucagccgccuaaaaacagaagcccaaaugagcauccagcuuauaaacaaagcggucaacgcccucaucaacgaccaacucauaaugaaaaaccaccuacgcgacauaaugggcauccccuacugcaacuacuccaaauacugguaccucaaccacaccgucaccggcaagaccucacucccccgcugcuggcucguauccaaugguuccuaccucaacgaaacccacuucuccgacgacaucgaacaacaagccgacaacaugauaaccgaaaugcuucaaaaagaauacaucgaccgucaaggaaaaacgccccucggacucgucgaccucuuugucuucucaaccucuuucuaccucauauccaucuuccuacaucucgucaaaauccccacacacagacacgucaucggcaaacccugucccaaaccccaccgucucaaccacaugggcaucugcucaugcggcuuauacaaacaccccggcgucccuguaaaauggaaacgcuaa

SEQ ID NO: 2061 - RNA, 1473 nt, Artificial Sequence
  derived and/or modified protein sequence (opt11) from LASV(ISTH2010-NIG-2012;Clade II)__AIT17482__GPC
augggccaaaucaucaccuucuuccaagaagucccacacgucauagaagaaguaaugaacaucguccuaauugcucucucacuacucgcgauccucaaagguaucuacaacgucgcaaccugcggacuguuuggacucguaucauuccuccuccugugcggccgcagcugcucaaccacauacaaaggcguauacgaacuacaaacccucgaacucgacauggccagccucaacaugacaaugccccucagcugcaccaaaaauaacagccaccacuacaucauggucggcaacgaaaccggccuugaacucacccucacaaacaccucaaucauaaaccacaaauucugcaaccucagcgacgcccacaagaaaaaccuauacgaccaugcacuaauguccaucauaagcaccuuccaccucuccauacccaacuucaaccaguacgaggccaugucaugcgauuucaacggaggcaaaaucuccguccaauacaaccuaagccacgccuacgcagucgacgccgccaaccacugcggcaccauagcaaacggcguccuucaaaccuucaugcgaauggccuggggcggcucauacaucgcccuagacucaggcaaaggcuccugggacugcauaaugacaucauaccaauaucucaucauccaaaacauaacaugggaagaccacugccaauucucccguccaucgccaaucggauaccucggccuccuaucacaacgaacucgcgacaucuacauaucccgccgucuccuaggaacauucaccuggacacucagcgacuccgaaggaaacgaaacccccggcggcuacugccucacgcgcuggaugcugaucgaagcagaacucaaaugcuucggcaacacugccgucgccaaaugcaacgaaaaacacgacgaagaguucugcgacaugcuacgacucuucgacuucaacaaacaagccauccgucgccucaaaaccgaagcccaaaugucgauccaacucaucaacaaggcaguaaacgcccuaaucaacgaccaacucauaaugaagaaccaccuacgcgauaucaugggcauacccuacugcaacuacuccaaguacugguaccucaaccacaccgucacaggcaaaaccucccucccccgaugcuggcuagucuccaacggcucuuaucuaaacgaaacccacuucuccgacgacauagaacaacaagccgauaacaugauuaccgaacuccuacaaaaagaauacaucgaccgccaaggcaagaccccacucggacucgucgaccuauucgucuucucaaccucguucuaccucauuucuauauuccuccaccuaguaaaaauccccacacaccgccaugucgucggcaaacccugccccaaaccccaccgccuaaaccacaugggaauaugcagcugcggccucuacaaacaccccggcguacccgugaaauggaaacgauag

SEQ ID NO: 2062 - RNA, 1473 nt, Artificial Sequence
  derived and/or modified protein sequence (opt11) from LASV(ISTH2016-NIG-2012;Clade II)__AIT17486__GPC
augggccaaaucaucaccuucuuccaagaaguuccccacgucauagaggaagugaugaacaucguccucaucgcucuuucacuacuagcaauacuaaaagguaucuacaacgucgcaaccugcggacuauucggacucguuucuuuucugcuccuaugcggccgcuccugcuccaccaccuacaaaggcgucuacgaacuacagacacucgaacucgacauggcaagccucaacaugaccaugccccuuuccugcacgaaaaacaacucccaccacuacaucaugguaggcaaugaaacaggccucgagcucacacucaccaacaccuccauaaucaaccacaaauucugcaaccuauccgacgcacacaagaaaaaccucuacgaccacgcccucaugucaauuaucuccaccuuccaccucuccauccccaacuucaaccaauacgaagccauguccugcgacuucaacgguggcaaaaucucaguccaauacaaccuaucccacaccuacgccgucgacgcagcaaaccauugcggaaccaucgcaaacggcguccuccaaacauucaugcgcauggcauggggaggcuccuacaucgcccucgacucgggaaaaggcuccugggacugcaucaugaccagcuaccaauaccugaucauccaaaacaccacaugggaagaccacugccaauucagccgccccucacccguaggauaccuaggacuguuaucacagcgcacucgcgacauauacaucucgcgcagacugcucggaaccuucaccuggacccuauccgacuccgaagguaacgaaacaccaggaggcuacugccucacccgcuggaugcuuaucgaagcagaacucaagugcuucgguaacaccgccguagccaaauguaacgaaaaacacgacgaagaguucugcgacaugcuacgccucuucgacuucaacaaacaagccaucagacgacuaaaaaccgaagcccaaaugucaauccaacugaucaauaaagccguaaacgcccuaaucaacgaccaacucaucaugaaaaaccaccuucgcgacaucaugggcaucccauacugcaacuacuccaaauauugguaccucaaccacacuguaaccggcaaaaccucacuuccccgcugcuggcucgucuccaacggcucauaccucaacgaaacccacuucuccgacgacaucgaacaacaagccgacaacaugauaaccgaacuccuccaaaaagaauacauagaccgccaaggaaaaaccccacuaggccucguagaccucuucgucuucuccacauccuucuaccucaucagcaucuuccuacaccucguaaagauccccacccaucgccacguaaucggcaaacccugccccaaaccccaccgacucaaccauaugggcaucugcuccugcggccucuacaaacaccccggcgucccagucaaauggaaacgguaa

SEQ ID NO: 2063 - RNA, 1473 nt, Artificial Sequence
  derived and/or modified protein sequence (opt11) from LASV(ISTH2020-NIG-2012;Clade II)__AIT17490__GPC
augggucaaauaaucaccuucuuccaagaagucccccacguuaucgaagaagucaugaacaucguacuaauuacacucucucuacucgccaucuuaaagggcaucuacaacgucgcaaccugcggacuauucggccucgucuccuuccuacuucucugcgggcgcagcuguagcaccaccuacaaaggcgucuacgaacuacagacccucgaacuggacauggccaaccuaaacaugacuaugccacucucaugcaccaaaaacaacucacaccacuacaucauggucgguaacgagaccggucuugaacuaacccucacaaacacaucaaucauaaaccacaaauucugcaacuuauccgacgcccacaagaaaaaucuguacgaccacgccuuaaugucaauuaucuccacauuccaccucagcauaccaaacuucaaccaauacgaagccauguccugcgacuucaacggcggcaaaaucuccguccaauacaaccuaucccacacauucgccgucgacgcagccaaccacugcggaaccaucgcaaacggcguacuacaaacauucaugagaauggccuggggcgguucauacaucgcccucgacuccgggaaaggcagcugggacugcaucaugaccuccuaccaauaccuaauuauccaaaacacaaccugggaagaccacugccaauucucccgcccaucaccaaucggcuaccucggcuuacucucacagcgcacacgcgacauauacauaucccgccgacuacucggcaccuucaccuggacccucuccgacuccgaaggcaacgagacacccggaggauacugccucacccgcuggaugcucauagaagccgaacucaaaugcuucggcaacaccgcagucgccaaaugcaacgaaaaacacgacgaagaguucugcgacaugcuucgucucuucgacuucaacaaacaggccauccgucgccucaaaaccgaagcacaaauguccauccaacucaucaacaaagcagucaacgcacucauaaacgaccaacuaaucaugaaaaaccaccuccgcgacauaaugggaauccccuacugcaacuacuccaaauacugguaccuaaaccacaccguaaccggcaaaaccucccucccccgaugcugguuagucuccaacggcuccuaccucaacgaaacucauuucuccgacgacaucgaacaacaagccgacaacaugaucaccgaacuccuacaaaaagaauacauggacagacaaggcaaaaccccacucggccuaguagaccucuucguauucuccaccucauucuaccucaucucaauauuccuacaccucguaaaaaucccuacgcaccgccacauaaucggcaaacccugccccaaaccucaccgccucaaccacaugggcauaugcuccugcggccucuacaaacaucccggcguccccgugaaauggaaacgcuga

SEQ ID NO: 2064 - RNA, 1473 nt, Artificial Sequence
  derived and/or modified protein sequence (opt11) from LASV(ISTH2025-NIG-2012;Clade II)__AIT17494__GPC
augggccaaaucaucaccuucuuccaagaagucccacacguaaucgaggaagucaugaacauaguacucaucgcacuaucacuccucgcaauccucaaaggcgucuauaacgucgcaaccuguggccuauucggccuagucuccuuccuccuccucugcggccgcagcugcuccaccauauacaaaggcguauacgaacuccaaacacucgaacucgacauggcaucacucaauaugaccaugccacucuccugcaccaaaaacaacucacaccacuacaucauggucgggaacgaaacaggccucgaacucacccugaccaacacauccaucauaaaccacaaauucugcaaccucagcgaugcgcacaagaaaaaccucuacgaccacgcccucaugucaauaauauccaccuuccaccucuccauccccaacuucaaccaauacgaagccauguccugcgacuucaacggaggcaaaauauccguccaguauaaccugucccacacauacgccgucgacgcagccaaucacugcgguacaaucgcuaacggcguacuccaaaccuuuaugcgcauggcauggggcggcuccuacaucgcucuugacuccggaaaaggcuccugggacugcauuaugaccagcuaccaguaccuaaucauccaaaacaccuccugggaagaccacugccaauucucccgccccucccccaucggcuaccucggccuccuaucacaacgcacccgagacaucuacaucucccgccgccugcucggaaccuucacauggacccuuuccgacuccgaaggcaacgaaacucccggaggcuacugccucacccgauggaugcucaucgaagcagaacugaaaugcuucggaaacaccgcaguugccaaaugcaacgaaaaacacgacgaagaguucugcgacaugcuccgacuuuucgacuucaacaaacaagccauccgccgccucaaaaccgaagcacaaaugucaauccaacucaucaacaaagccguuaacgcccucaucaacgaccaacucauaaugaaaaaccaccuucgcgacauaaugggcaucccuuacugcaacuacuccaaauacugguaccucaaccacacagugaccggcaaaaccucccuaccacgcuguuggcuagucucaaacggcuccuaucucaacgaaacccacuucuccgacgacaucgaacaacaagccgacaacaugaucaccgaacuccuccaaaaagaauacaucgaccgccagggaaaaaccccacucggccuaguagaucucuucgucuucuccaccagcuucuaucucaucuccauauuccuccaccucguaaaaauccccacccaccgacacgucaucggcaaacccugcccuaaaccccaccgccugaaccacaugggaaucugcuccugcggccucuacaagcaccccggcgugcccguuaaauggaaacguuaa

SEQ ID NO: 2065 - RNA, 1473 nt, Artificial Sequence
  derived and/or modified protein sequence (opt11) from LASV(ISTH2031-NIG-2012;Clade II)__AIT17498__GPC
augggccaaauaauaacauucuuccaagaaguuccucauguaaucgaggaagucaugaauaucguccucaucgcccucucccuccucgccauccucaagggaaucuacaacgucgcuaccugcggucucuucggccucgucucauuccuccuccuuugcggccgcuccugcuccaccaccuacaaaggcgucuacgaacuccagacccucgaacucgacauggccucacugaacaugacaaugccccucuccuguaccaaaaacaacucgcaccauuacaucauggucggaaacgagaccggacucgaacuaacacuaaccaacaccucaaucauuaaccacaaauucugcaaccucuccgacgcccacaagaaaaaccuauacgaccacgcccucauguccauaaucuccaccuuccaccuuagcauccccaacuucaaccaguacgaagccauguccugcgacuucaacggcggaaaaauauccguucaauacaaccuaucccacaccuacgccguagacgcugccaaccacugcggcacuaucgccaacggaguccuccagacauucaugcgcauggcauggggcggcuccuacauagcucucgacuccggaaaaggcaacugggacugcaucaugaccucauaccaauaccuaaucauacaaaacacaaccugggaagaccacugucaauucucccgccccucaccaaucggauaucuuggccuccuaucucaacgaacccgagacaucuacaucagccggaggcuacuaggaacguucacauggacccucuccgacuccgaaggcaacgaaacccccggaggcuacugccucacacgcuggaugcucaucgaaaccgaacucaaaugcuucggcaacaccgccguagccaaauguaacgaaaaacacgacgaagaguucugcgacaugcuccgacucuucgacuucaacaaacaagccaucucccgccuacgcuccgaagcccaaaugucaauccaacuaauaaacaaagcaguaaacgcccucaucaacgaccagcugaucaugaagaaccaccuccgcgacaucaugggcauccccuacugcaacuacucaaaauacugguaccucaaccacacagucaccggaaaaaccucccucccgaaaugcuggcuaguuuccaacggcuccuaccuaaacgaaacacacuucuccgacgacaucgaacaacaggccgacaacaugauaaccgaaaugcuacagaaagaauacaucgaccgccaaggcaaaaccccgcuaggucuaguagaccucuucgucuucuccaccagcuucuaccucaucagcauauuccuacaucucgucaaaauccccacacaccgacauauaaccggcaaacccugccccaaaccccaccgccuaaaccacaugggaauaugcuccuguggccuuuacaaacacccaggcgucccaguaaaauggaaacgcuaa

SEQ ID NO: 2066 - RNA, 1473 nt, Artificial Sequence
  derived and/or modified protein sequence (opt11) from LASV(ISTH2037-NIG-2012;Clade II)__AIT17502__GPC
augggucaaaucaucaccuucuuccaagaaaucccucacgucauagaagaagucaugaacaucguacucaucacccugucucuccuagccauccuaaaaggcaucuacaacgucgcuacaugcggccucuucggccucgucuccuuucuucugcucugcgguaaaucaugcucaaccaccuauaaaggaguauacgaacuccaaacccuugaacucgacauggccucccuuaacaugaccaugccccucuccugcaccaaaaauaacucccaccacuacauaauggucggcaacgaaaccggccucgaacuaacccucaccaauacuucaaucaucaaccauaaauucugcaaccuauccgacgcccaccgcaaaaaccucuacgaccacacccucaugucaaucauuucaaccuuccaccucuccaucccuaacuucaaccaguacgaggcaaugucuugcgacuucaacggcggcaagauauccguacaauacaaccucucccacgccuaugccauagaugccgccacacacugcggaacuaucgcuaacggaguccuacaaaccuucaugagaauggccuggggcggaucauacaucgcccucgacuccgguaaaggcggcugggacugcauaaugacuuccuaccaauaccucaucauccaaaauacuacuugggaagaccacugccaauucagccgccccucacccaucggcuaccuaggccuccucucccaacgaacccgcgacauauacaucucccggcgacuacucggaaccuuuaccuggacccucuccgacuccgaaggcaacgaaacccccggcggcuauugccucacacgcuggaugcuaaucgaagccgaacucaaaugcuucggcaacacugccgucgccaaaugcaacgaaaaacacgacgaagaguucugugacaugcuccgccucuucgacuucaauaaacaagcaauccgacgacucaaaacagaagcacaaauguccauccaacucaucaacaaagccgucaacgcccucauaaaugaccaacuuaucaugcguaaccaccuccgcgacaucaugggcauccccuacugcaacuacuccaaauacugguaccuaaaccacaccgucacaggcaaaaccucccucccaaaaugcuggcuugucucaaacggcuccuaccucaacgaaacucacuucuccgacgacaucgaacaacaagccgacaacaugaucaccgaacuccuccaaaaagaauacauggaccgccaaggaaaaacuccccucggccucgucgaccucuucgucuucuccaccuccuucuaccuaaucuccaucuuccuccaccugguaaaaauccccacccaccgccacgucaucggcaaacccugccccaagccacaccgccucaaccacaugggugucugcuccuguggccucuacaaacaccccggcgucccagucaaauggaaacgcuaa

SEQ ID NO: 2067 - RNA, 1473 nt, Artificial Sequence
  derived and/or modified protein sequence (opt11) from LASV(ISTH2042-NIG-2012;Clade II)__AIT17506__GPC
augggccaaaucauaaccuucuuccaagaagucccccacgucauugaagaagucaugaacaucguccuaaucgcccucucccuccucgccauacuaaaaggcaucuacaacgucgcaaccugcggacucuucggccucguauccuuccuacuccuaugcggccgcuccugcuccaccacuuacaaaggcgucuacgaacuacaaacucuagaauuagauauggccucccuaaacaugaccaugccccucuccugcaccaaaaauaauucccaccauuacaucauggucggcaacgaaacaggccuagaacucacccucaccaacacauccaucaucaaccacaaauucugcaaucucucugacgcccacaaaaagaaccuauacgaccacgcgcucauguccaucaucuccaccuuccaccucucuaucccaaacuucaaucaauacgaagccauguccugcgacuucaacgguggcaaaaucuccguccaauacaaccucagccacgccuacgccgucgacgccgccgaacacugcgguaccaucgccaacggaguucuacaaaccuucaugagaauggccuggggcggcuccuacaucgcccuggacagcggcaaagguucuugggauugugucaugaccucauaccaauaccugauuauccaaaacaccacuugggaagaccacugccaauucucccgacccucccccauuggcuaccucggccuccucucccaacguacaagagacauuuauaucucacgccgccuacucggcacguucaccuggacacucagcgacuccgaaggcaacgaaacccccggcggauacugccuuacccgcuggaugcucaucgaagccgaacuuaaaugcuucggcaacaccgccgucgccaaaugcaacgaaaaacacgacgaagaauuuugcgacauguuacgccuguucgacuucaacaaacaagccaucgaacgacuuaaaaccgaagcccaaauguccauccaacucaucaacaaagcagucaacgcccuaaucaacgaccaacucaucaugaaaaaccaccuccgagacaucaugggcauacccuacugcaacuacucaaaauacugguaccucaaccacaccgucacuggcaaaaccucucucccccgaugcuggcucguuucaaacggcuccuaucucaacgaaacccacuucuccgacgacaucgaacaacaagccgacaacaugaucaccgaaaugcuccaaaaagaauacaucgaccgccagggcaagacaccccucggccucgucgaccuguucgucuucuccaccuccuucuaccuaauuuccaucuuccuccaccucgucaagauacccacccaccgccacgucaucggaaagcccugccccaaaccacaccgccuaaaccacaugggcaucugcucaugcggccucuacaaacaucccggcguccccguaaaauggaaacgcuga

SEQ ID NO: 2068 - RNA, 1473 nt, Artificial Sequence
  derived and/or modified protein sequence (opt11) from LASV(ISTH2046-NIG-2012;Clade II)__AIT17510__GPC
augggccaaaucauuaccuucuuccaagaagucccccacgucauagaagaaguaaugaacaucguccucaucgcccucucccuccucgccauccucaaaggaaucuacaacguagccacaugcggacuauucggccucgucuccuuccuauuacucugcggcagaagcugcuccacaaccuacaaagggguuuacgaacuacaaacccucgaacucgacauggccucccuaaacaugaccaugccccucagcugcaccaaaaacaacucccaccacuacaucaugguuggcaaugaaacagggcuagaacuuacacuaacaaacaccagcaucauaaaccacaaauucugcaaucuuuccgacgcccacaagaaaaaccuauacgaccacgcccucaugagcaucaucuccacauuccaccucuccauccccaacuucaaccaauacgaagccauguccugcgacuucaacggcggcaaaaucucaguccaauacaaccucucccacaccuacgccguagacgccgccaaccacugcggcaccauagcuaacggcguccuccaaacuuucaugcgcauggccuggggcggcucauacaucgcccucgacuccggcaaaggaucuugggauugcaucaugaccagcuaccaauaucuuaucauccagaacaccaccugggaagaccacugucaauucagccgaccaucaccaauaggauaccucggacuccucucccaacgaacuaaagauauauacaucagccgccgccuacuaggaaccuucaccuggacacucuccgacuccgaaggcaacgaaacacccggcggcuacugccucaccagauggaugcucaucgaagcugaacucaagugcuucggcaacaccgccgucgccaaaugcaacgaaaaacacgacgaggaguucugcgacaugcuccgucucuucgacuucaacaaacaggccauccgacgacugaaaacugaagcucaaaugucuauccaacucaucaacaaagccgucaacgcccuaaucaacgaccaacucauaaugaagaaccaccuacgcgacaucaugggaauccccuacugcaacuacagcaaguacugguaccuaaaucacacugucaccgguaaaacuagccucccccgcugcuggcucgucaguaacgguucauaccucaacgaaacucacuucuccgacgacauagaacaacaggccgacaacaugaucaccgaacugcuacaaaaagaauacauagaccgccaaggaaaaaccccacuaggccuaguagaccucuucguauucuccacauccuucuaccucaucuccauauuccuccaucucguaaaaauaccaacccaccgucacgucaucggcaaaccuugccccaaaccccaccgccucaaccacaugggaauaugcucaugcggucuauacaaacaccccggcgucccagucaaauggaaacgcuaa

SEQ ID NO: 2069 - RNA, 1473 nt, Artificial Sequence
  derived and/or modified protein sequence (opt11) from LASV(ISTH2050-NIG-2012;Clade II)__AIT17514__GPC
augggccaaauuauaaccuucuuccaagaagucccccaugucaucgaagaagugaugaacaucguccucaucgcacucucccuccucgcuguccuuaagggcaucuacaacgucgcaaccugcggccucuucggccucgucucuuuccuacuacuaugcggccgcagcugcuccaccaccuacaaaggaguuuacgaacuccaaacucucgaacucgacauggccucccucaacaugacaaugccacuaucauguaccaaaaacaacucccaccacuacaucaugguaggcaacgaaaccggccucgaacucacccucacaaacaccuccaucaucaaccacaaauucugcaaccucuccgacgcccacaagaaaaaccucuacgaccacgcccucaugagcauaaucuccaccuuccaccucucaauacccaacuucaaccaauacgaagccauguccugcgacuucaacggcgguaaaauuuccguccaauacaaccuaagccacacuuacgccguagacgcagccaaccacugcggaacgauagcuaacggcguacuucaaaccuucaugcgcauggccuggggcggcucauauaucgcccucgacuccggcaaaggcuccugggacugcaucaugaccucauaccaguaccuuaucauccaaaacaccaccugggaagaccacugccaauucucccgacccucccccaucggcuacuuaggacugcucucccaacgcacccgcgacaucuacaucucccgccgacuccuuggcacauuuaccuggacacucuccgacucggaaggaaacgaaacccccggcggguauugccucacucgauggaugcucaucgaagccgaacuaaaaugcuucggcaacaccgccgucgccaagugcaacgaaaaacacgacgaagaguucugcgacaugcucagacucuucgacuucaacaaacaagccaucagacgccucaaaaccgaagcccaaauguccauccaacucauaaacaaagccguaaacgcccucaucaacgaccaacucaucaugaaaaaccaccuccgcgacaucaugggcauaccauacugcaacuacucaaaauacugguaccuaaaccacaccgucaccggcaagaccucccuuccccgcugcuggcucgucucaaacggauccuaccuaaacgaaacacacuucucagacgacaucgaacaacaagccgacaacaugauaacagaauuacuccaaaaagaauacauagaccgacaaggcaaaacaccccucggccucguagaccuuuuugucuuuuccaccagcuucuaccucauuucuaucuuccugcaccucgucaaaauccccacccacagacacgucauaggcaaaccauguccaaaaccccaccgccucaaccacaugggcaucugcuccugcggacucuaccgucaccccgggguacccgucaaauggaaacgauaa

SEQ ID NO: 2070 - RNA, 1473 nt, Artificial Sequence
  derived and/or modified protein sequence (opt11) from LASV(ISTH2057-NIG-2012;Clade II)__AIT17518__GPC
augggccaaauuauuacauucuuccaagaagucccacacgucaucgaagaagucaugaacauaguacucaucgcccucucccuccuagcaauccucaaaggcaucuacaacgucgcaacuugcggacuuuucggacucgucagcuuccuccuacuaugcggccgauccugcuccaccaccuacaagggcgucuacgaacuacaaacccucgaacucgacauggccucccucaacaugacaaugccccucucgugcaccaaaaacaacucacaccacuacaucauggucggcaacgagacaggacucgaacucacccucacaaauaccucaaucaucaaccacaaauucugcaaccuauccgacgcccauaagaaaaaccucuacgaccacgcacucaugucuaucauuuccaccuuucaccucucaauccccaacuucaaccaauacgaagccaugucuugcgacuucaacggcggcaaaauauccguccaauacaaccuaucacaugccuacgccguagacgcagccaaccacugcggaaccaucgccaacggaguccuacaaacuuuuaugcgcauggccuggggcggcagcuacauagcccuagacagcggcaaaggcuccugggacuguaucaugaccuccuaccaauaucucaucauccaaaacaccacaugggaagaccacugccaauucucccgcccgucacccaucggcuaccucggccuccuaagccaacgaacacgcgauaucuacaucucccggcgacuccucggcaccuucaccuggacacucagcgacuccgaaggcaaugagaccccagguggauacugccuaacccgcuggaugcucauugaagccgagcucaaaugcuucggcaacaccgccgucgccaaaugcaacgaaaaacacgacgaagaguucugcgacaugcuacgacucuucgacuucaacaaacaagccauccgccgccucaagacagaagcccaaaugagcauacaacuaaucaacaaggcagucaaugcccucauaaacgaccaacuuaucaugaaaaaccaccuacgcgacaucaugggcauccccuacugcaacuacucuaaauauugguaccuaaaccacacagucaccggcaaaacaucacucccgagaugcuggcuagucucaaacggcucauaccuaaacgaaacccauuucucagacgacaucgaacagcaagccgacaacaugaucaccgaacugcuccagaaagaauacauggaccgccaaggcaaaaccccacucggccucgucgaccucuucgucuucucaaccucuuucuaccugaucuccauauuccuccaccucgugaagauacccacccaccgacacgucaucggaaaacccugccccaaaccucaccggcuaaaccacaugggaauaugcuccugcggacucuauaagcaucccggcguccccguaaaauggaaacgcuaa

SEQ ID NO: 2071 - RNA, 1473 nt, Artificial Sequence
  derived and/or modified protein sequence (opt11) from LASV(ISTH2064-NIG-2012;Clade II)__AIT17524__GPC
augggacaaaucaucaccuucuuccaagaagucccccacguaaucgaagaagugaugaacauaguccucaucgcccugagccuacuugcaauccuaaaagguaucuacaacguagcaaccugcggacucuucggacucgucucguuccuccuucucugcggccgcagcugcucaaccaccuacaagggcgucuacgaacuacagacucucgaacucgacauggccucccuaaacaugacaaugccccucucaugcaccaaaaacaacucccaucacuacauaauggucggaaacgaaaccggacuugaacucacccucaccaacaccuccaucaucaaccacaaguucugcaaccuauccgacgcccacaagaaaaaccucuacgaccacgcccuuauguccaucaucucuaccuuccaccuuuccauaccaaacuuuaaccaauacgaagccauguccugcgacuucaacggaggcaaaaucuccguccaauacaaccucucccacaccuacgccaucgacgccgccaaccacugcggcaccaucgccaacggcgugcuucaaaccuucaugcgaauggccuggggcggauccuacaucgcccucgacucuggcaaaggauccugggacugcauaaugaccuccuaccaauaccucauaauccaaaacaccacaugggaagaccacugccaauucucccgucccucccccaucggcuaucucggccuccucucccaacgcacccgcgacauauacaucagccgccgacuccuuggaaccuucaccuggacccucagcgauuccgaaggcaacgagaccccaggcggcuacugccuaacccgcuggaugcucaucgaagccgaacucaaaugcuucggaaacacagccgucgcuaaaugcaacgaaaaacacgacgaagaauuuugcgacaugcuacgccucuucgacuucaacaaacaagccauacgccgccuaaaaaccgaagcccaaaugucuauccaacuuaucaacaaagcaguaaacgcacucaucaacgaccaacucauaaugaaaaaccaccuccgcgacaucaugggcauccccuacugcaacuacagcaaauacugguaccuaaaucacaccguaaccgggaaaaccucgcucccccgcugcuggcucguaucuaacgguuccuaccucaaugaaacccacuucucugacgacaucgaacaacaagcagacaacaugaucacugaaaugcuacaaaaggaguacauggacagacaaggcaagacaccccucggucuaguggaccucuucgucuucuccaccucauucuaccugaucucaaucuuucuacaccucgucaaaaucccaacucacagacacgucaucggaaaaccuugccccaaaccccaccgccucaaccauaugggcauaugcuccugcggccuauacaaacaccccggcgucccagucaaauggaaacgauaa

SEQ ID NO: 2072 - RNA, 1473 nt, Artificial Sequence
  derived and/or modified protein sequence (opt11) from LASV(ISTH2065-NIG-2012;Clade II)__AIT17528__GPC
augggccaaaucaucacauucuuccaagaaguuccucacgucauagaagaaguaaugaacaucguucucaucgcacuuucccuacucgccaugcucaaaggcaucuacaacaucgcaaccugcggccuguucggccucaucuccuuccuccuucucugcggacgcucaugcucaaccacauacaaaggcgucuacgaacuacaagcccucgaacucgauauggccaaucucaacaugacaaugccccuauccugcaccaaaaacaacagccaccacuacaucauggucggaaacgaaacaggacucgaacucacccucaccaacacauccauaaucaaccacaaauucugcaaccuaucagacgcacacaagaaaaaccucuacgaccacgcccugaugagcaucaucuccaccuuccaccuauccaucccuaacuucaaccaauacgaagccaugucaugcgauuucaacggcggcaaaaucuccguccaguacaaccuaucccacaccuacgcaggcgacgccgccaaacauugcggcaccauagccaauggcguacuccaaacauucaugcgaauggccuggggcggcucuuacaucgcccuagacuccgggaaaggcaacugggacugcaucaugaccuccuaccaauaccucaucauccaaaacacaaccugggaagaccacugccaauucucccgucccucacccaucggcuaccuuggacuccuuucucaacgaacccgugacauauauaucucacgucgacuucucggaacauucaccuggacacucuccgacuccgaaggcaacgaaacccccggaggauacugccuaacccgcuggaugcucaucgaagccgaacuuaaaugcuucggaaacaccgcagucgccaagugcaacgaaaaacacgacgaagaauuuugcgacaugcuccgauuauucgacuucaacaaacaggcgauccgccgacucaagaccgaggcccaaauguccauccaacucauuaacaaggccgucaacgcucucaucaacgaccaacuaaucaugaaaaaccaccucagagacaucaugggaauccccuacugcaacuacuccaaauacugguaccuaaaccacagcgucaccggccgcaccucccucccccgaugcuggcucguuuccaacgguuccuaucucaacgaaacccaauucuccgacgacauagaacaacaggccgauaacaugaucacugagaugcuacaaaaggaauacaucgaccgccaaggcaaaacaccacucggccucgucgaccuauucgucuucucuacaucauucuaccuaauuuccauauuccugcaccucaucaaaauccccacccaccgccacaucguaggaaagcccugcccaaaaccccaccgacuuaaucacaugggaaucugcucgugcggccucuacaaacaccccggcauacccgucaaauggaaacgcuaa

SEQ ID NO: 2073 - RNA, 1473 nt, Artificial Sequence
  derived and/or modified protein sequence (opt11) from LASV(ISTH2094-NIG-2012;Clade II)__AIT17538__GPC
augggacaaaucaucaccuucuuccaagaagucccccaugucaucgaagaagucaugaacauuguccucaucgcccucucacucuuagcaauccucaaagguaucuacaacaucgcaaccugcggccucuucggccucaucuccuuccuccuccucugcggccgcagcugcucaaccaccuacaaaggagucuacgaacuccaaacccuagaacucgacauggccaaccuaaauaugacaaugccccucuccugcaccaagaacaacucacaccacuacaucaugguaggcaacgaaaccggacucgaacuaacacuaaccaacaccuccauaaucaaccacaaauuuugcaaccucuccgacgcccacaagaaaaaucucuacgaucacgcccuaauguccaucaucuccaccuuccaccucucaauaccgaacuucaaccaauacgaagccaugagcugcgacuucaacgaaggcaaaaucuccguccaauacaaccuaucccacuccuacgccaucgacgccgcaggccacugcggcacaaucgcgaacggaguacuccaaacauucaugcgcauggccuggggcggcuccuacaucgcccucgacuccggcaaaggcaacugggacugcaucaugacuagcuaccaauaccuuaucauacagaacaccaccugggaagaccacugccaauucucacgccccucaccuaucggcuaccucggccuccugucccaacgcacacgcgauaucuacaucucccgacgccuucucggaaccuuuacuuggacccuauccgacucggagggcaacgaagcucccggaggcuacugccuaacccgauggaugcucauagaagcugaacucaaaugcuucggcaacacagccaucgccaaaugcaacgaaaaacacgacgaagaguucugcgacaugcugcgccucuucgacuucaauaaacaagccaucaaacgucuaaaagcugaagcccaaaugucaauucaccucaucaacaaagcggucaacgcccuaaucaacgaccaacuaaucaugaaaaaccaucuuagagauaucauggguauccccuacugcaacuacuccaaauacugguaccucaaccacacagugaccggaaaaacaucacuccccaaaugcuggcucguuuccaauggcaguuaccucaacgaaacccacuucuccgacgacauagaacaacaagcagacaacaugauuaccgaacuccuccaaaaagaauauauggaccggcaaggaaagacaccccucggucucgucgaccucuucguuuucagcaccuccuucuaccucaucagcaucuuccuacaccucgucaaaauccccacccaccgccacaucgucggccgccccugccccaaaccacaccgccuaaaccauaugggcaucugcucuugcggccucuacaaacaccccggcguccccguuaaauggaaacgcuaa

SEQ ID NO: 2074 - RNA, 1473 nt, Artificial Sequence
  derived and/or modified protein sequence (opt11) from LASV(ISTH2129-NIG-2012;Clade II)__AIT17544__GPC
augggacaaaucauuaccuucuuccaagaagucccucacgucauagaggaagucaugaacaucguccucauagcccucucccuccuagccauccucaaaggcaucuacaacgucgcaaccugcggccucuucggccucgucuccuuccuccuacucugcggccgaucuugcuccaccaccuacaaaggagucuacgaacuccaaacccucgaacucgacaugggcucacucaacaugacaaugccccucucuugcaccaaaaacaacucgcaccacuacaucauggucggaaacgaaacaggccucgaguuaaccuuaaccaacaccuccaucaucaaccacaaguucugcaaccucuccgacgcccacaagaaaaaccucuacgaccacgccuuaauguccaucaucucaaccuuccaccucuccauccccaacuucaaucaauacgaagccauguccugcgacuucaacggcggaaaaauauccguacaauauaaccuuucccacuccuacgccgucgacgccgcuaaccacugcggaaccaucgcaaacgguguccugcaaaccuucaugcguauggcauggggcggaagcuacauugcucucgacagcggaaagggcucuugggacugcaucaugaccagcuaccaguaccuaaucauccaaaacacuacuugggaagaucacugccaauucucccgacccucccccaucggcuaccuaggccuacucucacaacgaacacgagacauauacaucuccagaagacuacugggcacauucacguggacccuuuccgauuccgagggcaacgagaccccggguggcuacugccucacccgcuggaugcuaaucgaagccgaacuaaaaugcuucggaaacaccgccguagccaaaugcaacgaaaaacacgacgaagaguucugcgacaugcuccgccuauucgacuucaacaaacaagccauccgccgccucaaaaccgaagcacaaaugucaauccagcucaucaacaaagccgucaacgcccuaauaaacgaccaacuuaucaugaaaaaccaccuacgagauaucaugggaauccccuacugcaacuacucuaaauacugguaccucaaccacaccgucaccggaaaaaccucucucccacgcugcuggcucguuucaaacggcuccuaccuaaacgaaacgcacuucuccgacgacauagaacaacaagccgacaacaugauaaccgaacuacuucaaaaagaauacauggaccgccaaggcaaaacuccccucgggcucgucgaccucuucgucuucuccaccuccuucuaccucaucucaauauuucuacacuuggucaaaaucccaacccaccgucacauaauuggaaaaccaugccccaaaccucaccgacuaaaccacaugggcaucugcuccugcggccucuacaaacaccccggcguccccgucaaauggaaacgauaa

SEQ ID NO: 2075 - RNA, 1473 nt, Artificial Sequence
  derived and/or modified protein sequence (opt11) from LASV(ISTH2217-NIG-2012;Clade II)__AIT17548__GPC
augggacagaucaucacauucuuccaagaaguaccacauguaauagaagaagucaugaacaucguccucaucgcccucucacucuuagcaauccucaaaggcaucuacaacguagcaaccugcggccuauucggcuuagugagcuuccucuuccucugcggucgcucuuguuccaccaccuacaaaggcgucuacgaacuccaaacacuagaacucgacauggccucccuaaacaugacaaugccccucuccugcaccaaaaauaacucacaccacuacauaauggucggaaacgaaacaggccucgaacucacacucacaaacaccuccaucaucaaccacaaauucugcaaccuuucagacgcccacaagcgcaaccuuuacgaccacgcacugauguccaucauuuccaccuuccaccucagcauccccaacuuuaaccaauacgaagcaaugucuugcgacuucaacggcggaaaaaucuccguacaguauaaccucucacacgccuacgccggcgacgccgccaaacacugcggcaccauagcaaacggcguccugcaaaccuucaugcgaauggcauggggaggcuccuacaucgcccucgacucgggcaaaggcucaugggacugcauaaugacuucuuaccaguacuuaaucauacaaaauaccaccugggaagaccacugccaauucucccgacccucacccaucgguuaccucggccuccucucccagcguacacgcgacaucuacaucagccgccgacuccuaggaaccuucacauggacacucucagauucggaaggcaacgaaaccccaggcggcuacugccucacccgguggaugcucaucgaagccgaacuaaaaugcuucggcaacaccgccgucgcgaaaugcaacgaaaaacacgaugaagaguucugcgacaugcuccgccucuucgacuucaacaaacaagcgauccgaagacuccgcacggaagcacaaaugucgauccaacucaucaacaaagcagucaacgcccuuauuaacgaccaacucaucaugaaaaaccacuuacgagacaucaugggcauccccuacugcaacuacucuaaauacugguaccuaaaccacaccgucaccggcaagaccucccuacccaagugcuggcuagucagcaacggauccuaccucaacgaaacccacuuuucugacgacauugaacaacaagccgacaacaugauaacagaaauguuacaaaaagaauacaucgaccgacaaggcaaaaccccacucggccucguagaccuauucguauucucaaccuccuucuaccucauaagcaucuuccuccaccucguaaaaauccccacccaccgccacgucauuggcaaacccugcccaaagccccaccgucucaaccauaugggcauaugcucaugcggccuguacaaacaccccggcguccccgucaaauggaaacgauaa

SEQ ID NO: 2076 - RNA, 1473 nt, Artificial Sequence
  derived and/or modified protein sequence (opt11) from LASV(ISTH2271-NIG-2012;Clade II)__AIT17552__GPC
augggccaaauaaucaccuuuuuccaagaagucccacacgucaucgaagaggucaugaacaucguucugaucgcccucucccuacuugccauccucaaaggcauauacaacguggccacaugcggacucuucggucucgucuccuuccuucuacucugcggccgcucaugcucaaccacauacaaaggcguauacgaacuacagacccucgaacuggauauggccucccucaacaugacaaugccucucuccugcaccaaaaacaacucccaccacuacaucauggucggaaacgaaaccggccuagaacucacccucaccaacaccagcaucaucaaccacaaauucugcaaccuaucagacgcucacaaaaaaaaccucuacgaucacgcccuaaugucuaucaucucuaccuuucaccuguccauaccaaacuucaaccaauacgaagccauguccugcgacuucaacggcggcaaaauauccguacaauacaaccucucccacgcauacgccgucaacgccgcaaaccacugcgguacaauagccaacggaguccuccaaacauucaugcgcauggccuggggaggcucauauaucgcccucgacucaggcaaaggcuccugggacugcaucaugaccucuuaccaauaccucauaauccaaaacaccacaugggaagaccacugccaauucucacgccccucacccaucggcuaccucggcuuacucucccaacgaaccagagacaucuacaucucccgccgacuccucggcaccuucaccuggacccucuccgacuccgaaggcaacgaaacccccggcggcuacugccuaacacgcuggauguuaaucgaagccgaacuaaaaugcuucggcaauacagccguagcaaaaugcaacgaaaaacacgaugaagaauucugcgacaugcucagacucuucgacuucaacaaacaagccauacgcagacucaaaaccgaagcccagauguccauacaacucaucaacaaagcagucaacgcacuaaucaaugaccaacuaaucaugaaaaaccaccugcgcgacauaaugggaauccccuacugcaacuacagcaaauacugguaccucaaccacacagucaccggcaaaaccagccuaccucgcugcuggcucgucucaaacggcuccuaccuaaacgagacacacuucuccgaugacaucgaacaacaagccgacaacaugaucaccgaacuacuccagaaagaauacauggaccgccaaggaaaaacccccuuaggccuagucgaccucuucgucuucucuaccagcuucuaccucauuuccaucuuucuccaccuagucaagauccccacccacagacacguaaucggcaaacccugccccaaaccccaccgccucaaccacauggggaucugcuccugcggacucuacaaacaccccggaguaccaguaaaauggaaaaaauag

SEQ ID NO: 2077 - RNA, 1473 nt, Artificial Sequence
  derived and/or modified protein sequence (opt11) from LASV(ISTH2304-NIG-2012;Clade II)__AIT17556__GPC
augggccaaaucauaaccuucuuccaagaaguaccccacgucaucgaagaagucaugaacaucguacucaucgcccuuucacuccucgccauacuaaagggaaucuacaacgucgcaaccugcggccuguucggccucguauccuuccuccuccucuguggccguucauguucuacaaccuacaaaggcgucuacgaacuacaaacucuagaacucgacauggccucccucaacaugacgaugccucuauccugcaccaaaaacaacagccaccacuacaucauggucggaaacgaaaccggacucgaacuaacacucacaaacaccucaaucauaaaccacaaauuuugcaaccuaucagacgcccacaagaaaaaccucuacgaccacgcccuaauguccaucauaucaaccuuucaccucuccauccccaacuucaaccaauacgaagccaugucgugcgacuucaacggcggcaaaaucucaguccaauacaaccucucccacacuuaugccgucgacgccgcuaaccauugcggcacuaucgccaacggcguccuacaaaccuucaugcguauggccugggguggauccuacauagcacucgacucaggccgcggcuccugggacuguaucaugaccucauaccaauaccucauuauccagaacaccacaugggaggaccacugccaguucucccgcccaagcccuaucggcuaucucggacuacuaucccaacguacccgcgacauauacaucucccgccgccuccuaggcacauucaccuggacgcuuuccgacagcgaaggcaacgaaaccccaggcggauacugccucacccgcuggaugcucauagaagcagaacugaaaugcuucggaaacacugccgucgccaaaugcaacgagaaacacgacgaagaguucugcgacaugcuccgacucuucgacuucaacaaacaggccauccgccgccuaaaaacagaagcacaaaugucaauccagcuaauaaacaaagcagucaacgcacucaucaacgaccaacucaucaugaagaaccaccuccgcgacaucaugggcauccccuacugcaacuacuccaaauacugguaucucaaccacacaaucaccggcaaaaccucccucccccgcugcuggcucgucuccaacggguccuaccucaacgaaacccacuucuccgacgacauagaacagcaagcagacaacaugaucaccgaacuacuucaaaaggaauauaucgaccgccaaggaaaaacaccccuaggccucguagaucucuucgucuucucaaccucuuucuaccucauauccaucuuccuccaccucgucaaaauccccacccaccgacacaucaccggaaaacccugccccaaaccacaccgccucaaccacaugggcaucugcagcugcggccucuacaagcaccccggcguccccguacgcuggaaacguuaa

SEQ ID NO: 2078 - RNA, 1473 nt, Artificial Sequence
  derived and/or modified protein sequence (opt11) from LASV(ISTH2312-NIG-2012;Clade II)__AIT17560__GPC
augggacaaaucaucacauucuuccaagaaguaccccacguaaucgaggaagucaugaacaucguccuaaucgcccucucccuccuagccguccuaaaaggcaucuacaacgucgcaaccugcggccucuucggccugguauccuuccuccuccucugcggccgcucuugcagcaccacauacaaaggagucuacgaacuccaaacccucgaacucgacauggcaucccuuaacaugaccaugccccucucaugcaccacaaacaacucccaccacuacaucaugguuggaaacgaaaccggacuagaacucacccuaaccaauacauccauaaucaaccacaaauucugcaaccucucagacgcacacaaaaagaaccucuacgaccacgcccucauguccaucaucucuacauuccaccugagcauccccaauuucaaccaauacgaagccauguccugcgacuucaacggaggcaaaauauccguccaauacaaccucucccaugccuacgcaggcgaagcagccaaccacuguggcaccaucgccaacgggguccuacaaacauucaugcgcauggccuggggcggcuccuacaucgcccucgauuccggcaaaggcucaugggacugcaucaugaccuccuacaaguaccuaauaauccaaaacacuaccuggggcgaccacugccaauucucccgccccucuccaaucggauaccucggccugcucucccagcgcacccgcgacaucuacaucucccgucgcuuacucggaacauucacauggacccuaucagauuccgaaggcaacgaaacccccggcggcuacugccucacacgcuggaugcucaucgaagccgaacuaaaaugcuucggcaacaccgccguugccaaaugcaacgaaaagcacgacgaagaguucugcgacaugcuacgccucuucgacuucaacaaacaagcaauacguaaacucaaaaccgaagcccaaaugagcauacagcuaaucaacaaagccgucaacgcccucaucaacgaccaacucauaaugaaaaaccaccuacgcgacaucaugggcauacccuacugcaacuacucacguuacugguaccucaaccacacagucaccggccgcacaucacuaccccgcugcuggcuggucucaaacggauccuaccuuaacgaaacccacuucucagacgacauagaacaacaagccgacaacaugaucaccgaacugcuccagaaagaauacaucgaucgccaaggcaagacgccccucggccuaguugaccucuucgucuucuccaccuccuucuaccuaauuuccaucuuccuacaccucguaaaaauccccacccaccgacacaucauaggaaaacccugcccaaaaccccaccgccucaaucacauggggaucugcuccugcggccucuacaaacaccccggcguccccgucaaauggaaacgauaa

SEQ ID NO: 2079 - RNA, 1473 nt, Artificial Sequence
  derived and/or modified protein sequence (opt11) from LASV(ISTH2316-NIG-2012;Clade II)__AIT17564__GPC
augggccaaaucaucaccuucuuucaagaagucccacaugucaucgaggaagucaugaacauaguccuuaucgcacuaucccuacuagccauccuaaaggguaucuacaacguugcgaccugcggccucuucggucuacucuccuuccuccuccuaugcggccgauccugcucuacaaccuacaagggcguauacgaacugcaaacccucgaacucgacauggccucacucaacaugaccaugccacucuccugcacaaagaacaacagccaccacuauaucauggucggaaaugagacaggucucgaacucacccuaacaaacaccucaauaaucaaccacaaguucugcaaccuuucagacgcccacaagaaagaccucuaugaccacgcacucaugucaaucaucucaaccuuucaucucucaauccccaacuucaaccaauaugaagccauguccugcgacuucaacggcggcaaaauaucaguccaauacaaccucucacacgcauacgcagucgacgccgccaaacacugcggcaccaucgccaacgggguucuccagacauucaugcguauggcuuggggaggcuccuacaucgcccucgacuccggcaaaggcuccugggacugcauaaugacauccuaccaauaccuaauaauccaaaacaccagcugggaagaccacugccaguucucccgccccucucccaucggcuaccucggacuacucucccaacgaacacgugacauauacaucucacgccgccuacuaggcaccuucaccuggacacucucagacuccgaaggaaacgagacccccggcggauacugccucacccgcuggaugcucaucgaagccgaacucaaaugcuucggaaacaccgcagucgcaaaaugcaacgaaaaacacgacgaagaguucugcgacaugcuccgcuuauucgacuucaacaaacaagcaaucaaacgacuuaaaaccgaagcccaaaugucaauccaacuaauaaauaaagccguaaacgcacuaauaaacgaccaacucaucaugaaaaaccaccuccgcgacaucaugggcauccccuacugcaacuacuccaaauacugguaccuaaaccacaccgucaccggcaaaaccucccuaccucgaugcuggcucgucuccaacggauccuaccucaacgaaacccacuucuccgacgacaucgaacaacaagccgauaacaugauaaccgaacuccuccaaaaagaguauaucgaccgccaaggcaaaaccccacuagggcucgucgaccucuucgucuucuccaccagcuucuaccuaauauccaucuuccuccaucucgucaaaaucccgacccaccgacacgucaucggaaaacccuguccaaaaccccaccgacucaaccacaugggaaucugcucuugcggccuguacaaacaccccggaguacccgucaaauggaaacgauaa

SEQ ID NO: 2080 - RNA, 1473 nt, Artificial Sequence
  derived and/or modified protein sequence (opt11) from LASV(ISTH2358-NIG-2012;Clade II)__AIT17572__GPC
augggccaaaucaucaccuucuuccaagaagucccucacgucaucgaagaagucaugaacaucguccucaucgcccucucccuccuugccauacucaaaggcaucuacaacgucgccacaugcggccucuucggacucgucuccuuccuacuccuaugcggacgcuccuguucaaccaccuacaagggcgucuacgaacuccaaacccuagaacucgacauggcuaaccuaaacaugaccaugccccucucaugcaccaaaaacaacucacaccacuacauuauggucgguaacgaaaccggccucgaacuaacccuaacaaacaccagcauaaucaaccacaaauucugcaaccuauccgacgcacauaagaaaaaucucuacgaccacgcccuuauguccaucaucuccaccuuccaccucucaauccccaacuuuaaccaauacgaagccaugagcugcgauuucaacggaggcaaaaucucaguccaauacaaccucagccacaauuacgcagucgacgccgccaaccacugcggcacgauagccaacggcguccuacagaccuucaugcgaauggccuggggaggaucauacaucgcccuagacucaggcaaaggcaacugggacugcauaaugacuucguaccaguaccucauaauccagaacaccaccugggaagaccacugccaauucucccgccccucccccaucggauaccucggccuccuuagccagcgcacccgcgacaucuacaucucccgccgucuacucggcacguucacuuggacccuguccgacucagaaggcaacgacaugccgggcggauauugccuaacccgauggaugcuaauagaagcggaacucaaaugcuucggcaacacagccguagccaaauguaacgaaaaacacgacgaagaguucugcgacaugcuccgccucuucgacuucaacaaacaagcaauccgccgucucaaaacagaggcacaaaugaacauccaacucaucaacaaagccgucaacgcccucauaaaugaucaacucauaaugaaaaaccaccuaagagacaucaugggaauccccuacugcaacuacagcaaauacugguaccuuaaucacacagucacaggcaaaaccucccuaccccgaugcuggcucguaucaaacggcucguaccucaaugaaacccacuucucagacgacaucgaacaacaagccgacaacaugauaaccgaacuccuccaaaaagaauacauggaccgucaaggcaaaacaccccucggucuaguagaccucuucguuuucuccacaucauucuaccuaauauccaucuuccuccaccucgucaaaaucccuacccaccgccacaucauuggaaagcccuguccaaaaccccaccgccuaaaccacaugggaaucugcuccugcggccuguacaaacacccaggcguacccgucaaauggaaacgcuaa

SEQ ID NO: 2081 - RNA, 1473 nt, Artificial Sequence
  derived and/or modified protein sequence (opt11) from LASV(ISTH2376-NIG-2012;Clade II)__AIT17576__GPC
augggucaaaucauaaccuucuuccaagaagucccccacgucaucgaggaagucaugaacaucguucuaaucgcccucucccuccucgccauacucaaaggcaucuacaacgucgccacaugcggacucuucggcuuggucuccuuccuacuccucuguggccgcucaugcuccaccaccuacaagggcguauacgaacuacaaacccucgaacuagacauggccucccugaacaugaccaugccauuaucaugcaccaaaaacaacagccaccacuacaucauggucggaaacgagaccggccuggaacucacccugacgaacacauccauaaucaaccacaaauucugcaaccucuccgacgcccacaagaaaaaccuauacgaccacgcacucaugucaaucauauccaccuuccaccucuccauccccaacuucaaccaauaugaagcaauguccugcgacuucaacggcggcaaaaucuccguccaguacaaccucucccacaccuacgccguagacgccgccaaccacugcggcaccaucgcaaacgguguccuacaaaccuucaugcgcauggccuggggaggcuccuacaucgcccucgacagcggcaaaggcaacugggacugcaucaugaccuccuaccaauaccucauaauccaaaacaccacaugggaagaccacugccaauuuucccguccaucccccaucggauaccuaggacuccugucccagcgcacucgcgacauauacauaucucgccgacuccuaggcacuuuuacauggacccucuccgacucagaaggcaacgaaaccccaggcggcuacugccuuacccgcuggaugcucaucgaagcagaacucaaaugcuucggaaacaccgccgucgccaaaugcaacgaaaaacaugacgaagaauuuugcgacaugcuccgccucuucgacuucaacaaacaagcaauuucccgccucaaaaccgaagcccaaauguccauccaacucaucaacaaggccguuaaugcccucaucaacgaccaacucauaaugaaaaaccaccuacgcgauaucaugggaaucccauacugcaacuacuccaaauacugguaccucaaccacaccgucaccggcaaaaccucccuaccccgaugcuggcucguauccaacggauccuaccucaacgaaacccacuucuccgacgauaucgaacaacaagcugacaacaugauuacagaaaugcuccaaaaggaauacaucgacagacaaggcaaaacaccccucggccucgucgaccucuucgucuucuccaccagcuucuaccucaucuccaucuuccuccaccuagucaaaauacccacccaccgccacaucaccggcaaaccauguccaaaaccacaccgccucaaccacaugggaauaugcuccugcggccuauacaaacaccccggcgugccaguaaaauggaaacgcuaa

SEQ ID NO: 2082 - RNA, 1473 nt, Artificial Sequence
  derived and/or modified protein sequence (opt11) from LASV(Lassa virus/H.sapiens-wt/NGA/2015/ISTH_0543;Clade II)__AVO03639__GPC
augggccagauuaucacauucuuccaagaagucccccacgucaucgaagaagucaugaacauaguacuaaucgcccugucacuccucgcaauccuaaaagguaucuacaacguugcuaccugcggacucuucggccucguuucauuccuccuccucuguggccgauccugcuccacaacuuauaaaggcgucuacgaacuccaaacacucgaacuugacauggccaaccucaacaugaccaugccacucucaugcaccaaaaacaacucccaccacuacauuauggucggcaacgaaaccggccucgaacuaacucucaccaacacaucaauaaucaaccacaaauucugcaaccuaagcgacgcccacaagaaaaaccuauacgaccacgcccuaauguccaucauaagcaccuuccaccucuccauuccaaacuuuaaccaauacgaagcaauguccugcgacuucaacggaggcaaaaucucaguccaauauaaccucucccacaccuacgccgucgacgcggccaaccacugugguaccaucgccaacggaguccuccaaaccuucaugcgcauggcuuggggcggaagcuacaucgcccuagacuccggcaaaggaucaugggacugcaucaugaccuccuaucaguaucucguaauacaaaacacaacuugggaagaccacugucaauucucccgcccaucgcccaucggcuaccucggccuucuaucccaacgaacaagagacaucuacaucucucgccgacuucuuggcaccuucacauggacccucucagacucagaaggcaacgaaaccccugguggcuacugccucacccgcuggauguugaucgaagccgaacuaaaaugcuucggcaacacagccguugccaaaugcaacgagaaacacgacgaagaguucugcgacaugcuccgccuauucgacuucaacaaacaagccauccgccgccucaaaaccgaagcccagauguccauccagcucaucaacaaagccguaaacgcucuaauaaacgaccaacucaucaugaaaaaccaccuacgcgacaucaugggcauccccuacugcaacuacuccaaauacugguaccuaaaccacaccgucaccgguaaaaccucucuaccacgcugcuggcucgucuccaacggaucauaccucaacgaaacccacuucucagaugacaucgaacaacaagccgacaacaugauaaccgaacuccuacagaaagaauacaucgaucgacagggcaaaacaccccucggccucgucgaccucuucguuuucucaaccuccuucuaccuaaucuccauauuccuccaccucgucaaaauccccacccaucgacacaucaccggcaaaccaugcccaaaaccccaccgacucaaccacaugggcaucugcuccugcgguuuauacaaacacccuggcguccccgucaaauggaaacgguaa

SEQ ID NO: 2083 - RNA, 1473 nt, Artificial Sequence
  derived and/or modified protein sequence (opt11) from LASV(Lassa virus/H.sapiens-wt/NGA/2015/ISTH_0547;Clade II)__AVO03583__GPC
augggccaaaucauaaccuucuuccaagaagucccccacgucauagaagaagucaugaacaucguccucaucgcccucucccuccucgccauccucaaaggaaucuacaacgucgcaaccugcggccucuucggguuaguuucguuccuccuccucugcgggcgcuccugcuccacaaccuacaaaggcgucuacgagcuucaaacacuggaacucgauauggccucccuaaacaugaccaugccccuauccugcaccaagaauaacucccaccacuacaucauggucgguaacgaaaccggccuagaacucacacuuaccaacaccuccaucauaaaccauaaauucugcaaccuauccgacgcccacaagaaaaacuuauacgaccacgcccucaugucaaucauuucaaccuuccaccucagcauccccaacuucaaccaauacgaagccaugagcugcgacuucaacggaggaaaaaucuccguccaauacaaccuaagccacacauacgccgucgacgcggccaaccacugcggcaccauagccaacggcguacuacaaaccuucaugcgcauggccuggggaggauccuacauagcucucgacuccggaaaagguucgugggacugcaucaugaccuccuaccaauaccuaauaauccaaaacacaacaugggaagaccacugccaauucagucgccccucccccaucggauaccuaggcuugcuaucccaaagaacccgcgacaucuacauaucucgccgucuccucggaacauucaccuggacccucuccgacuccgaaggcaacgagacccccggcggcuacugccucacccgcuggaugcuaaucgaagccgagcuaaaaugcuucggcaacaccgccgucgccaaaugcaaugaaaaacacgacgaagaguucugcgacaugcuccgacucuucgacuuuaauaaacaagccauccggcgacucaagaccgaagcccaaaugucaauucaacucaucaauaaagccgucaaugcccucaucaacgaucaacuaaucaugaaaaaccaccuucgcgacaucaugggcaucccauacugcaauuacucaaaauacugguaccucaaccacaccgucaccggaaaaaccucccuaccccgcugcuggcucgucuccaacggcuccuaccuaaacgagacccacuucucagacgacauagaacagcaagcugacaacaugaucaccgaacuccuacaaaaagaauacaucgaacgccaaggcaaaacaccccuaggccucguagaucuauucgucuucucgaccucauucuaccuaauauccaucuuccuccaccucguaaagaucccgacccaccgccacaucaccggcaaacccugccccaaaccccaccgacucaaccacaugggcaucugcuccuguggccucuacaaacaucccggcguccccgugaaguggaaacgcuaa

SEQ ID NO: 2084 - RNA, 1473 nt, Artificial Sequence
  derived and/or modified protein sequence (opt11) from LASV(Lassa virus/H.sapiens-wt/NGA/2015/ISTH_0574;Clade II)__AVO03657__GPC
augggccaaaucaucaccuucuuccaagaaguaccucacgucauugaagaagucaugaacaucguccucaucgcccucucccuccucgccauccucaagggcaucuacaaugucgcaaccugcggccuauucggccuagucgccuuccuccuccucugcggacgauccugcuccaccaccuacaaaggcguauacgaacuacaaacacucgaacucgacauggccucacucaacaugacuaugccccucuccuguaccaaaaacaacucccaccacuacaucaugguaggaaaugaaaccggccucgaacucacccucaccaacaccagcauaaucaaccacaaauucugcaaccucuccgacgcccacaagaaaaaccucuacgaccaugcccucaugucaaucauaucaaccuuccaccucucaauacccaacuucaaccaauacgaagcgaugucuugcgacuucaacggcggcaaaauuucagugcaauauaaccucucccacaccuacgccgucgacgccgcaaaccacugcggcaccaucacuaacggcguccuacaaaccuucaugcgcauggccugggguggcuccuauaucgcccuagacuccggaaaaggauccugggacugcauaaugacauccuaccaauaccucaucauccaaaacaccacaugggaagaccacugucaauuuagucgcccaucccccaucggcuaccuuggccuccucagccaacgaacccgcgacaucuacaucucccgacgccuucucggaaccuucacuuggacacucuccgacucagaaggcaacgaaacccccggcggcuauugccucacucgauggaugcucaucgaagccgaacuaaaaugcuucggaaacacggccgucgccaaaugcaacgaaaaacaugacgaagaguucugcgauaugcuccgccuauucgacuucaacaaacaagcaauccgccgauuaaagaccgaagcucaaauguccauccagcuaaucaacaaagcaguaaacgcgcuuaucaacgaccaacucaucaugaaaaaccaccuacgcgacauaaugggcauccccuacugcaacuacuccaaauauugguaccuuaaccacaccguaacaggacgcaccucccucccucgcugcugguuaguauccaacggauccuaccucaacgaaacacacuucuccgacgacauagaacaacaagcagacaacaugaucacugaacuccuccaaaaagaguacauggaccgccaaggcaaaacaccccucggucucgucgaccucuucgucuucuccaccuccuucuaccugauauccauauuccuccaccucauaaaaaucccaacccaccgccacgucaucggcaaacccugccccaaaccccaccgccucaaccacaugggcauaugcucaugcggccucuacaaacauccuggaguucccgucaaauggaaacgcuaa

SEQ ID NO: 2085 - RNA, 1473 nt, Artificial Sequence
  derived and/or modified protein sequence (opt11) from LASV(Lassa virus/H.sapiens-wt/NGA/2015/ISTH_0681;Clade II)__AVO03617__GPC
augggccaaaucauaaccuucuuccaagaagucccccacgucaucgaagaagucaugaacauuguccuuaucgcccucucccuccuagcaauccuuaaaggcauuuacaacgucgccacaugcggccucuucggccuagucuccuuccuccuccucugcggccgcucgugcagcacaaccuauaaaggcgucuacgaacugcaaacacucgaacucgacauggcgucacucaacaugaccaugccucucuccugcaccaaaaacaauucccaccacuacaucaugguaggcaacgaaacaggccucgaacucacucuaaccaacaccucaaucaucaaccacaaauucugcaaucucuccgacgcccacaagaaaaaccuguacgaccacgcccuaauguccaucaucuccaccuuucaccucuccauaccaaacuucaaccaauacgaagcaaugucaugcgacuucaacggcggaaaaaucucgguccaauacaaccucucacacaccuacgccgaaggcgcugccaaccacugcggcaccaucgccaacgguguccuccaaaccuucaugcgcauggccuggggugguuccuacaucgcccucgacagcggcaaaggcucaugggacugcaucaugacauccuaccaauaccucaucauccaaaacacuaccugggaagaccacugccaauucuccagaccaagccccaucggcuaccucggauuacucucccaacgaaccagagacaucuacaucucccgccgccuccucgguaccuucacguggacccucucagacucagaaggaaacgaaacccccggaggcuacugccucacucgcuggaugcuaaucgaagccgaacucaaaugcuucggcaacaccgccgucgccaaaugcaacgagaaacacgacgaagaguucugcgacaugcuccgccucuucgacuucaacaaacaagcaauaaugcgacuaaagacggaagcccagaugucgauccaacucaucaacaaagccgucaaugcacucaucaacgaccaacuaaucaugaaaaaccaccuacgcgacaucaugggcauacccuacugcaacuacucgaaauacugguaccucaaucauacagucaccggcaaaaccucacuaccccgcugcuggcucgucucuaacgguuccuaccuaaaugaaacccacuucuccgacgauaucgaacaacaagccgacaacaugaucacagaaaugcuccaaaaagaauacauggaccgccaaggcaaaaccccgcuagggcucgucgaccuuuucguuuucucaaccuccuucuaccuaaucuccaucuuucuccaccucgucaaaauccccacccaccgccacguaaucggcaaacccugccccaaaccccaccgccucaaucacaugggcaucugcuccugcggccucuacaaacaccccggcguacccgucaaauggaaacgcuaa

SEQ ID NO: 2086 - RNA, 1473 nt, Artificial Sequence
  derived and/or modified protein sequence (opt11) from LASV(Lassa virus/H.sapiens-wt/NGA/2015/ISTH_0682;Clade II)__AVO03625__GPC
augggccaaaucaucaccuucuuccaagaaguuccccacguaaucgaagaagucaugaacaucguccucaucgcccuuucacuacucgccauccucaaaggcauauacaacguagccacaugcggccuguucggccuagucuccuuccucuuacuaugcggacgcagcugcucaaccaccuauaaaggcgucuacgaacuccaaacucuagaacucgacauggcuucccucaacaugaccaugccccucuccugcaccaaaaacaacucccaccacuacaucauggucggcaacgaaaccggccucgaacucacccucaccaacacuuccauuaucaaccacaaguuuugcaaccugucagacgcccacaagaaaaaccuauacgaccacgcacuuauguccaucaucuccaccuuccaccuauccauccccaacuucaaccaguacgaagccauguccugcgacuucaacggaggcaaaauauccguccaauacaaccucucacacgccuacgccgucgacgcagccaaccacugcggcaccaucgccaacggcguacuacaaaccuucaugcgcauggccuggggcgggucauacaucgcccuugacuccggcaaaggcuccugggacugcaucaugaccuccuaccacuaccucaucauacaaaacaccaccugggaagaccacugccaguucucucgcccuucccccaucgguuaccucggccuacuaucccaacgaacccgcgauaucuacauaagccgccgccuccucggcaccuucacauggacacuuuccgacucagaagguaacgaaacaccaggcggcuacugccucacucgcuggaugcucaucgaagcagaacucaaaugcuucggcaacacagccgucgccaaaugcaacgaaaaacacgacgaagaguucugcgacaugcuacgccucuucgacuucaacaaacaagcgauccgacgccucaaaaccgaagcccaaauguccauccaacucauaaauaaagccgucaacgcccucaucaacgaccaacuaaucaugaaaaaccaccuccgcgacauuaugggaauccccuacugcaacuacucaaaauacugguaucucaaccacacagucaccggcaaaaccucccucccccgaugcuggcucguuuccaacgguucauaccuaaacgaaacucacuucuccgacgauaucgaacagcaagccgacaauaugaucacagaacuacuccaaaaagaauacaucgaccgccagggcaaaacaccccucggucuagucgaccuuuucguauucagcacaucuuucuaccucauaagcaucuuccuccaccucgucaaaaucccaacacaccgacacgucaucggcaaaccaugccccaaaccccaccgacucaaucacaugggcaucugcuccugcggccucuacaaacaccccggaguccccguuaaguggaaacgcuaa

SEQ ID NO: 2087 - RNA, 1473 nt, Artificial Sequence
  derived and/or modified protein sequence (opt11) from LASV(Lassa virus/H.sapiens-wt/NGA/2015/ISTH_0687;Clade II)__AVO03581__GPC
augggccaaaucauaaccuucuuccaagaggucccccaugucauagaagaggucaugaacauaguccucaucgcucucucccuccucgccauucucaaaggaaucuacaacgucgccacaugcggccucuucggccucguauccuuccuacuacucugcggccgcuccugcucaaccacguacaaaggcgucuacgaacuacaaacacucgaacucgacaugaccaaccucaacaugaccaugccccugucuugcaccaaaaacaauucccaccauuacaucauggucggcaacgaaaccgggcucgaacuaacccucaccaacacaucaaucaucaaccacaaauucugcaaccucucagacgcccacaaaaagaaccuauacaaccacgcacucaugagcauaauauccacuuuccaccuaucaauccccaacuucaaccaauacgaagccaugagcugcgacuucaacggaggaaaaaucuccgugcaauacaaccugucccacacauacgccgucgacgccgccaaccacugcggcacagucgccaacgggguacuccaaacauucaugcggauggccuggggcggcucauacaucgcgcucgacuccggaaaaggcggaugggacugcaucaugaccuccuaccaauaccucaucauccaaaacaccacuugggaggaccacugccaauucucccgccccucccccaucggcuaccugggccuccuaucccaacgcacccgagacaucuacaucucccgccgccuccucggcacauucaccuggacacuauccgacucagaaggcaacgaaacacccggcggcuacugccuaacccgauggaugcucaucgaagcagaacuaaaaugcuucggcaacaccgccgucgccaaaugcaaugagaaacacgaugaagaguucugcgacaugcuacgacucuucgacuucaacaaacaagccauccgcaaacucaaagccgaggcccaaaugagcauucaacuuaucaacaaagccgucaacgcccucaucaacgaccaacucaucaugaagaaccaccuccgcgacaucaugggcauccccuacugcaacuacucaaaauacugguaccucaaccacaccguaacaggcaaaaccucccuccccaaaugcuggcuagucucuaacggauccuaccugaacgaaacccauuuuuccgacgauaucgaacaacaagccgacaacaugaucaccgaacuccuacaaaaagaauacauggaccgucaaggaaaaacaccacucggccuagucgaccucuuugucuucucuaccucauucuaccucaucagcaucuuccuccaccucgugaaaaucccaacacaccgccacaucauuggaaaacccugcccuaaaccccaccgccucaaccacaugggaaucugcuccugcggacucuacaaacacccuggaguccccgucaaauggaagcgcuaa

SEQ ID NO: 2088 - RNA, 1473 nt, Artificial Sequence
  derived and/or modified protein sequence (opt11) from LASV(Lassa virus/H.sapiens-wt/NGA/2015/ISTH_0736;Clade II)__AVO03573__GPC
augggccaaaucaucacuuucuuccaagaggucccgcacgucaucgaagaaguaaugaacaucguccuaaucgcccucucacuacuagccguccuaaaagguaucuacaacguagcaacuugcggacucuuuggucuggucuccuuccuccuccuuugcggccgcuccugcucaaccacauacaaaggaguguacgaacuccaaacacucgaacucgacauggccucccuuaacaugacaaugccccuauccugcaccaaaaacaacucccaccacuacaucauggucggcaacgaaaccggccucgaacucacacucaccaacacguccaucaucaaccacaaguucugcaaucucagcgacgcucacaagaaaaaccucuacgaccacgcccuaauguccauaaucuccaccuuccaccuauccauacccaauuucaaccaauacgaggccauguccugcgacuucaacggcggaaaaauauccguucaauacaaccucucccacacccaugccguagacgccgccaaccacugcggcaccauugccaacggaguacuccaaaccuucaugcgcauggcauggggaggcuccuacauagcccucgacuccggcaaaggcucaugggacugcaucaugaccuccuaccaauaccucaucauccagaauacgaccugggaagaccacugccaauucucccggcccucccccauaggcuaucucggacuacucucacaacgcacccgcgacaucuacaucucacgcagacuccuaggcaccuucaccuggacacuauccgacagcgaaggcaacgaaaccccuggcggcuacugccuaacccguuggaugcucauagaagccgaacucaaaugcuucggaaacaccgccgucgcaaaaugcaacgaaaaacacgacgaagaauuuugcgacaugcuccgccucuucgacuucaacaaacaggccauccgccgccucaaaacagaagcccaaaugucaauucaacucaucaacaaagccgucaacgcacuaaucaacgaccaacuaaucaugaaaaaucaccuccgcgacauaaugggaaucccauacugcaacuacucccgcuacugguaccucaaccacacaguaacaggcaagaccucacuaccccgaugcuggcucguauccaacgguuccuaccucaacgaaacacacuucuccgacgauauagaacaacaagccgacaacaugaucacagaacuccuccaaaaagaauacaucgaccgccaaggucgaacaccccuagggcucgucgaccucuuugucuucucaaccucauucuaccucaucucgaucuuccuccacuuagucaagauaccuacccaccgccacgucaucggcaaaccaugccccaaaccacaccgacucaaccacaugggcaucugcuccugcgggcuuuacaaacacccaggcguccccguuaaauggaaacgcuaa

SEQ ID NO: 2089 - RNA, 1473 nt, Artificial Sequence
  derived and/or modified protein sequence (opt11) from LASV(Lassa virus/H.sapiens-wt/NGA/2015/ISTH_0789;Clade II)__AVO03551__GPC
augggccaaaucguaaccuucuuccaagaagucccccacgucauugaagaaaucaugaacauaguacucaucacccucucccuacuagccauacucaaaggcgucuacaaccucgccacguguggccugauaggacuaaucaccuuccuauucuuaugcggccgcuccuguuccaccaucuacaagggcucauaccaauuccagacccuagaacuaaacauggaaacccuaaauaugacuaugccccucuccugcaccaaaaauuccucccaccacuacaucagagucucuaacgaaaccggccucgaacucacccuaacaaacaccuccaucaucaaccacaaauucugcaaccucagcgacgcccacaagaaaaaccuauacgaccacacccuaauguccaucauauccaccuuccaccucucaauaccaaacuucaaccaauaugaagccauguccugcgacuucaacggcggcaaaaucagcguacaauacaaccuaucccacuccuaugcagucgacgccgccaaccacugcggcacgguagccaacggaguccuccaaaccuuuaugcgcauggccuggggcggaucauacaucgcacuugacagcggccgcggcaacugggacugcaucaugacauccuaccaauaccucaucauccagaacacaacaugggaggaccacugucaauucucccgccccucccccauaggcuaccugggccuccucucccaacguacccgagauauauacaucucacgccgccuccucggaaccuucacuuggacccucagcgacucugaaggcaaagaaacacccggcggcuauugccuaacccgauggaugcucaucgaagccgaacucaaaugcuucggcaacaccgccgucgccaagugcaaugaaaaacacgacgaagaguucugcgacaugcuacgccuuuuugacuucaacaaacaagcaauccaacgccucaaagccgaagcccaaaugucaauacaacucaucaacaaagccgugaacgccuuaaucaacgaccaacucauaaugaaaaaccaccuacgcgacaucaugggaauccccuacugcaacuacuccaaauacugguaccucaaccacaccucuacaggccgcacuucccuccccaaaugcuggcucgucucaaacggcuccuaccucaacgaaacccacuuuucagacgacaucgaacaacaagccgacaauaugaucaccgaaaugcuccaaaaagaauacaucgacaggcaaggcaaaacaccccuaggccucgucgaccuauucguauucucaaccuccuuuuaccuaaucuccauauuccuccaccuagucaaaauccccacccaccgccacaucguaggcaaauccugcccaaaaccccaccgccuuaaccacaugggcaucugcucaugcggccucuacaaaagaccaggcguccccgucaaauggaaaagauag

SEQ ID NO: 2090 - RNA, 1473 nt, Artificial Sequence
  derived and/or modified protein sequence (opt11) from LASV(Lassa virus/H.sapiens-wt/NGA/2015/ISTH_0821;Clade II)__AVO03641__GPC
augggccaaaucaucaccuucuuccaagaaguaccucacguaaucgaagaagucaugaacaucguccucauagcacucucccuccucgccauccuaaaaggcaucuacaacgucgcuaccugcggacucuucggacucguaucauuccuucuacuaugcggccgaagcugcuccaccacauacaaaggcgucuacgaacuccaaacacuugaauuagacauggccucccuaaacaugaccaugccccuaucaugcaccaaaaacaacucccaccacuacaucauggucggcaacgaaaccggacuagaacucacccucaccaacaccuccauaaucaaucauaaauucugcaaccugucagacgcucacaagaaaaaccucuacgaccauacucucaugaguauaaucucaaccuuccaccucucaaucccaaauuucaaccaauacgaagccauguccugcgacuucaacggcggcaaaaucuccgugcaauacaaccucucccacaccuacgccguagacgccgccaaccacugcggaaccaucgccaacggcguccuccaaacauucaugcgcauggccuggggcggcagcuacauagcccucgacucaggaaaaggcaacugggauugcaucaugaccuccuaccaauaccugaucauccaaaacacaaccugggaagaccacugccaauucucacgccccuccccaaucggguaccucgggcuccucucgcagcgcaccagagacaucuacauuagcagacgccuccuuggcaccuucaccuggacacucuccgacucagaaggcaacgaaaccccuggcggcuacugccucacccguuggaugcuaauagaagcagaacuuaaaugcuucggaaacacugccgucgcaaaaugcaacgaaaaacacgacgaagaguucugcgacaugcuccggcuauucgacuucaacaaacaagccaucucacgacuaaaaaccgaagcacaaauguccauacaacucaucaacaaagccgucaacgcccucaucaacgaccaacucauaaugaaaaaccaccuccgcgacaucaugggaauccccuacugcaacuacuccaaauacugguaccuuaaccacaccgucacaggcaaaacaucccuaccccgcugcuggcucguaucaaacggcucauaccucaacgaaacccacuucagcgaugacaucgaacagcaagccgacaacaugaucaccgaaaugcuccagaaagaguacaucgaccgacaaggaaaaacaccccucggucucguugaccucuucgucuucuccaccuccuucuaccucaucuccaucuuccuccaccucgugaagauucccacccaccggcacguuaucggcaaacccugccccaaaccccaccgccuuaaccacaugggcaucugcuccugcgggcucuacaaacaccccggcguccccgucaaauggaaacgcuag

SEQ ID NO: 2091 - RNA, 1473 nt, Artificial Sequence
  derived and/or modified protein sequence (opt11) from LASV(Lassa virus/H.sapiens-wt/NGA/2015/ISTH_0831;Clade II)__AVO03545__GPC
augggccaaaucguaacauucuuccaggaagucccccacgucauagaagaaauaaugaacauaguccugauaacccugucccuccucgccauccugaagggcguauauaaccucgcaacuugcggccucauaggacucauuaccuuccucuuccucugcggccgauccugcuccaugacauacaagggcuccuaccaacuagaaacccucgagcuuaacauggaaacacucaacaugacaaugccccucuccugcaccaaaaacaccucucaucacuacaucagaguaggaaacgaaaccggacucgaacugacccucaccaacacauccaucaucaaccacaaauucugcaaccucucagacgcccacaaaaagaaccuauacgaccacucacuuauguccauugucagcaccuuucaccuauccauccccaacuucaaccaauacgaagccauguccugcgacuucaacggaggcaaaaucuccauucaauacaaccucucgcacgcguacgcaggcgacgccgcaaaacacugcggcacccucgcaaacggcguccuccagacauucaugcgcauggccuggggcggcuccuacauagcccucgacuccggacgcggcaacugggacugcauaaugaccagcuaccaauaccuaaucauccaaaacaccaccugggacgaccacugccaauucucacgacccucaccuauaggauaccucggacuacuaagccagcgcacccgugaaauauacaucucccgacgacugcucggcaccuucaccuggacccucagcgacucagagggaaacgaagcgccgggaggcuacugccucacccguuggaugcucaucgaagccgaacucaaaugcuucggcaacaccgcagucgccaaaugcaacgaaaaacacgacgaagaguucugcgacaugcuacgacucuucgacuucaacaaacaagccauacaacgacucaaaaccgaagcccaaauguccauccaacuaaucaacaaagccgucaacgcgcucauaaacgaccaacuaauaaugaaaaaccaccuccgggacauaaugggcauacccuauugcaacuacucaaaauacugguaccuaaaccacaccacaaccggcagaaccucacucccccggugcuggcucgucucaaauggauccuaccugaacgaaacccacuucuccgacgacaucgaacaacaagccgacaacaugaucaccgaaaugcuccaaaaagaauacauagaccgacagggcaaaacaccacucggccucgucgaccucuucgucuucuccaccucauucuaucuuauauccaucuuccuccaccucgucaaaaucccgacccaccgacacaucgucggcaaaagcugccccaaaccacaccgucucaaccacaugggcaucugcuccugcggccuauauaaacaaccaggaguacccguacgcuggaagcgcuag

SEQ ID NO: 2092 - RNA, 1473 nt, Artificial Sequence
  derived and/or modified protein sequence (opt11) from LASV(Lassa virus/H.sapiens-wt/NGA/2016/ISTH_0009;Clade II)__AVO03571__GPC
augggccaaaucaucaccuucuuccaagaagucccccacgucauugaagaaguaaugaacauaguccucaucgcccucucacuacuagcuauccuaaagggaaucuacaacgucgccaccuguggccuccucggccucguaucguuccuccuucuuuguggacgauccugcuccaccaccuacaaagguguauacgaacuccaaacccucgaguuagacauggccagccuaaacaugaccaugccccucuccugcaccaaaaauaauucccaccacuacaucauggucggcaacgaaaccggccucgaacucacacucacuaacacauccaucaucaaccacaaauucugcaacuuaucagaugcccacaagaaaaaccucuacgaccacgcacuaaugucaaucaucucaaccuuccaccucagcauccccaacuucaaccaguacgaggcaaugucuugcgacuucaacggcggacgcaucuccguccaauacaaccucucccacagcuaugccgucgacgccgccaaccacugcggcacgaucgccaacggcguccuacaaaccuucaugcgaauggccuggggcgguuccuauaucgcccucgacuccggcaaaggaagcugggacugcaucaugaccucauaccaauaccucauaauccaaaacaccacaugggaagaucacugccaauucucccguccaucccccaucggcuaccucggccuccucucacaacgcacacgcgacaucuacaucucaagacgccuacucggcaccuucacuuggacccucucagacuccgaaggcaacgaaacccccggaggcuacugccuuacccgcuggaugcuaaucgaagccgaacucaaaugcuucggcaacaccgccguagcaaaaugcaacgaaaaacacgacgaagaguucugcgacaugcuccgacuuuucgacuucaacaaacaggccauccgccgccucaaaaccgaagcacaaauguccauccaacucaucaacaaagcaguaaacgcccuuauaaacgaucaacuaaucaugaaaaaccaccuccgcgacaucaugggcauccccuacugcaacuacuccaaauacugguaccuaaaccacaccguaaccggaaaaaccagccuccccagaugcuggcuagucagcaacggaucauaccuuaacgaaacccacuucuccgaugacaucgaacaacaagccgacaacaugaucaccgaacuucuacagaaagaauacaucgaccgccaaggcaaaacgccccucggccuugucgaccucuucgucuucuccaccuccuucuaccucaucagcauauuccuacaccuugucaaaaucccaacccaccgucacaucaccggcaaacccugcccaaaaccccaccgacuaaaccacaugggcaucugcuccugcggccucuacaaccacccaggcguccccgucaaauggaaacguuag

SEQ ID NO: 2093 - RNA, 1473 nt, Artificial Sequence
  derived and/or modified protein sequence (opt11) from LASV(Lassa virus/H.sapiens-wt/NGA/2016/ISTH_0017;Clade II)__AVO03567__GPC
augggccaaauaaucacauuuuuccaagaagucccccacgucaucgaagaagucaugaauaucguccuuaucgcccucagccuccuugcaauccugaaaggcaucuacaacgucgccacaugcggccucuucggccuagucuccuucuuacuccuaugcggacgcuccugcucgacaaccuacaaaggcgucuacgaacuccaaacacuggaacucgacauggccucccuuaacaugaccaugccccuauccugcaccaaaaacaacagccaccauuacauaaugguaggaaacgaaaccggccucgaacuaacacucaccaacaccuccauaauaaaucacaaauucugcaaccucucagacgcccacaagaaaaaccuuuacgaccaugcacucauguccaucauaucaaccuuccaccucuccauacccaauuucaaccaauacgaagccaugucaugcgacuucaauggcggcaaaaucuccguccaguacaaccuuucccacacuuacgccaucgacgccgccaaccacugcggcaccauagccaacggcguacuccaaacauucaugcgcauggcgugggguggcuccuacaucgcacucgacucaggcaaaggaucaugggacugcauaaugaccucauaccaauaccucaucauccaaaacacaaccugggaagaccacugccaauucagccggccaucucccaucggcuaccucggccuacuaagccaacgcacgcgcgacaucuacaucucccgccgccuucuaggcaccuucaccuggacccucucagacuccgaagggaacgaaacgcccggcggauacugccucacccgcuggaugcucaucgaagccgaacucaaaugcuucggcaacacagcagucgccaaaugcaacgaaaaacacgacgaagaguucugcgacaugcuccgccuauucgacuucaacaaacaagcaauacgccgacuuaaaaccgaagcacaaaugucaauccaacuaaucaacaaagcagucaacgcucuaauuaacgaccaacuuaucaugaaaaaccaccuccgagacaucaugggcaucccauacugcaacuacucaaaauacugguaccucaaucacaccgucacgggcaaaaccucccucccacgcugcuggcuagucuccaacggcucauaccucaacgaaacgcacuuuucagaugacaucgaacaacaagcugacaauaugaucaccgaacuccuacaaaaagaauacauggaccgccaaggaaaaacaccccucggacucgucgaucucuucguauucuccaccucauucuaccuaaucuccauauuccuccaccuaguacgaauccccacccaccgccacgucauaggcaaacccugccccaaaccccaccgccuaaaccacaugggcauaugcuccugcggccucuacaaacacccuggcguccccgucaaauggaagcgcuga

SEQ ID NO: 2094 - RNA, 1473 nt, Artificial Sequence
  derived and/or modified protein sequence (opt11) from LASV(Lassa virus/H.sapiens-wt/NGA/2016/ISTH_0035;Clade II)__AVO03619__GPC
augggacaaaucauuaccuucuuccaagaagucccccacguaaucgaggaagucaugaacaucguccucaucgcccucucccuucucgccauucucaaaggcauuuacaacgucgcaaccuguggccuauuuggccuggucagcuuccuacuccuaugcggccgcagcugcuccaugacauacaaaggcgucuacgaacuccaaacccucgaacuagauauggcaucacucaacaugaccaugccacuaucgugcaccaaaaauaacucacaccacuacauaauggucggaaacgaaacaggccucgagcuaacgcucaccaauaccagcaucaucaaccacaaauucugcaaucuaagcgacgcacacaagaaaaaccucuaugaccacgcccucauguccaucaucagcaccuuucaccugucaauccccaacuucaaccaguacgaagccauguccugcgauuucaacggaggcaaaaucuccguacaauacaaccucagccacacuuacgccgucgacgccgcaaaccacugcggcaccaucgccaacggaguccuccagaccuucaugcgcauggccuggggcggcucauacaucgcacucgacucuggcaaaggcuccugggacugcaucaugaccagcuaccaauaccucaucauacaaaauaccaccugggaagaccacugccaauuuucucgacccucccccaucggauaccucggccuacucucacaacgaacccgcgacaucuacaucagccgccgccuccuuggaaccuucacuuggacacuauccgacuccgaaggaaacgaaacccccggaggcuacugccucacccgcuggaugcucaucgaagcagaacuaaaaugcuucggaaacaccgcugucgccaaaugcaacgaaaaacacgacgaagaguucugcgacaugcuccgccuauucgacuucaauaaacaagccauacgccgccucaaaaccgaagcacaaauguccauccagcucauaaacaaagccguaaacgcacuuaucaacgaccaacucauuaugaaaaaccaccuccgcgacauuaugggaauaccauacugcaacuacuccaaauacugguaccuaaaccacaccauaaccggcaaaaccucacuaccacgcugcuggcucgucagcaacggcucuuaccucaacgaaacacacuucuccgacgacaucgaacaacaagccgacaacaugaucacagaacugcuccaaaaagaauacauggaucgucaaggcaaaacaccacuaggacucguagacuuauucgucuucucaaccucauucuaccucaucuccaucuuccuccaccucguaaaaaucccaacacaccgucacgucauaggcaaacccugucccaaaccccaucgccugaaccacaugggcaucugcucaugcggccucuacaaacaccccggcguccccgucaaauggaaacgcuga

SEQ ID NO: 2095 - RNA, 1473 nt, Artificial Sequence
  derived and/or modified protein sequence (opt11) from LASV(Lassa virus/H.sapiens-wt/NGA/2016/ISTH_0104;Clade II)__AVO03631__GPC
augggccaaguaauaaccuucuuccaagaagucccccacguaaucgaagaagucaugaacauaguccuaauagcccuaagccuccucgccauccucaaagggaucuauaacgucgcaacaugcggccucuucggacuaaucucuuuccuccuccucugcggccgcuccugcuccacaaccuacaaaggaguuuaugaacugcaaacucucgaacucaacaugcaaaaccucaacaugacuaugccccucagcugcaccaagaacagcucccaccacuacauaaugguuggcaacgaaaccggccucgaacuaacccucacaaacacuuccaucauaaaccacaaauucugcaaccuauccgacgcacacaagaaaaaccucuacgaccacgcucuaauguccauaaucucaaccuuccaccucuccauccccaacuucaaccaauacgaagccauguccugcgacuucaacggaggaaaaaucuccguccaauacaaccucucccacaccuacgccaucgacgccgccaaccacugcggaaccguagcuaacggaguccuacagaccuucaugcguauggcauggggcggcuccuacauagcccuagauagcggacgcggcaacugggacugcauuaugacuuccuaccaauaccuaauuauacaaaacaccaccugggaggaccacugucaauuuucccgccccucccccaucggcuaccucggacuacugucccaaagaacacgcgacaucuacauaucccgccgccugcuuggcacuuucaccuggacacucucugacucagaaggcaacgaagccccaggaggcuacugccugacccgcuggaugcucaucgaagccgaacucaaaugcuucggcaacaccgcuguggccaaaugcaacgagaaacacgacgaagaguucugcgacaugcuacgccucuucgacuucaacaaacaagccaucaaaagacuaaaaaccgaagcccaaauguccauccagcucaucaacaaagccgucaacgcccuaaucaacgaccaacucaucaugaagaaccaccuccgcgacauaaugggaaucccauacugcaacuauucuaaauacugguaccuuaaccacaccgucaccggccgaacaucccucccaagaugcuggcucguuuccaacggaagcuaccugaacgacacccaauucagcgacgacauagaacagcaagcagacaacaugaucaccgaaauguuacaaaaagaauacauggaccgccaaggcaaaacacccuuaggccucguagaccuauucguauucucaacauccuucuaccucauaucaaucuuccuccaucucguaaaaauccccacccaccgccacaucgucggccgccccugcccaaaaccacaccgacuaaaccacauggguaucugcagcugcggccuauacaaacaccccgggguccccgucaaauggaaacgcuaa

SEQ ID NO: 2096 - RNA, 1476 nt, Artificial Sequence
  derived and/or modified protein sequence (opt11) from LASV(Lassa virus/H.sapiens-wt/NGA/2016/ISTH_0133;Clade II)__AVO03635__GPC
augggccaaaucauuaccuucuuccaagaagucccccacguaauagaagaagucaugaacauaguccucaucgcccucucacuacucgccguacugaaagccaucuacaacgucgccacaugcggcguauuuggccucaucuccuuccuccuucuaugcggccgauccugcuccaccacauacaagggagucuaugaacuacaaacccucgaacucgacauggcuaaccuaaacaugaccaugccccuuuccugcacuaaaaacaacucccaccacuacaucauggucggaaacgaaaccggccucgaacucacccucaccaacaccagcaucauaaaccacaaauucugcaaccuguccgacgcccacaagaaaaaccucuacgaccacucccucaugucaaucaucuccaccuuucaccuaagcaucccuaauuuuaaccaauacgaagccauguccugcgacuucaaugggggcaaaaucucaguacaauacaaucucucccacuccuacgcagucgaugcugccaaacacugcggcacaaucgccaauggcguacuccaaaccuucaugcggauggccuggggcggcuccuacauagcccuagacuccggcaaaggaggcugggacugcaucaugaccuccuaccaauaccucaucauccaaaacaccaccugggaagaccacugccaauucucacgccccuccccuaucggcuaccuuggccuccucagccaacgcacccgcgacaucuacauaucacgucgccuccucggcaccuucacguggacccucuccgacucagaaggcaacgacgcaccaggcggcuacugcuuaacccgauggaugcucauagaagccgaacucaagugcuucggcaauaccgcaauugccaaaugcaacgaaaaacacgacgaggaguucugcgauaugcuccgacucuucgacuucaaccgccaagcaauuaaaagacucaaaaccgaagcgcaaauguccauacaacuaaucaacaaagcaguuaacgcccuaauuaacgaccaacuuaucaugaagaaccaucuacgcgacaucaugggaaucccauacugcaacuacuccaaauacugguaccucaaccacacgaucaccggcaaaacaucacucccacgcugcuggcucgugucaaacggcucauaccucaacgaaacucacuucuccgacgacaucgaacaacaggccgacaauaugaucacugaacuacuucagaaagaauacauggaccgccagggcaagacaccccucggccuagucgaccucuucguuuucuccaccuccuucuaccucaucuccaucuuccuccaccuuguaaaaauccccacacauagacacaucguaggcaaacccugccccaaaccccaucgccuuaaccacaugggcaucuguuccugcggccuauacaaacaccccggcguccccguaaaguggaagcgccaauaa

SEQ ID NO: 2097 - RNA, 1473 nt, Artificial Sequence
  derived and/or modified protein sequence (opt11) from LASV(Lassa virus/H.sapiens-wt/NGA/2016/ISTH_0141;Clade II)__AVO03649__GPC
augggacaaaucauaaccuucuuccaagaagucccacacgucaucgaagaaguaaugaacaucguucuaauaacccucucccuccucgccauccucaaaggcauauacaacguagccacaugcggccuauucggacucgucucuuuccuccuccucugcggccgauccugcucaaccaucuacaaaggcgucuacgaacuccaaacccucgaauuagacauggcgucucuaaacaugacuaugccccucuccugcacuaaaaacaacucccaccacuacaucaugguuggcaacgaaaccggacucgaacucacacucacaaacaccuccauaaucaaccacaaauucugcaaucuaucugacgcccacaagaaaaaccuauacgaccacgcacugaugucaaucaucuccaccuuccaccucucaaucccaaacuucaaccaauacgaagcaaugucaugcgacuucaacggaggaaaaauaucgguacaauacaaccuaagccacacauacgcagucgacgccgcagaacacugcggcaccaucgccaacggaguucuccaaaccuucaugcgcauggccuggggaggcagcuacaucgcccucgacuccggaaaaggauccugggacugcaucaugacaagcuaccaauaccucaucauccaaaacacaacaugggaagaccacugccaauucucccgccccuccccgaucggguaccucggccuacucucccaaagaacccgcgacaucuauaucucccgccgccuacugggcaccuucaccuggacccucuccgauuccgaaggcaacgaaacgccaggcggcuacugccucacccgcuggaugcucauagaagccgaacuaaaaugcuucgggaacaccgccgucgcaaaaugcaacgaaaaacacgacgaagaguucugcgacaugcuccgccucuucgacuucaacaaacaagccauccgaagacuaaaaacagaagcccaaauguccauccagcucaucaacaaagccgucaacgcacucauaaacgaccaacucauaaugaaaaaccaccuacgagauauaaugggcauuccauacugcaacuacuccaaauacugguacuugaaccacaccgucaccggcaaaaccagccuaccacgcugcuggcucguauccaacggaucauaccucaacgaaacacgguucuccgacgacaucgaacaacaggccgacaacaugaucacugaacuccuccaaaaagaauacaucgaccgucaaggcaaaacuccccugggacucgucgaucuauucguauucuccaccuccuucuaccuuauauccauauuccuucaccucguaaaaauacccacccauagacacaucaucggcaaaccaugccccaaaccgcaccgacucaaccacaugggcaucugcagcugcggccucuacaagcaccccgguauccccgucaaauggaaacgcuga

SEQ ID NO: 2098 - RNA, 1473 nt, Artificial Sequence
  derived and/or modified protein sequence (opt11) from LASV(Lassa virus/H.sapiens-wt/NGA/2016/ISTH_0146;Clade II)__AVO03633__GPC
augggccaaaucaucacauucuuccaagaagucccccacgucaucgaagaaguaaugaacaucguacucaucgcccuaucccuacucgccauacucaagggaaucuacaacgucgccacaugcggccucuucggccucguauccuuccuccuucucugcggccgaucaugcucaacaaccuacaaaggcguauacgaacugcaaacccucgaacucgacauggccucccucaacaugacaaugccccucuccugcacuaaaaacaauucccaccacuacaucauggucggaaacgagacaggccuagaacuaacccuaaccaauaccuccaucaucaaccauaaauucugcaaucucuccgacgcccacaagaaaaaccucuacgaccacgcacucaugagcaucaucuccacguuccaucugucaauucccaacuucaaccaauacgaggccauguccugcgauuucaacggaggaaaaaucuccguccaauacaaccucucccacacauacgccgucgacgcugccaaccacugcggcaccauugccaacggcguacuacaaaccuucaugcgcauggcuuggggcggcucauacaucgcccuagacucaggaaaagguuccugggacuguauaaugaccuccuaccaauaucuaaucauccagaacaccaccugggaagaccacugccaauuuucccguccaucacccaucggcuaccucggccuacuaucccaacgcacacgcgacauauacaucucccgucgacuauuaggcaccuucacauggacccucuccgacuccgagggcaacgagaccccagguggauacugccucacccgcuggaugcucaucgaagcagaacucaaaugcuucggaaacaccgccguagcaaaaugcaacgaaaagcaugacgaagaguucugcgacaugcuucgccucuucgacuucaacaaacaggccauccgccgccuaaaaaccgaagcccaaauguccauacaacucaucaacaaagcagucaaugcccucaucaacgaccaacucaucaugaaaaaccaucugcgcgacaucaugggcauccccuacugcaacuacucuaaauacugguaccuaaaccacaccgucacuggcaaaaccucacuaccccgcugcuggcucguauccaacggaucauaccucaacgaaacccacuucagcgacgacauagaacaacaagcggacaacaugauaacagaacuacuccaaaaagaauacauggaccgacaaggcaagacuccacucggacucguugaccuauucguauucucaaccuccuucuaccucaucuccaucuuccuccaccucguaaaaauccccacccaccgccacgucaucggcaagcccugcccaaaaccgcaccgacuaaaccauaugggaaucugcuccugcggccucuacaaacaccccggaguccccgucaaauggaaacgcuaa

SEQ ID NO: 2099 - RNA, 1473 nt, Artificial Sequence
  derived and/or modified protein sequence (opt11) from LASV(Lassa virus/H.sapiens-wt/NGA/2016/ISTH_0187;Clade II)__AVO03549__GPC
augggucaaaucgucacauucuuccaagaagucccccacguaaucgaagaaguaaugaacaucguccucaucgcacucuccguccucgccauccucaaaggacucuacaacuucgccacaugcggacuuauaggccucgucaccuuccugcuccucuccggacgcucaugcagcauggucuacaaaggcguauacgaacuccaaacccucgaacuaaacauggaaacucuaaacaugacaaugccccuaucaugcaccaaaaacaacagccaccacuacauccgaguuggaaacgacacaggccuagaacucacccucaccaacaacacacugcuaaaccacaaauucugcaaccucucagacgcgcacaagaaaaaccuauacgaccacgcucucaugucgaucauuuccaccuuccaucuaucaaucccaaacuucaaccaauacgaggccaugucaugcgacuucaacggaggccgcaucaccguccaauacaaccucagccacucauacgccgucgacgccgccaaccacugcggcaccgucgccaacgggguccuccaaaccuucaugcgcauggccuggggcggcuccuacauagcccuugacucacgacacggcaacugggacugcauaaugaccuccuaucaauaccuuaucauccaaaacacuacuugggaagaccauugccaauucucccgcccaucccccaucggauaccucggccuacucucccaacgaacacgcgacaucuacaucucgcgacggcuccucggcaccuucacauggacucuauccgacucagaaggcaaugaaacccccgguggcuacugccucacccgauggaugcucaucgaagcagaacucaaaugcuucggcaacacagcaguagccaaaugcaacgaaaaacaugacgaagaguucugcgacaugcuccgccuauucgacuucaacaaacaagccauacgucgacucaaagcagaagcacaaauguccauccagcuaaucaacaaagcugucaacgcgcucauaaacgaccaacucauaaugaaaaaccaccuacgagacaucaugggcaucccauacugcaacuacuccaaauacugguaccuaaaccacaccuccaccggcaaaaccucucuaccccgcugcuggcuugucuccaacggcucguaccucaacgaaacccacuucagcgacgacauagaacaacaagcugacaacaugaucaccgaaauguuacaaaaagaauaccucgaccgacaaggcaaaacaccccuaggccucguagacaucuuuguauucuccaccucuuucuaccuaaucuccaucuuccuucaucuaauaaaaauccccacccacagacacauugucgguaaacccugccccaaaccacaccgccucaaccauaugggcauaugcuccugcggccucuacaaacaacccggcguccccguccgcuggaaacgcuaa

SEQ ID NO: 2100 - RNA, 1473 nt, Artificial Sequence
  derived and/or modified protein sequence (opt11) from LASV(Lassa virus/H.sapiens-wt/NGA/2016/ISTH_0199;Clade II)__AVO03653__GPC
augggccagaucaucaccuucuuccaagaaguuccccacgucaucgaagaagucaugaacaucguccucaucgcacucucacuccuagcuauacucaaaggcaucuacaacgucgcaaccugcggccuauucggccucgucucauuccuccuccucugcggacgaucuugcagcaccaccuacaaaggcguuuacgaacuccagacccucgaacuggauauggccagccucaacaugaccaugccacucuccugcaccaaaaacaacucccaccacuacaucauggucggcaacgaaaccggccucgaacucacucuuacaaacacgucaauaauaaaccacaaauucugcaaucucuccgacgcacacaagaaaaaccucuacgaccacgcccucauguccaucauaucaacauuccaccucagcaucccaaacuuuaaccaauacgaagccaugucgugcgacuucaacggcggcaaaauuucaguccaauacaaccucucccacaccuacgccguagacgccgccaaccacugcggcaccauugccaacggcguccuacaaaccuucaugcgcauggcauggggcggcuccuacaucgcacucgacuccggcaaaggaaacugggauugcaucaugaccuccuaccaauaccucaucauccaaaacacaaccugggaagaccacugccaauucucccgccccuccccaaucggcuaccucggccuccuaucacaaagaacccgcgacaucuacauuagccgcagacuacucggcacauucaccuggacccucuccgacuccgagggcaacgaaaccccagggggcuacugccucacccgcuggaugcugaucgaagcggaacuaaaaugcuucggcaacaccgccgucgccaaaugcaacgaaaaacacgacgaggaguucugcgacaugcuccgauuguucgacuuuaacaaacaagcuaucucccgccucaaaacagaagcacaaauguccauccaacucaucaauaaggcaguuaacgcccucaucaacgaccaacuaauaaugaaaaaucaccuccgcgacauaaugggcauccccuacugcaacuacuccaaauacugguaccucaaccacaccgucaccggcaagacaucccuuccccgcugcuggcuugucucaaacggcuccuaccucaacgaaacacacuucuccgacgacaucgagcaacaagccgacaacaugauaacagaaaugcuccaaaaggaauacauugaccgccaaggcaaaacaccccuaggacucgucgaccucuucgucuucucuaccucauucuaccuaaucucaaucuuucuacaccucguaaaaauccccacccaccgucacguaaucggaaaaccaugcccaaaaccccaccgccucaaccauaugggcaucugcucaugcgggcucuacaaacacccaggcguacccgucaaauggaagcgcuaa

SEQ ID NO: 2101 - RNA, 1473 nt, Artificial Sequence
  derived and/or modified protein sequence (opt11) from LASV(Lassa virus/H.sapiens-wt/NGA/2016/ISTH_0419;Clade II)__AVO03539__GPC
augggccagaucgucaccuucuuucaagaagucccacacgucaucgaagaagucaugaacaucguccucauugcccucagccuacucgccauccuaaaaggcaucuacaacuucgcuaccugcggacuaaucggacucaucaccuuccuauuccucugcggccgcucaugcuccgccauauacaaaggcuccuaccaacuccaaacuaucgaacucaacauggaaacccucaacaugacaaugccccucuccugcaccaagaacucaucacaccacuacauccgcguaggcaacgaaacuggccuagaacucacacuaaccaacaucucaaucaucgaccacaaauuuugcaaccuauccgacgcccacaagaaaaaccuauacgaccacgcacugauguccaucaucucaaccuuccaccuaucaauaccaaauuucaaccaguacgaggccauguccugcgacuucaacggaggaaaaaucuccgugcaauacaaccucagccacaccuacgccgucgacgccgccaaccacugcggcacggucgccaacggcguucuacagaccuucaugcguauggcauggggcggguccuacaucgcccucgacuccggccgggggaacugggacugcaucaugaccagcuaccaauaccucaucauccagaacacaaccugggaagaccacugccaguucucccgcccaucccccaucggcuaccucggacuccucucucaacgaacccgcgacaucuauauuucgcgccgucuccuuggcaccuucaccuggacccucuccgacuccgaaggcaaagaaacaccaggaggcuacugccucacccgcuggaugcucaucgaagcugaacucaaaugcuucggcaacaccgccgucgccaaaugcaacgaaaaacacgacgaggaguucugcgacaugcucagacucuucgacuucaacaaacaagccauccaacgccucaaagccgaagcccaaauguccauacaacucaucaacaaagccgucaacgcccucaucaacgaccaacucaucaugaaaaaccaccuccgagacaucaugggcaucccuuacugcaacuacucuaaauacugguaccucaaccacaccucaacaggacgcacaucacucccacgcugcuggcuagucucgaacggcucauaccucaacgaaacccacuucucagaugacauagaacaacaagccgacaacaugauaaccgaaaugcuccaaaaagaauacaucgaccgccaaggcaaaacuccccuaggacucgucgaccuauucguauucuccaccuccuucuaccucauaucaauauuccuccaccucauaaaaauacccacgcaccgccacaucgucggcaaguccugccccaaaccccaccgucucaaccacaugggcauaugcuccugcggccucuacaaacaacccggcguccccgugaaauggaaacguuaa

SEQ ID NO: 2102 - RNA, 1473 nt, Artificial Sequence
  derived and/or modified protein sequence (opt11) from LASV(Lassa virus/H.sapiens-wt/NGA/2016/ISTH_0447;Clade II)__AVO03559__GPC
augggccaaaucaucaccuuuuuccaggaagucccccacgucaucgaggaagucaugaacaucguccucaucgcacugucacuacuagccaucuuaaagggaaucuacaacauugcuaccugcggccuauucggccucgucucauuccuccuccuaugcggacgcuccugcuccaccaccuacaaaggcgucuacgagcuccaaacccucgaacucgacauggcaucccuaaacaugacaaugccucuaucgugcaccaaaaauaacucacaccacuacaucaugguaggcaacgaaaccggccucgaacugacccuuacgaacaccuccauaaucaaccacaaauucugcaaccuaucugacgcccacaaaaagaaccuuuacgaccacacccucaugucuaucauauccaccuuccaccucucuauccccaacuucaaucaguacgaagccauguccugcgacuucaacggcgguaaaaucucaguacaguacaaccucucucacgccuacgccguagacgccgcuaaccacugcggcaccaucgcuaacggcguccuucaaacauucaugcggauggcauggggcggcuccuacauagcccucgacucggguaaagguaacugggacugcaucaugaccuccuaccaauaccucaucauccaaaacaccaccugggaagaccauugccaauucuccagacccagccccaucggcuaccuaggccucuuaucccaacgcacccgcgauaucuacaucucccgccgccuccuaggcacguucacauggacacuuuccgacucagaaggcaaugaaacccccggcggcuacugccucacccgcuggaugcuaaucgaggccgaacucaaaugcuucggcaacacggccgucgccaaaugcaacgagaaacacgacgaggaguucugcgacaugcuacgacuguucgacuucaacaagcaagccauccgacgacugaaaaccgaagcgcaaaugucaauacaacuaaucaacaaagcuguaaacgcacuaaucaacgaccaacucauaaugaaaaaccaucugcgagacaucaugggcauacccuacugcaacuacuccaaauacugguaccucaaccacaccgucacaggcaaaaccucccucccacgcugcuggcucguaucaaacggaucauaccucaaugaaacccacuucagcgacgacauagaacaacaagcagacaacaugaucacugaacuccuccaaaaggaauacaucgaccgucaaggaaaaaccccacucggccuugucgaccucuucguguucuccaccuccuucuaucucauuuccauauuccuacaccucgucaagauucccacacaccgccacgucgucggcaaaccuugccccaaaccccaccgccucaaccacaugggcauaugcuccuguggccucuacaaacaccccggcguccccgucaaauggaaacguuaa

SEQ ID NO: 2103 - RNA, 1473 nt, Artificial Sequence
  derived and/or modified protein sequence (opt11) from LASV(Lassa virus/H.sapiens-wt/NGA/2016/ISTH_0543;Clade II)__AVO03595__GPC
augggccagaucaucacauucuuccaagaagucccccacguaaucgaagaagucaugaacaucguucuaaucgcccucucccuccucgcaauacucaaaggcaucuacaacaucgcaaccugcggccucuucggccucaucagcuuccuccuccucugcggacgguccugcucaacgacuuacaaaggagucuacgaacuccaaacacucgaacuugacauggccaaccucaauaugaccaugccucuauccugcaccaagaacaacagccaccacuacauaaugguaggcaacgagacuggccucgaacuuacccucacgaacacauccaucaucaaccacaaauucugcaaccuauccgacgcacacaagaaaaaccucuacgaccacgcccucaugucaaucaucagcaccuuccaccucuccauccccaacuucaaccaguacgaagccauguccugcgacuucaacggcggaaaaauaagcguucaauacaaccucucccacuccuacgccgucgacgccgccggccacugcggcacgaucgccaacggcguccuacaaacauucaugcgaauggccuggggcggaagcuacaucgcgcucgacuccggcaaaggaaacugggacugcaucaugaccucauaccaauaccuaguaauccaaaacaccaccugggaagaccacugccaauuuagccgacccucccccaucggcuaccuuggccuacuaagccaacgcaccagagauaucuauauuucucgacgccuacucggcacuuucaccuggacccucagcgacucagaaggcaaugaagcgccuggcggcuacugccuaacacguuggaugcucaucgaagcagagcucaagugcuucggcaacaccgccauagccaaaugcaacgaaaaacacgacgaagaguucugcgacaugcuccgccucuucgacuucaacaaacaagcaauuagacgacuaaaggccgaagcccaaauguccauccaacucauaaacaaagccgucaacgcacucaucaacgaccaacuaaucaugaaaaaccaucuccgagacaucaugggcauacccuacugcaacuacuccaaguacugguaccucaaccacacgguaaccggcaaaaccucccuccccaagugcuggcucguuuccaacggaagcuaccucaacgaaacacacuucuccgacgacaucgaacaacaggcagacaacaugauaaccgaacuacuccaaaaagaauacauggaccgacaaggaaaaacaccccucggccuagucgaccuauucgucuucagcaccucuuucuaccucaucucaaucuuccuccaccucgucaaaauccccacccaccgacacaucgucggccgcccaugccccaaaccacaccgccuuaaccacaugggcaucugcucaugcggacucuacaagcacccaggcgucccagucaaauggaaacgauaa

SEQ ID NO: 2104 - RNA, 1473 nt, Artificial Sequence
  derived and/or modified protein sequence (opt11) from LASV(Lassa virus/H.sapiens-wt/NGA/2016/ISTH_0565;Clade II)__AVO03637__GPC
augggucaaaucgucaccuucuuccaagaagucccccacguaauugaagaagucaugaacauagugcucaucgcacucucccuguuagccauacucaaagggaucuacaauguugcuaccugcggccucuucggccuaaucuccuuccuccuccucugcggacguuccugcuccaccacuuauaaaggcguauacgaacuacaaacccuugaacuagacauggccaaccuaaacaugaccaugccccucucaugcaccaagaacagcucccaccacuacaucauggucggcaacgaaaccggccucgaacuaacccucaccaacaccuccauuaucaaccacaaauucugcaaccucucagacgcccacaagaaaaaccuuuacgaucacgcccucauguccaucaucuccaccuuucaccucuccaucccaaacuuuaaccaauaugaggccaugucaugcgacuucaacgggggcaaaauaucaguccaauacaaccuaucucacaccuacgccgucgacgccgcaaaccacugcggcaccaucgccaacggcguccuacaaaccuucaugcgcauggccuggggcggcucauacaucgcccuugacuccggcaaaggcaacugggacugcaucaugaccuccuaccaauaccuaauuauccagaacacgaccugggaagaccacugccaauucucccgacccucccccaucggcuaccucggccuccucucccaacgcacacgcgacaucuacaucagccgacgccuccucggcacauucacauggacccucuccgacuccgaaggcaacgaagcccccggcggcuacugccucacacgcuggaugcucaucgaagccgaacuaaaaugcuucggaaacaccgccaucgcaaaaugcaacgaaaagcacgacgaagaguucugcgacaugcuacgacuauucgacuuuaacaaacaagcaaucaaacgccucaaauccgaagcccaaauguccauccaacucaucaacaaagccgucaacgcgcucaucaacgaccaacucaucaugaagaaccaccuaagagacauuaugggaauccccuacugcaacuacucucgguacugguaccucaaccacacugucaccggcaaaacaucacuaccgcgcugcuggcucaucagcaacggaucuuaccuuaacgaaacccacuucucagacgacaucgaacaacaggcugacaacaugaucaccgaacuacuccaaaaagaauacauggaccgucaaggaaaaacaccccucggccuagucgaccucuucguuuucuccaccucauucuaccucaucuccauuuuucuccaccuagucaaaaucccaacccaccgccauaucgucggacgccccugccccaaaccccaccgacucaaccacaugggaauuugcuccuguggccucuacaagcaccccggcgucccgguaaaauggaaacguuaa

SEQ ID NO: 2105 - RNA, 1473 nt, Artificial Sequence
  derived and/or modified protein sequence (opt11) from LASV(Lassa virus/H.sapiens-wt/NGA/2016/ISTH_0572;Clade II)__AVO03611__GPC
augggccaaauaauaaccuucuuccaagaagucccacacgucaucgaagaagucaugaacaucguccucauugcccuaagccuccuugccauacucaaaggcaucuacaauguagcaaccugcggccuauucggccuugucgccuuccuacuccuaugcggccgcuccugcucaaccacauacaaagguguguacgaacuucaaacccucgaacucgacauggccagccuaaacaugacaaugccccuaucuugcaccaagaacaacucacaucacuacaucaugguagggaacgaaacaggccuugaacucacccucaccaacacauccaucaucaaccacaaauucugcaaccucuccgacgcccacaagaagaaccucuacgaccacgcccucauguccaucauaucgaccuuccaccucucaauccccaauuucaaccagcacgaggccaugagcugcgacuucaacggaggcaaaauaucaguccaguacaaccuaagccacaccuaugccgucgacgccgccaaccacugcggcaccaucgccaacggaguacuccagaccuuuaugcgcauggccuggggcggaagcuacaucgcacuugacucaggcaaaggcuccugggacugcaucaugaccuccuaccaauaccuaaucauccagaacacaaccugggaagaccacugccaauucagccgccccuccccgaucggauaccucggccuacuaucgcaacgcacccgcgacaucuacauuucccgacgacuacucggcacguucaccuggacccucuccgacuccgaagguaacgaaaccccgggcggcuacugccucacucgcuggaugcucaucgaagccgaacuaaaaugcuuuggaaacaccgcagucgccaaaugcaacgaaaaacacgacgaagaguucugcgauaugcuccgccucuucgacuucaacaaacaagccauccgacgacuaaaaaccgaagcacaaauguccauccaacuaaucaacaaagccguaaaugcacucaucaacgaccaacucaucaugaaaaaccaucugcgagacaucaugggcaucccauacugcaacuacucaaaauacugguaccucaaccacaccgucaccggucgcaccucccuaccccgaugcuggcucguauccaacggcucuuaccuaaacgaaacccacuucuccgacgacaucgaacaacaagcagacaacaugaucaccgaacuccuacagaaagaauacauggaccgacaaggcaagacgccccuaggauuaguagaccucuucgucuucuccaccuccuucuaccucauaagcaucuuccuccaccucaucaaaauacccacccaccgccacguaaucggcaaacccugccccaaaccccacagacuaaaccacaugggcaucugcuccugcggccucuacaaacaccccgguguccccgucaaauggaaaagauaa

SEQ ID NO: 2106 - RNA, 1473 nt, Artificial Sequence
  derived and/or modified protein sequence (opt11) from LASV(Lassa virus/H.sapiens-wt/NGA/2016/ISTH_0610;Clade II)__AVO03585__GPC
augggccaaaucauaaccuucuuccaagaagucccacauguaaucgaagaagucaugaacauaguccucaucgcacucucccuccucgcaauccucaaaggaguuuacaacgucgccacaugcggccuauucggccuagucucuuuccuauuacuuugcggacgcuccugcuccaccaccuauaaaggcgucuacgaacuccaaacccuagaacucgacauggccucccucaacaugaccaugccccucagcuguaccaaaaacaacucacaccacuacaucauggucggaaacgaaaccggccucgagcuuacacuuacaaacacaucaaucaucaaccacaaauucugcaacuuaagcgacgcacacaagaaaaaccucuacgaccacgcccuaaugucuaucaucucaaccuuucaccucuccaucccaaacuucaaccaauacgaagccauguccugcgacuucaacggcggaaaaaucuccguccaauacaaccuaucccacaccuacgccguagacgcggcuaaccacugcggcaccaucgccaacggaguccuacagacguucaugcgcauggcauggggaggcuccuacaucgcccucgacuccggacgcggcagcugggacugcauaaugaccagcuaccaauaccuaaucauacaaaacaccaccugggaagaccacugccaguucagccgcccaucaccaaucggcuaccugggccuacuuucccaaagaacccgcgacauauacaucagccgccgccuccuaggcaccuucaccuggacccucagcgacuccgaaggaaacgagacccccggcggcuacugccuaacacgcuggaugcucaucgaagccgaacuaaaaugcuucggcaacaccgccgucgccaaaugcaacgaaaaacacgacgaagaguucugugacaugcuccgauuauucgauuucaacaaacaagcaauccgccgacucaaagcagaagcacaaaugucaauacaacucaucaacaaagccgucaaugcucucaucaacgaccagcucaucaugaaaaaccaccuacgcgacaucaugggaauccccuacugcaacuacuccaaauacugguaccucaaccacaccgucaccggacggacaucccucccacgcugcuggcucguauccaacggcuccuaccucaacgaaacccacuucuccgacgauaucgagcaacaagccgauaacaugaucaccgaacuacuacaaaaagaauacaucgaccgacaaggcaaaacgccucucggccucgucgaccucuucgucuucuccaccuccuuuuaccucaucuccaucuuccuccaucuugucaaaauccccacgcaccgccacauaaucggcaaacccugccccaaaccccaccgccuaaaccacaugggcaucugcuccugcggauuauacaaacaccccggcguaccaguaaaauggaaacgguaa

SEQ ID NO: 2107 - RNA, 1473 nt, Artificial Sequence
  derived and/or modified protein sequence (opt11) from LASV(Lassa virus/H.sapiens-wt/NGA/2016/ISTH_0621;Clade II)__AVO03543__GPC
augggucagaucgucacauucuuccaagaaaucccccacgucguagaagaaaucaugaacauaguccuuaucacccucucccuccucgccauccuaaaaggacucuacaacuucgccacaugcggccucauaggacuaaucacauuccucuuccucugcggccgcucaugcuccaccaucuacaaaggcuccuaccaacuccaagcccucgagcucaacauggaaacccucaacaugaccaugccacucuccugcacuaaaaacaacucccaccacuacauccgcgucggaaaugaaacaggccuugaacucacccucaccaacacaucuaucaucgaucacaaauucugcaaucucuccgacgcacacaaacgcaaccucuaugaccacacccucauguccauaaucuccacuuuccaccuaucaauccccaacuucaaccaauacgaagccauguccugcgacuucaacggcggcaaaauauccguucaauacaaccucucccacuccuacgccggagaugccgcccgacacugcggcacugucgccaacggaguccuacaaacuuucaugcgcauggcauggggcggcucauacaucgcccucgacuccggcaaaggcaacugggacugcaucaugaccuccuaccaauaccugauaauccaaaacaccaccugggaaaaccacugccaauucagcagacccucacccaucggcuaccucggccuccuaucccagcgcacccgagacaucuacauuucccgucgccuucuagguaccuucacuuggacccuuagcgacuccgaagggaaagaaaccccaggggguuacugccucacacgcuggaugcucaucgaagccgaacucaaaugcuucggcaacacugcuguugcuaaaugcaacgaaaaacacgacgaagaguucugcgacaugcuacgccuauucgacuucaacaagcaggccauccaaagacuuaaaacagaagcccaaauguccauccaacuaaucaacaaagcagucaacgcccucaucaacgaccaacugaucaugaaaaaucaccuucgcgacaucaugggcauccccuacugcaacuacucgaaauacugguaccuuaaccacaccaccacuggcaaaaccucccuaccaaaaugcuggcucgucagcaacggauccuaccucaacgaaacacacuucucagacgacaucgaacaacaagccgacaacaugauuaccgaaaugcuccaaaaagaguacauagaccgccaaggcaaaaccccacucggccuagucgaccucuucgucuucuccaccucuuucuaccuuauuuccaucuuccuacaccuaaucaaaaucccaacccaccgccacaucgucggaaaauccugccccaagccccaccgacucaaccacaugggaaucugcuccugcggacucuacaaacagccaggcguccucguaaaauggaaacgcuaa

SEQ ID NO: 2108 - RNA, 1473 nt, Artificial Sequence
  derived and/or modified protein sequence (opt11) from LASV(Lassa virus/H.sapiens-wt/NGA/2016/ISTH_0701;Clade II)__AVO03629__GPC
augggccaaaucauaaccuucuuucaagaagucccacacgucauagaagaagucaugaacaucguacucaucgcccucucccuccucgccauacucaaaggcauauacaacguugcuaccugcggccuauucggacuuguauccuuccuccuacuauguggccgcuccugcuccaccaccuacaagggcguauacgaacuccaaacucucgaacucgacauggcaucacuuaacaugaccaugccacucagcugcaccaaaaacaacucccaccacuacaucauggucggaaacgaaaccggccucgaacucacacucacaaacaccuccauaaucggccacaaauucuguaaccucagcgacgcccauaagaaaaaccuauacgaccacgcccuaaugagcauaaucucgacauuccaccucuccauccccaacuucaaccaauacgaagcaaugucuugcgacuucaacggagguaaaaucucuguccaauacaaccuuucacacgccuacgccgucgacgccgccaaccacugcggcaccaucgccaacggcguccuacagacauucaugagaauggccuggggcggguccuacaucgcccuagacuccggaaaaggcucaugggacugcaucaugaccucuuaccaauaucucaucauccaaaacacuaccugggaagaccacugccaauucucacgccccuccccaaucggcuaucugggccuacucucacaacgaacccgcgacaucuacaucucccgccgccuccucggcaccuucaccuggacccucucagacucagaaggcaacgaaacacccggcgguuacugccucacacgcuggaugcucauagaagccgaacucaaaugcuucggcaacaccgcaguagccaaaugcaacgaaaaacacgacgaagaauuuugcgacaugcuacgccucuucgacuucaacaaacaagccauacgccgccucaaaaccgaagcccaaaugagcauccaacucauaaacaaagccgucaaugcccuaauaaacgaccaacuuaucaugaaaaaccaccuccgagacaucaugggcauccccuacugcaacuacuccaaauacugguaccuaaaucacaccgucaccggaaaaacaucacucccucgaugcuggcucgucuccaacggcuccuaccucaacgaaacucacuucuccgacgacauagagcaacaagcagacaacaugauaacagaacuccuccagaaagaauacaucgaccgccaaggcaaaacacccuuaggacucgucgaccuauucgucuucuccaccuccuucuaccucaucuccaucuuccuccaccuaguaaaaauccccacccaccgacaugucaucggcaaacccugcccgaaaccccaccgccucaaccauauggggauaugcucaugcggcuuauacaaacaccccggcgucccagucaaguggaaacgcuaa

SEQ ID NO: 2109 - RNA, 1473 nt, Artificial Sequence
  derived and/or modified protein sequence (opt11) from LASV(Lassa virus/H.sapiens-wt/NGA/2016/ISTH_0702;Clade II)__AVO03557__GPC
augggccagaucaucaccuuuuuccaagaggucccccacguuaucgaagaagucaugaacauaguccuaaucgcccucucguuacucgccguccucaaaggaaucuacaacguagccacaugcggacucuuuggacucgucgccuuccuccugcuaugcggccguucaugcucaaccaccuacaaaggcgucuacgaacuccaaacacuagaacuagacauggcaaaccucaacaugaccaugccccucagcugcaccaaaaacaacucacaucacuacauaauggucggcaacgaaaccggccuugaacucacacucacaaacacauccauuaucaaccacaaauucuguaaccucuccgacgcacacaagaaaaaccuuuacgaccacgcucuuauguccauuauauccacguuccaccuaucaauccccaacuucaaccaauacgaagccauguccugcgacuucaacggcggaaaaauaagcguccaauacaaccugagccacaccuacgccgucgacgcagccaaccacugcggcacaaucgccaacggcguccuccaaaccuucaugcgcauggcauggggcggauccuauaucgcccucgacuccggcaaaggaagcugggacugcaucaugacauccuaccaauaccucaucauacaaaacaccacaugggaagaccacugccaauucagccgcccaucccccauaggcuaccucggccugcugagccagcgcacccgcgacaucuacaucucccgccgccuccucggcacguucacauggacacucuccgacucagaaggcaacgagacaccugguggcuacugccucacacgcuggaugcuuaucgaagcagaacucaagugcuuuggaaacaccgccgucgccaaaugcaacgagaaacacgacgaagaguucugcgauaugcuccgccuauucgacuucaacaaacaagcgauccgccgccucaaaaccgaagcccaaaugagcauccaacucaucaacaaggccguuaaugcccucaucaacgaccaacuuaucaugaaaaaccaucuacgagacaucaugggcauccccuacugcaacuacucaaaauauugguaccuaaaccacaccgucaccggccgcaccucacuacccagaugcuggcucgucucuaacggcucguaccucaacgaaacccacuucagcgacgacaucgaacaacaagccgacaacaugauuaccgagcuacuccaaaaagaauacauggaccgccaaggaaaaacaccacuaggacuggucgaccucuucgucuucuccacauccuucuaccucaucuccaucuuccuccaucuuauaaaaauaccaacgcaccgccacguaauuggcaaacccugccccaaaccacaccgacucaaccacaugggaaucugcagcugcggccucuacaaacacccaggcguccccgucaaauggaaacgauaa

SEQ ID NO: 2110 - RNA, 1473 nt, Artificial Sequence
  derived and/or modified protein sequence (opt11) from LASV(Lassa virus/H.sapiens-wt/NGA/2016/ISTH_0703;Clade II)__AVO03597__GPC
augggccagaucaucacauucuuccaagaagucccacacgucauagaagaaguuaugaacauaguccucaucgcacucucccuccucgccauccucaaaggcaucuacaacgucgcaaccugcggccucuuuggccucgucucauuccuccucuuaugcggccgcuccugcagcaccaccuacaaaggcgucuacgaacuccaaacacucgaacucgacauggccagccucaacaugaccaugccacucagcugcaccaaaaacaacucccaucacuauaucaugguuggcaacgaaacaggccuagaacuaacacuaaccaacacauccauuaucaaccacaaauucugcaacuuaucagacgcccacaagaaaaaccuauacgaccacgcccucauguccaucaucuccacauuccaccucucaauccccaacuucaaccaauacgaagccauguccugcgacuucaauggaggcaaaauuuccguacaauacaaccuaucccacaccuacgccgucgacgccgcuucacacuguggcaccaucgccaacggcguacuccaaacuuucaugcgcauggccuggggcggcucauacauagcccuagacagcggcaaaggcuccugggacugcaucaugaccucauaccaauaccuuaucauacaaaacaccaccugggaagaccacugccaauucucccgcccaagccccaucggcuaccugggccuccuaucucaaaggacccgcgacauauacaucucccggcgacuccugggcaccuucaccuggacacucuccgacuccgaaggcaacgaaacccccggagguuacugccucacccgcuggaugcucauugaagcagaacucaaaugcuucgguaacaccgcaguagcaaaaugcaacgaaaaacacgacgaagaguucugugacaugcuacgacucuucgacuuuaacaaacaagccauccgccgccucaaaaccgaagcacagauguccauccaacucaucaacaaggccgucaacgcacucaucaacgaccaacucauuaugaaaaaccaccuccgagacaucaugggcauccccuauugcaacuauaguaaauacugguaccucaaccacaccguaacuggacgcaccucccuccccagauguuggcucguauccaacggcuccuaccuuaacgaaacccacuucuccgacgacaucgaacaacaagccgacaacaugauaaccgaacuccuccaaaaagaauacaucgaacgacaaggcaagaccccacucggacucgucgaccucuucgucuucuccaccuccuucuaccuuaucuccaucuuccuccaccuaauaaaaauccccacccaccgccacgucaucggcaaacccugccccaaaccccaccgccuuaaccacaugggcauaugcuccugcggacucuacaagcacccuggugucccagucaaauggaagcguuaa

SEQ ID NO: 2111 - RNA, 1473 nt, Artificial Sequence
  derived and/or modified protein sequence (opt11) from LASV(Lassa virus/H.sapiens-wt/NGA/2016/ISTH_0717;Clade II)__AVO03547__GPC
augggccaaauugucaccuucuuccaagaaguuccacacgucaucgaagaagucaugaacauuguacuaauugcccucucaauccucgccauccuaaaaggacucuauaacguugcuaccugcggccuaaucggccucgucaccuuccugcuccuuuccggucgauccugcuccaugauauacaaaggcgucuacgaacuacaaacccucgaacucaacauggaaacacuaaacaugaccaugccccucuccugcaccaaaaacaacagccaccauuacaucauggucggcaacgaaaccggacucgaacuaacacugaccaacacaucccuccucaaccacaaauucugcaaucucuccgacgcccacaagaaaaaccucuacgaccacacacucaugucaaucaucucuaccuuccaccuaucuauccccaacuucaaccaguacgaagccauguccugcgacuucaacggcggaaaaaucaccguccaauacaaccuaagccacacauacgccgucgacgccgucaaccacugcggcacacucgccaacggcauacuucaaaccuucaugcgaauggccuggggcggauccuacaucgccuuagacucucgccacggcuccugggacuguauaaugaccuccuaccaauaucucauaauccaaaacaccaccugggaagaccacugccaauucucacgccccuccccuaucggcuaccucggccuccuaagccagcgcacucgcgacaucuacaucucccgacgccuccucggcaccuucaccuggacucucuccgacuccgaaggcaaugaaaccccaggcggcuacugucuaacacgguggaugcugaucgaagccgaacucaaaugcuucggaaacaccgccgucgccaaaugcaacgaaaaacacgacgaagaguucugcgauaugcuacgccucuucgacuuuaacaaacaagccauccgccgccuaaaagccgaagcccagaugagcauccaacuaaucaacaaagccgucaacgcccuuaucaacgaucaacucaucaugaaaaaccaccuccgcgacaucaugggaauacccuacugcaacuacuccaaauacugguaccuuaaucauacauccacaggccgaacaucccuaccccgaugcuggcucgucucgaacggauccuauuuaaacgaaacacacuucucagacgacaucgaacagcaagccgacaacaugaucaccgaaaugcuucaaaaagaauaccucgaccgacagggcaaaaccccacucggccuagucgaccucuucgucuucuccacauccuucuaccuaaucuccauauuccuccaccucaucaaaaucccaacccacagacacaucgucggaaaacccugccccaaaccccaccgccugaaccacauggguaucugcuccugcggccucuacaaacaacccggcguccccguccgcuggaaacgcuaa

SEQ ID NO: 2112 - RNA, 1473 nt, Artificial Sequence
  derived and/or modified protein sequence (opt11) from LASV(Lassa virus/H.sapiens-wt/NGA/2016/ISTH_0753;Clade II)__AVO03609__GPC
augggccaaaucaucacguucuuccaagaggucccacacgucaucgaagaagucaugaacaucguacucauagcuuugagccuccucgccauccucaaaggcaucuacaauguagcaaccugcggucucuuuggccuagucagcuuccuccuacuaugcgggcgcucaugcucuaccaccuacaaaggcguauacgagcuccaaacccucgaacucgacauggccagccuaaacaugaccaugccccucuccugcaccaaaaacaauucucaccacuacaucauggucggcaacgagacaggacucgaacucacccucaccaacaccucuaucaucaaccacaaauucugcaaccuauccgacgcccacaagaaaaaccucuacgaccacgcccucaugagcaucaucuccacguuccaccucuccauccccaauuucaaccaguacgaagccaugagcugcgacuucaacggcggaaaaaucucaguccaauacaaccuaucucacaccuacgcagucgacgccgccaaccacugcggcaccauagccaacggcguccuacagaccuucaugcggauggccuggggcggcucuuacaucgcccuagacuccggcaaaggcaacugggacugcaucaugaccuccuaccaauaccucaucauacaaaacacaacaugggaagaccacugccaguucucccgccccucucccaucggcuaccucggccuacucucacagcgcacccgcgacaucuacaucagccgccgccugcuuggcacauucaccuggacccuaucagacucugaaggaaacgaaacccccggcggcuacugccucacccgauggauguuaaucgaagcagaacucaaaugcuucggaaauaccgcagucgccaaauguaacgaaaaacacgacgaggaguucugcgacaugcucagacucuucgacuucaacaaacaagccaucucccgccucaaaaccgaagcccaaaugagcauccaacuaauaaacaaggccgucaacgcccuuaucaacgaccaacucaucaugaaaaaccaccuccgcgacaucaugggcauccccuacuguaacuacucaaaauacugguaccucaaccacacagucaccggccgaacaucccuaccccgcugcuggcucgucucaaauggcagcuaccucaacgaaacacacuucuccgacgacaucgaacaacaagcagacaauaugaucaccgaacuacuccaaaaagaauacauggaccgccaaggcaagaccccacucggacuugucgaccuguucgucuucucaacauccuucuaccucauauccaucuuccuucaccucguaaaaauacccacacaccgccacgucaucggaaaacccugccccaagccacaccgucuuaaccacaugggaaucugcucaugcggucuauacaaacacccaggaguccccguuaaauggaaacgcuaa

SEQ ID NO: 2113 - RNA, 1473 nt, Artificial Sequence
  derived and/or modified protein sequence (opt11) from LASV(Lassa virus/H.sapiens-wt/NGA/2016/ISTH_0759;Clade II)__AVO03593__GPC
augggccaaaucaucaccuucuuccaagaagucccccacgucaucgaagaagucaugaacaucguccuaauagcccugucccuccuagccauccuaaaagguaucuacaacgucgccacaugcggacucuucggacuggucucauuccuacuccucugcggacgcuccugcagcaccaccuacaaaggagucuacgaacuccaaacccucgaacucgacauggccucucuaaacaugaccaugccccuguccugcaccaaaaacaacucccaccacuacaucaugguaggcaacgaaaccggacuagaacucacccuuaccaacaccagcaucaucaaccacaaauucugcaaccucuccgacgcccacaagaaaaaccucuacgaccacacccuaaugagcauaaucuccaccuuucaucucuccauacccaacuucaaccaguacgaagcaaugagcugcgacuucaauggcggaaaaauaagcguccaguacaaccuaucccacacauacgcaguggacgccgcaaaccauugcgggacaaucgccaacgguguccuacaaaccuucaugcguauggccuggggaggcucauacaucgcccuugacuccggcaaaggcuccugggacugcaucaugaccuccuaccaauaccucauaauccaaaacaccucuugggaagaccacugccaauucucacgacccucacccaucggcuaccucggccuccucucccaacgaaccagagacaucuacaucucccgccgccuccucggcacauucacauggacccucuccgacuccgaaggcaacgaaacccccggcggcuacugccucacccgcuggaugcucauagaagccgaacuaaaaugcuucggcaacaccgcagucgcaaaaugcaacgaaaaacacgacgaagaguucugcgacaugcuccgccucuucgacuucaacaaacaagccauccgucgccucaaaaccgaagcccaaaugaguauccagcucaucaacaaagccguaaacgcccucaucaacgaccaacucaucaugaaaaaccaccuccgggacauaaugggcauacccuacugcaacuacagcaaguacugguaccucaaccacaccgugaccggaaaaacaucacucccccgcugcuggcuagucuccaacggcuccuaccucaacgaaacacacuucuccgacgacaucgaacaacaagccgacaacaugauaaccgaacuccuccaaaaggaauacaucgaccgccagggcaaaacgccccucggccuagucgaccucuucgucuucuccaccuccuucuaccucaucuccaucuuccuucaccucgucaaaauaccuacacaccgccacgucaucgguaaacccugucccaaaccgcaccgccucaaccacaugggcauuuguucaugcggacucuauaaacacccaggaguucccgucaaauggaaaagauaa

SEQ ID NO: 2114 - RNA, 1473 nt, Artificial Sequence
  derived and/or modified protein sequence (opt11) from LASV(Lassa virus/H.sapiens-wt/NGA/2016/ISTH_0777;Clade II)__AVO03615__GPC
augggccaaaucaucacauucuuccaagaagucccccaugucauagaagaggucaugaacauaguccucaucgcccucucccuacucgcuauccuaaaaggaauauacaacguagcaaccugcggccuacuuggucucaucucauuucuacuucucugcggccgcagcugcuccaccaccuacaaaggcguauaugaacuccaaacccucgaacucgacauggccaaccucaacaugaccaugccccucucgugcaccaaaaauucgucccaccacuacaucauggucggaaaugaaaccggccuagaacucacccucacaaacaccuccauaauaaaccacaaguuuugcaaccucuccgacgcccacaagaaaaaccuauacgaccaugcccuaaugucaauaaucucaaccuuccaccuuuccauacccaacuucaaccaauacgaagccaugaguugcgacuucaacggcggcaaaaucucaguucaauauaaccucagccacgccuacgcugucgaugccgccaaccacugcggcaccauagcuaacgguguccuacagaccuucaugcgcauggcauggggcggcuccuacauagcacuagacucaggaaaaggcaacugggacugcaucaugaccagcuaccaauaccuaaucauccaaaacacaaccugggaagaccauugccaauucucccgacccucccccaucggcuaccuuggccuccucucucaacgcacacgcgacaucuacaucucccgccgccuacucggcaccuucacuuggacccucuccgacuccgagggcaacgaagcccccggcggcuacugccuaacccgcuggaugcuaaucgaagccgaacucaagugcuucggaaacaccgcaaucgcaaaaugcaacgaaaaacacgacgaagaguucugcgauaugcuacgccucuucgacuucaacaagcaagccauccgccgccucaaaacagaggcccaaaugucaauacaacuaaucaacaaagccguaaacgcccuaaucaacgaccaacucauaaugaaaaaucaccuccgcgacaucaugggaauccccuacugcaacuacuccaaauacugguaccuuaaccacaccgucaccggaaaaacuucccucccacgcugcuggcucaucucaaacggcuccuaccucaacgagacccacuucuccgacgacauagaacaacaagccgacaacaugaucaccgaacuccuucaaaaagaauacauggaccgccaaggcaaaacaccacucggacucgucgaccuauucgucuucuccaccuccuucuaccucaucuccauauuccuccaccucgucaaaauacccacccaccgccacaucgucggcaagccaugccccaaaccacaccgccucaaccacaugggcaucugcuccugcggccucuacaaacaccccggagucccaguuaaauggaagcgcuaa

SEQ ID NO: 2115 - RNA, 1473 nt, Artificial Sequence
  derived and/or modified protein sequence (opt11) from LASV(Lassa virus/H.sapiens-wt/NGA/2016/ISTH_0779;Clade II)__AVO03655__GPC
augggacaaaucaucaccuucuuccaagaagucccccacgucgucgaagaaguuaugaacgucguccucauagcccugucccuccuagcuauccucaaaggaaucuacaacauugcaaccugcggacucuucggccucaucuccuuccuacuccucugcggacgcucgugcagcaccacuuacaagggcgucuacgaacuccaaacucuagaacucgacauggccaaccucaacaugaccaugccccucuccugcaccaaaaacaacagccaccauuacaucauggucgguaacgaaaccggccucgaacuuacccucacaaacaccuccauuauaaaccacaaauucugcaaccucagcgacgcccacaaaaagaaccucuacgaccauacccugauguccaucaucucaaccuuccaucucucaauccccaacuucaaccaauacgaagccauguccugcgacuucaacggcgguaaaaucuccguacaauacaaccuaucccacggauacgccgucgacgcagccaaccacugcggaacaaucgcaaacggcguacuccaaaccuucaugcgcauggccugggguggguccuacauagcacuagacuccggcaaaggcaacugggacuguaucaugaccuccuaccaauaccuagucauccaaaacaccaccugggaagaccacugccaauucucccgcccaucacccaucggguaccucggccuccucucccagcguacacgagauaucuacauuucccgccgccuccugggcacauucaccuggacccuuuccgacuccgaaggcaacgacgcccccggaggauacugccucacccgauggaugcucaucgaggccgaacucaagugcuucggcaacacugccaucgcuaagugcaacgaaaaacacgacgaagaguucugcgacaugcuacgccucuuugacuucaaccgccaagccaucaaacgccuuaagaccgaagcacaaaugucaauucaacuaaucaacaaagccgucaacgcacuaaucaacgaccaacuaaucaugaaaaaccaucuccgcgacauuaugggaauccccuacugcaacuacuccaaauacugguaccucaacaacaccgucacaggcaaaagcucacucccaaaaugcuggcucgucuccaacggcuccuacuuaaacgaaacccacuucucagacgauaucgaacaacaagccgacaacaugaucacagaaaugcuccaaaaagaauacauagaccgccaaggcaaaacaccccuaggccuggucgaucuauucgucuucuccaccagcuucuaccuaauauccauauuccuacaccuaguccgcauccccacccaccgacacaucaccggaaaaccaugcccaaaaccacaucggcuaaaccacaugggcaucugcucuugcggccucuacaaacagcccggugucccgguaaaauggaaacgcuaa

SEQ ID NO: 2116 - RNA, 1473 nt, Artificial Sequence
  derived and/or modified protein sequence (opt11) from LASV(Lassa virus/H.sapiens-wt/NGA/2016/ISTH_0917;Clade II)__AVO03535__GPC
augggacaaauugucaccuucuuccaagaagucccccacgucaucgaagaaaucaugaacauuguacucaucacccucagccuccucgccauccucaaaggcgucuacaaccucgcaaccugcggccuaauaggccucaucacauuccuauuccuuugcggccgauccugcuccaugaccuacaaaggcaacuaucaacucgaaacccuagaacucaauauggagaugcucaacaugaccaugccacuuuccugcaccaagaacaacucccaccacuacauccgcgucggcaacgaaaccggacucgaacuaacccucaccaacaccuccaucauccaacacaaauucugcaaucucucugacgcacacaaacgaaaccuuuacgaccacucccuaaugucgaucguauccacuuuccaccucuccauccccaacuucaaccaauacgaagcaaugucaugcgacuucaacgggggaaaaaucuccauccaguacaaccucucccacaccuacgcaggcgacgcagcaaaacacugcggcacccucgccaacggaauacuccaaaccuucaugagaauggccuggggaggcucuuacaucgcccucgacuccggacguggaggaugggacugcaucaugacaaacuaccaauaccuaaucauucaaaacgucaccugggaagaucacugccaauucucccgccccuccccaauagguuaccucggcuugcuaucacaacgcacccgcgaggucuacaucucccgucgacuacucggaacauucaccuggacucucuccgacuccgaaggaaacgaagcacccggcggcuacugccucacacguuggaugcucaucgaagccgaacucaaaugcuucggcaacacagccguagccaaauguaacgagaaacacgacgaggaguucugcgacaugcuacgacucuucgacuucaacaagcaagccauacgcagacucaaagccgaaacgcaaaugucaauucaacucaucaacaaagccguaaacgcccucaucaacgaccaacuuaucaugaaaaaccaccuacgcgacaucauggggauccccuacugcaacuauuccaaauacugguaccucaaccacaccaucaccggccgcaccucccuaccccguugcuggcucgucuccaacggcuccuaucucaaugaaacccacuucucagacgacauagaacaacaagcugacaacaugauaaccgaaauguuacaaaaagaauacaucgaccgccaaggaaaaacuccgcucgggcucgucgaccucuucgucuucucgaccucguucuaccuuaucuccaucuuccuacaccucguuaaaauccccacacaccgccacaucguaggcaaauccugcccaaaaccccaccgacuuaaccacauggggaucugcuccugcggacuauacaagcgaccaggcgucuccguccgcuggaaacgcuaa

SEQ ID NO: 2117 - RNA, 1473 nt, Artificial Sequence
  derived and/or modified protein sequence (opt11) from LASV(Lassa virus/H.sapiens-wt/NGA/2016/ISTH_1006;Clade II)__AVO03643__GPC
augggccaaauaauaaccuucuuccaagaagucccccacguaauagaagaaguaaugaacaucguccuaaucgcucucucccuccucgccauccuaaaaggaaucuacaacgucgcuacuugcggccucuucggucuagucgccuuccuacuccuuugcggccgcagcugcuccacaaccuacaaaggcgucuacgaacuccaaacacuagaacucgacauggccucccuuaacaugaccaugccacuauccugcaccaaaaacaacucccaucacuacauaauggucggcaacgaaaccggccucgaacucacccucaccaacaccuccauaaucaaucacaaauucugcaaucuaucugacgcucacaagaaaaaccucuacgaccacgcgcucauguccaucauaucaaccuuccaccuaucgauaccaaacuucaaccaauacgaagcaaugggcugugacuucaacggaggaaaaaucuccguccaguauaaccucucccacuccuacgcagucgacgccgccaaucacugcggcacaauagcuaacggcguacuccaaaccuuuaugagaauggccuggggcggauccuacauagcccucgacagcgguaaaggcuccugggacugcaucaugaccagcuaccaguaccuuaucauccaaaacaccacaugggaagaccacugccaguucucacgccccagccccauaggcuacuuaggccuccuaucccaacgcacccgcgauaucuacaucucccgccgccuacuagggacguucaccuggacccuauccgauuccgaaggcaacgaaacucccggcggcuacugccucacacguuggaugcucaucgaagccgaauuaaaaugcuucggcaacaccgccgucgccaaaugcaacgaaaaacacgacgaagaguucugcgacaugcugcgccuauucgacuucaacaaacaagccauccgccgucucaaaacagaagcccagauguccauccagcuaaucaacaaagccgucaacgcgcucaucaacgaccaacuaaucaugaaaaaccaccuacgagacaucaugggaauccccuacugcaacuacucaaaauacugguaccugaaucacaccgucaccggacgcacaucacuccccagaugcuggcucguaucaaacggcuccuaccucaaugaaacccacuucucagacgacauugaacaacaagcggacaacaugaucaccgaacuccuacaaaaagaauacauggaccgacaaggaaaaacaccccucggccuagucgaccucuucgucuucucgacauccuucuaccuaauuuccauauuccuacaccucaucaaaauccccacccaccgccacgucaucggaaaacccugccccaaaccccaccgccuaaaccacaugggcaucugcuccugcggacucuacaaacaccccggcguacccgucaaauggaaacguuag

SEQ ID NO: 2118 - RNA, 1473 nt, Artificial Sequence
  derived and/or modified protein sequence (opt11) from LASV(Lassa virus/H.sapiens-wt/NGA/2016/ISTH_1026;Clade II)__AVO03589__GPC
augggacaaaucaucacuuucuuccaagaagucccccacgucaucgaagaaguaaugaacaucguccucaucgcgcucucccuccucgccauucuaaaaggcaucuauaacgucgcaaccugcggccuauucggacucgucucuuuccuccucuuaugcggucgcuccuguuccacaaccuacaaaggagucuacgaacuccaaacccucgaacuagacauggccucccuaaauaugaccaugccacucuccugcaccaaaaacaauucacaccacuacauaauggucggcaaugaaacaggccucgaacucacccuaacaaacaccucaaucaucaaccacaaauucugcaaccucucggacgcccacaaaaagaaccuuuacgaucacgcccucaugucaaucaucuccaccuuccaccucuccauccccaacuucaaccaauacgaagccauguccugugacuucaacggcggaaaaauaucaguccaguacaaccucucgcacgccuacgcaaucgaugccgcuucccacugcggcaccaucgccaacggcguccuucagaccuucaugcgaauggcauggggcggguccuacauagcccuugacuccggcaaaggaucgugggacugcaucaugaccucauaccaauaccucaucauccaaaacaccaccugggaggaucacugucaauucucacgccccucccccaucggauaccuaggccuccucucccagcgcacacgcgacauauacaucucacgacgccuccucggaacauucaccuggacccucuccgacuccgagggaaacgaaacccccgguggcuacugccucacccguuggaugcucaucgaagccgaacucaaaugcuucggcaacacagccguagccaaaugcaacgaaaaacacgacgaagaguucugcgauaugcuacgucuuuucgacuucaacaaacaagccauccgaagacuuaagaccgaagcccaaauguccauccaacuaaucaacaaagccguaaacgcccucauaaacgaccaacucaucaugaaaaaucaccuccgcgacaucaugggcauucccuacugcaacuacagcaaauacugguaccuaaaccacaccgucacuggcaaaacaucacucccacgaugcuggcucguaucaaacggcuccuaccucaacgaaacccacuucuccgacgacaucgaacagcaagccgacaacaugaucaccgaacuccuccaaaaggaauacuuagaccgccagggcaaaacuccccucggccucgucgaccuauucgucuucuccacaucauucuaccuaaucucaauauuccuccaccucgucaaaauuccaacccaccgccacgucaucggccgacccugccccaagccacaucgccuuaaccacaugggcauaugcuccuguggccuuuacaaacaccccggcgucccggucaaauggaaacgcuaa

SEQ ID NO: 2119 - RNA, 1473 nt, Artificial Sequence
  derived and/or modified protein sequence (opt11) from LASV(Lassa virus/H.sapiens-wt/NGA/2016/ISTH_1070;Clade II)__AVO03651__GPC
augggucaaauaaucaccuucuuccaagaagucccccacgucaucgaagaagucaugaacaucguccuuaucgcacuuagccuccucgcuauacucaaaggcauauacaacguagcaaccugcggccucuucggacucgucucauuccuacuccuaugcggccgcuccugcuccacaacauacaaaggagucuacgaacuucaaacccuugaacucgacauggccucccuaaacaugacaaugccucucuccugcacuaaaaacaacucccaccacuacaucauggucggcaacgaaaccggacuagaacuuacacuuaccaacacauccaucaucaaccacaaauucugcaaccuaucggacgcccacaagaaaaaccucuacgaccacgcccuaaugucgaucaucucaaccuuccaccucuccauccccaacuuuaaccaauacgaagccaugucaugcgacuucaacggcggcaaaaucuccguccaauacaaccuuucccacaccuucgccgucgacgcugccaaccacugcggcaccauagcuaacggcguccuccaaaccuucaugcgaauggccuggggcgguuccuacaucgcccucgacuccggaaaaggcuccugggacugcaucaugaccagcuaccaauaccucaucauccaaaacaccaccugggaggaccacugccaauucucccgccccucccccauugguuaccucggucuccuuucccaacgcacacgagacaucuacauaucuagacgacuacuaggaaccuucaccuggacccucucagacuccgaagguaacgaaacccccggcggauacugccucacccguuggaugcucaucgaagccgaacuaaaauguuucggcaacaccgcgguagccaaauguaacgaaaaacacgacgaagaauuuugcgacaugcuacgccucuucgacuucaacaaacaagccauccgcagacucaaaacagaagcccaaaugagcauccaacucaucaacaaagcagucaacgcccucaucaacgaccaacucauaaugaaaaaccacuuacgagacaucaugggaaucccauacugcaacuacuccaaguacugguaucucaaccacaccgucaccggcaaaacaucccucccccgcugcuggcucguaucaaacggaucuuacuuaaacgaaacccacuucuccgacgacaucgaacagcaagccgacaacaugaucaccgaacuccuccaaaaagaguacauggaccgccaaggcaaaacaccccucggccucgucgaccuauucgucuucucaaccuccuucuaccugauuuccaucuuuuuacaccuaguaaaaauccccacccaccgccacaucauuggcaaaccaugucccaagccccaccgacucaaccacaugggaauaugcucuugcggccucuacaaacaccccggcgugccgguaaaauggaaacgcuag

SEQ ID NO: 2120 - RNA, 1473 nt, Artificial Sequence
  derived and/or modified protein sequence (opt11) from LASV(Lassa virus/H.sapiens-wt/NGA/2016/ISTH_1123;Clade II)__AVO03645__GPC
augggccaaaucauaacuuucuuccaggaagucccccacgucaucgaagaagucaugaacaucguccucauagcccucagccuacucgccauacucaaaggaaucuacaacguagccacaugcggccuauucggccuaguaucauuccuacuacuaugcggccgauccugcucaaccacauacaaaggagucuacgaacuucagacacuugaacucgacaugggaucccucaacaugacuaugccacuguccugcaccaaaaacaacucucaccacuacaucaugguuggcaaugaaacuggacucgaacucacacuaacaaacaccucaaucaucaaccacaaauucugcaaccucuccgacgcacacaaaaagaaccucuacgaccacgcucuaaugucuaucaucuccaccuuccaccucucaaucccuaacuucaaccaguacgaggcaaugucuugcgacuuuaacggcggaaaaaucuccguccaauacaaccucucucacgccuaugccgucgacgcagccaaccacugcggcaccaucgcaaacggcguccuacaaaccuucaugcgcauggccuggggaggcuccuacaucgcccuugacuccggaaaaggcuccugggauugcaucaugaccucuuaccaauaccuuauaauccaaaacaccuccugggaagaccacugccaauucucccgcccaucacccaucggcuaccucggccuccucagccaacgcacccgagacaucuacaucucccgccgccuacuuggcaccuucaccuggacccugucugacucagaaggcaaugaaaccccaggaggcuacugccucacacgcuggaugcucaucgaagccgaacucaaaugcuucggaaacaccgcagucgcaaaaugcaacgagaagcacgacgaagaguucugcgacaugcuucgacucuucgacuuuaacaaacaggcaauccgccgccuaaaaaccgaagcccaaaugaguauacaacucaucaacaaagcuguaaacgcccucauuaacgaccaacucaucaugaaaaaccaccuccgcgacaucaugggcauacccuauuguaacuacuccaaguacugguaccucaaccacacagucacaggcaaaacaagccucccccgaugcugguuagucuccaacggauccuaccucaacgaaacccacuucuccgacgacaucgaacagcaagccgacaacaugauaaccgaacuacuccaaaaagaauacaucgacaggcaggggaaaaccccacucggccucgucgaccuauucgucuucuccaccucauucuaccucaucucaaucuuccuccaccucguaaaaauccccacccaccgccacguuaucggcaaacccugccccaaaccccaccgacucaaccacaugggcaucugcuccugcggccuuuacaagcaccccggcguccccgucaaauggaaacgauaa

SEQ ID NO: 2121 - RNA, 1473 nt, Artificial Sequence
  derived and/or modified protein sequence (opt11) from LASV(Lassa virus/H.sapiens-wt/NGA/2016/ISTH_1150;Clade II)__AVO03627__GPC
augggacaagucaucaccuucuuccaagaaaucccccacgucauagaagaagugaugaacaucguccuuaucacacuaagccuccuagccauccuuaagggaaucuacaacguagcuaccugcggacucuucggccugaucucuuuccuccuccucugcggucgauccugcagcaccaccuacaaaggcgucuacgaacuccaaacacuugaacuggacauggccaaccuaaacaugacgaugccccuaucgugcaccaagaacucaucccaccacuacaucauggucggcaacgaaacaggccuagaacuaacccucaccaacaccuccaucaucaaccauaaauucugcaaccuauccgacgcccacaagaaaaaccucuacgaccacgcccucauguccaucauuuccaccuuccaccucucuaucccgaacuucaaccaauaugaagccaugagcugcgacuucaacgguggcaaaaucucuguccaauacaaccugucccacgcauacgccgucgacgcagccaaccacugcggaaccauagcaaacggcguacuccaaaccuucaugcguauggcguggggcggcucauacaucgcccuugauuccggcaaaggcaacugggacugcauuaugacauccuaccaguaccucaucauccagaacaccaccugggaagaccacugccaauuuucccgaccuucccccaucggcuaccuaggccuacucucccaacggacccgcgacaucuacaucucccgucgccuccucggcacuuucaccuggacccucuccgacuccgaaggcaacgaagccccaggcggcuacugccuaacacgcuggaugcucaucgaagccgaacucaaauguuucggcaacaccgcaauagccaaaugcaacgaaaaacacgaugaagaguucugcgacaugcuccgccucuucgacuucaacaaacaggccauccgucgacuuaaaaccgaagcccaaaaauccauccaacuaaucaacaaagccgucaaugcccuaauuaacgaccaacuaaucaugaaaaaccaccucagagacauaaugggaaucccauacugcaacuacuccaaauacugguaccucaaccacaccgucaccggcaaaacaucccucccuaaauguuggcugaucucuaacgguuccuaccuaaacgaaacccacuucagcgacgacaucgaacaacaggccgacaacaugaucaccgagcugcuacaaaaagaguacauggaccgacaaggcaaaaccccacuaggucucgucgaccucuucguauucuccaccucauucuaccucaucucuaucuuccuacacuuagucaaaaucccaacacaccgccacaucgucggccgacccugccccaaaccccaccgucucaaccacaugggcaucugcucuugcggcuuauacaaacaccccgggguucccgucaaauggaaacguuaa

SEQ ID NO: 2122 - RNA, 1473 nt, Artificial Sequence
  derived and/or modified protein sequence (opt11) from LASV(Lassa virus/H.sapiens-wt/NGA/2016/ISTH_1174;Clade II)__AVO03555__GPC
augggacaaaucaucaccuucuuccaagaagucccccacgucaucgaagaagucaugaacaucguccucaucgcucuaucacuacuggccauccuaaaaggcauauacaauguagcuaccugcggcuucuucgggcuagucagcuuucuccuccuaugcggccguagcugcagcaccauuuacaaaggaguauacgaacuacaaacccucgaacuugacauggccucccuaaacaugaccaugccccucucaugcaccaaaaacaauucccaccacuacaucauggucggcaacgaaaccggccucgaacucacccucaccaacaccucaauaaucaaccacaaauucugcaaccucucagaugcccacaagaaaaaccuuuacgaccacgcacuaaugucgaucaucucaaccuuccaccucuccauaccccacuucaaccaauacgaagccauguccugcgacuucaacggaggaaaaaucuccguacaauacaaccuaagccacaccuacgcggucgacgccgccaaccauugcggcaccaucgcaaacggaguacuccaaacauucaugcgcauggccuggggcggcagcuacauugcccucgacuccggaaaaggcuccugggacugcaucaugaccucauaccaauaccucaucauccaaaacacuaccugggaagaccacugccaauucucacggcccucccccaucggcuaccucggacuacucucccagcgaacccgcgacauauacaucagccgccgccugcucgggaccuucaccuggacccucuccgacucugagggcaacgaaacccccggaggauauugucuaacccgauggaugcucaucgaagcugaacucaaaugcuucggcaacacagccgucgcaaaaugcaacgaaaaacacgaugaagaguucugcgacaugcuccgccuuuucgacuucaacaaacaagcaauccguaaacucaaaacagaagcccaaauguccauccaacucaucaauaaagcagucaacgcccucaucaacgaccaacucaucaugaaaaaccaucuccgagacauaaugggaauccccuacugcaauuacuccaaauacugguaccucaaccacaccgucacuggaaaaacuucccucccacgcugcuggcucguaagcaacggcucuuaccucaacgaaacccacuucucggacgacauagaacaacaggcagacaacaugaucacugaacuacuccagaaagaauacauggaccgccagggcaaaacaccccucggccugguagaccuuuucgucuucuccaccuccuucuaccucaucuccaucuuccuccaccuaguaaaaauccccacccaccgacacgucaucggcaaacccugccccaaaccccaccgacucaaccacaugggcaucugcucaugcggacucuacaaacaccccggcguacccguaaaauggaaacgcuaa

SEQ ID NO: 2123 - RNA, 1473 nt, Artificial Sequence
  derived and/or modified protein sequence (opt11) from LASV(Lassa virus/H.sapiens-wt/NGA/2016/ISTH_1207;Clade II)__AVO03599__GPC
augggccagauaaucacauucuuccaagaaguaccccauguaaucgaagaagucaugaacaucguccucauagcccucucccuacuggcaauccucaaaggaauuuacaacguugccacaugcggacuuuucggccuagucuccuuccuacuccucugcggacgcuccugcuccacaaccuacaaaggagucuacgagcuacaaacccucgaacuagacaugaccucccugaacaugaccaugccccuaucaugcaccaaaaacaacucacaccacuacaucaugguuggaaacgaaaccggccucgaacucacgcuaacaaacacuucuauaaucaaccacaaauucugcaaccuauccgacgcccacaagaaaaaccucuacgaccacgcccuaauguccauaaucuccaccuuccaccuauccaucccaaacuucaaccaauacgaagccauguccugcgacuucaacggcggcaaaauaucaguacaauauaaccucucccacacauacgccgucgacgcugccaaccacuguggcaccaucgcaaacggaguccuccaaaccuucaugcgcauggccuggggcggcucauacaucgccuuagacuccggcaagggcuccugggacugcaucaugaccuccuaccaauaccucauaauacaaaacaccaccugggaggaccacugccaguucucacgccccucccccaucggcuaccucggccuccucagccagcguacccgugauaucuacaucucccgccgccuucucggcacuuucacauggacccucucagacuccgaaggcaacgacacccccgguggcuacugccucacccgcuggaugcucaucgaagccgaacucaaauguuucggcaacaccgccgucgcuaagugcaacgaaaaacacgacgaagaguucugugacaugcuccgccuuuucgacuucaacaaacaagcaauccgccgacugaaaaccgaagcccaaauguccauccaacuaaucaauaaagccgucaacgcccucaucaacgaccaacucaucaugaaaaaccaucuaagagacaucaugggcaucccauacugcaacuacuccaaauacugguacuuaaaccacaccgucaccggcaaaaccucccucccccgaugcuggcucgucucuaacggauccuaccuaaacgaaacccacuucuccgacgacaucgaacagcaagccgacaacaugaucacagaacuccuccaaaaggaauacauagaccgacaagguaaaaccccacucggccucguagaucucuucgucuucucaaccucauucuaccuaaucucaauauuccuccaccuggucaaaauccccacccaccgacacgucauagguaaacccugccccaaaccccaccgccucaaccacaugggcaucugcuccugcggccucuacaaacaccccggaguccccgugaaauggaaacgcuaa

SEQ ID NO: 2124 - RNA, 1473 nt, Artificial Sequence
  derived and/or modified protein sequence (opt11) from LASV(Lassa virus/H.sapiens-wt/NGA/2016/ISTH_1306;Clade II)__AVO03623__GPC
augggacaaaucaucaccuucuuccaagaaguaccacacguaauagaagaagucaugaacaucguucucauagcccucucccuccuagccauccugaaaggcaucuacaacguggcaaccugcggccucuucggccuagucuccuuccuacuccuauguggaagauccugcuccaccaccuacaaaggagucuacgaacuccaaacccucgaacuagacauggcaagccucaacaugaccaugccccucuccugcaccaaaaacaacucacaccacuacaucaugguaggcaacgaaaccgggcucgaacucacccuaaccaacacaucaauaaucaaccauaaguucugcaaccucuccgacgcccacaagaaaaaccuauacgaccaugcccucaugagcaucaucagcacguuccaccuaagcauccccaacuucaaccaauacgaagccaugucuugcgacuucaacggcgggaaaauauccguccaauacaaccuaucccacaccuacgccgucgaugcagcuaaccacugcggcacaguagccaacggcguccuccaaaccuucaugcgcauggcauggggcggcucauacaucgcacucgacucaggaaaaggcucaugggacugcaucaugaccuccuaccaauaccuaaucauccaaaacaccaccugggaagaccacugccaauucucacgccccucacccaucggcuaccucggccuucucucacaacgaacccgcgacaucuacauaucgcgacggcuccuaggcacauuuaccuggacccuauccgacuccgaaggaaacgaaacgcccggcggcuacugccuaacacgcuggaugcucaucgaagcugaacuaaaaugcuucggcaacacagcaguagccaaaugcaacgaaaaacacgacgaagaguucugcgacaugcuccgccuguucgacuucaacaaacaagccauuagacgucucaaaaccgaagcacaaauguccauccaacuaaucaacaaagccguaaacgcccucaucaaugaccaacuaauaaugaaaaaccaucucagggacauuaugggaaucccuuacugcaacuacuccaaauacugguaccucaaccacaccgucaccggccguaccagccuaccacgcugcuggcuagucagcaacggauccuaccucaacgaaacccauuucucugacgacaucgaacaacaggcugacaacaugauaaccgaacuccuccaaaaagaauacaucgaccgacagggcaaaacaccccuaggucucgucgaccuauucguuuucuccaccuccuucuaccucaucuccauuuuccuccaccucgucaaaaucccaacccaccgccacgucauaggcaaacccugcccgaaaccccaccgacucaaccacaugggcaucuguuccugcggacucuacaaacaccccggcgucccagucaaauggaaacgcuaa

SEQ ID NO: 2125 - RNA, 1473 nt, Artificial Sequence
  derived and/or modified protein sequence (opt11) from LASV(Lassa virus/H.sapiens-wt/NGA/2016/ISTH_1311;Clade II)__AVO03575__GPC
augggacaaauagucaccuucuuccaagaagucccccacguaauagaagaagucaugaacaucguccucaucgcccuuucccuucucgccauccucaaaggcaucuacaacgucgccacaugcggccuuuucggccucaucuccuuccuccuccucugcggccgcucaugcucuaccacauacaaaggcgucuaugaacuccaaacccucgaacucgacauggccaaccuuaauaugaccaugccacucuccugcaccaaaaacaacucacaccacuacaucaugguaggaaacgaaacaggccucgaacugacccucaccaacacgucuaucaucaaccacaaauucugcaaccucucagaugcccacaagaaaaaucuauacgaccacgcccuuaugucaaucaucuccaccuuccaccucuccaucccaaacuucaaccaauacgaagccauguccugcgauuucaacggcggcaaaauauccguccaauacaaccucucacacgccuacgcaggcgacgccgccucacacugcggcaccaucgccaacggcguccuccaaaccuucaugcgcauggcauggggcggauccuacaucgccuuagacuccggaaaaggcaacugggacugcaucaugacauccuaccaauaccucaucauccaaaacaccaccugggaagaccacugccaauucucacgccccucccccaucggcuaccucggccuccuuucccaacgcacccgcgacauauacauaucgcgacgccuacucggaaccuucaccuggacucuaucugacuccgaaggaaacgacgccccaggcgguuacugccucacccgcuggaugcucaucgaagccgaacuuaaaugcuucggcaacaccgcuaucgcaaaaugcaacgaaaaacacgacgaagaguucugcgacaugcuccgccucuucgacuucaacaaacaagccauuaagcgccucaaaaccgaagcccaaaugucgauccaacuaaucaacaaagccguaaacgcccuaaucaacgaccaacucauaaugaagaaccaccuccgagacauaaugggcaucccauacugcaauuacucaaaauacugguaccucaaccacaccacuacaggaaaaacgucccuaccuaaaugcuggcuuaucucuaacggcuccuaccucaaugaaacccacuuuuccgacgacaucgaacaacaagcagacaacaugaucaccgaacuacuccaaaaagaauaccuagaccgccaaggaaaaacaccccuaggccucgucgaccucuucgucuucuccaccagcuucuaccucaucucaaucuuccuucaccuaaucaaaauccccacccaccgccacaucgucggccgccccugccccaagccccaccgccucaaccacauggggauaugcucaugcggccucuacaaacacccaggcguccccgucaaauggaaaagauaa

SEQ ID NO: 2126 - RNA, 1473 nt, Artificial Sequence
  derived and/or modified protein sequence (opt11) from LASV(Lassa virus/H.sapiens-wt/NGA/2016/ISTH_1423;Clade II)__AVO03577__GPC
augggacaaaucgucaccuucuuccaagaagucccccacguaauagaagaagucaugaacaucguccuaaucgcccuaagucuccuagcaauacucaaaggcauuuauaacgucgcuaccugcggccucuucggccucguuuccuuccuccuccucugcggucgcucuugcuccaccacauacaaaggcgucuacgaacuccaaacacucgaguuagacauggccaaccucaauaugaccaugccccuaucaugcaccaaaaacaauucgcaccacuacauaauggucgguaacgagaccggccucgagcucacccucaccaacacaucaauaaucaaccacaaauucugcaaccucuccgacgcucacaagaaaaaccuauacgaccacgcacucaugucaaucaucuccacguuccaccuaagcauacccaacuucaaucaauacgaagccauguccugcgacuucaacgguggcaaaauauccguccaauacaaccucucccacagcuacgccguagaugccgccaaccacugcggaaccguugccaacggcguccuacagaccuucaugcgcauggccuggggcggcagcuacaucgcccucgacucggggaaaggcuccugggacugcaucaugacaucauaccaauaccuaaucauucaaaacauaaccugggaagaccauugccaauucucgagacccucccccaucggauaccucggccuacucucccaacgaacccgcgacaucuacaucucccgccgccuccuaggcacauucacauggacccuauccgacuccgaaggcaaagaaacacccggcggcuauugccucacccgauggaugcucaucgaagccgaacuaaaaugcuucgguaacaccgccgucgccaaaugcaacgaaaaacaugacgaagaguucugcgacaugcuccgccucuucgacuucaacaaacaagccauccgccgccucaaaacagaagcacaaaugucaauucagcuaaucaacaaagccgucaacgccuuaaucaacgaccaacucaucaugaaaaaccaccuccgcgauaucaugggcauccccuacugcaacuacuccaaauacugguaccuuaaccacacuguuaccggcaagacaagccucccucgaugcuggcuaguaucaaacgguuccuaccucaaugaaacccacuucagugacgacauagagcaacaagccgauaacaugaucacagaacuccuccaaaaagaauacauagaccgacaaggcaaaacccccuuaggccucgucgaccucuucgucuucagcaccucauucuaccuuaucucaauauuccuccaccuagucaaaauccccacccaccgccacauccucggcaaacccugcccaaaaccacaccgccucaaccacaugggaaucugcuccugcggccucuacaagcaccccggcguucccgucaaauggaaacguuaa

SEQ ID NO: 2127 - RNA, 1473 nt, Artificial Sequence
  derived and/or modified protein sequence (opt11) from LASV(Lassa virus/H.sapiens-wt/NGA/2016/ISTH_1462;Clade II)__AVO03587__GPC
augggccaaaucauaaccuucuuccaagaagucccccacguaauagaagagguaaugaacaucguccucauagcucucucccuucuagccauccucaaaggaauauacaacgucgcaaccugcggccucuucggccuaguauccuuccuacuccucugcggccgcucaugcuccaccaccuacaaaggcguauacgaacuacaaacccucgaacuagacauggccucgcucaacaugaccaugccccuuuccugcaccaaaaacaacucccaccacuacaucauggucggcaacgaaaccggacuagaacucacucucaccaacaccagcauaauaaaucacaaauucugcaaccucuccgacgcccacaagaaaaaccucuacgaccacgcccucauguccaucaucuccaccuuccaccuauccauccccaacuucaaccaauacgaagccauguccugcgacuucaacggaggcaaaauuuccguccaauacaaccuaucccacacauacgccguagacgccgccaaccacugcggcacaaucgccaacgguguccuccaaaccuucaugcgcauggccuggggcggguccuauaucgcccucgacucaggcaaaggcuccugggacugcauaaugaccuccuaccaauaccucaucauccaaaacaccacuugggaggaccacugccaauucucccgcccaucacccaucgguuaccucggccuccucucucaacgaacccgagacaucuacaucucuagacgucuacucggaaccuucacauggacccucuccgacucagagggaaacgaaacaccagguggcuacugccucacccgcuggaugcucauagaggccgaacuuaaaugcuucggaaacaccgccguagccaaaugcaacgaaaaacacgacgaagaguucugcgacaugcuccgccucuucgacuucaacaaacaagccauccgacgucucaaaaccgaagcccaaauguccauccaacuuaucaacaaagcaguaaacgcacucaucaaugaccaacuaaucaugaaaaaucaccuccgugacaucauggguauacccuauugcaacuacuccaaguacugguaccugaaccacaccgucacaggccgcaccucccuaccccgcugcuggcucgucagcaacggcucuuaccuuaacgaaacccacuucuccgacgacaucgaacaacaggccgacaauaugaucacagaacuccuacaaaaagaguacaucgaaagacaaggcaaaacaccccuaggccucgucgaccucuucgucuucuccaccuccuucuaccucaucuccaucuuccuacaccucaucaaaauccccacccacagacacguaaucggcaaacccugccccaaaccacaccgacuaaaccacaugggcaucuguuccugcggccucuacaaacacccaggagugccugucaaguggaaacgcuag

SEQ ID NO: 2128 - RNA, 1473 nt, Artificial Sequence
  derived and/or modified protein sequence (opt11) from LASV(Lassa virus/H.sapiens-wt/NGA/2016/ISTH_1472;Clade II)__AVO03605__GPC
augggccaaauaauaacuuucuuccaagaagucccccacgucaucgaagaagucaugaacauaguccucauugcccucucucugcuugccauccuaaaaggaauuuacaacguagccacaugcggccucuucggccucgucuccuuccuucuacuaugcggccgaucaugcucaacuaccuacaaagguguuuacgaacugcaaacccuagaacucgacauggccucccuaaacaugacaaugccccucuccugcaccaagaacaacagccaccacuauaucauggucggcaacgaaaccgggcucgaacucacacuaaccaacaccuccaucauuaaccacaaauucugcaaccuaagcgacgcacacaaaaaaaaccucuacgaccacgcccucauguccaucaucucuaccuuccaucuauccauccccaacuucaaccaauacgaagcaauguccugcgacuucaacggcggaaagaucuccguacaauacaaccucucacacaccuacgcuguagacgccgccaaccauugcgguaccaucgcaaacgguguccuacaaaccuucaugcgcauggccuggggcggcuccuacaucgcacucgacuccggcaaaggcucuugggacugcauaaugaccuccuaccaauaccucauuauccaaaacacgacaugggaagaccacugucaauucucccgucccuccccaaucggcuaccuaggccuucucagccaacggacacgagacaucuacauaucccggcgccucuuaggcaccuucaccuggacccucuccgacuccgaaggaaacgaaacccccggcggcuacugccucacccgcuggaugcucaucgaagccgaacucaaaugcuucggaaacacagcaguagccaaaugcaacgaaaaacacgacgaagaauucugugacaugcuccgccucuucgacuucaauaaacaagccauccgacgccucaaaaccgaagcccaaauguccauacaacucaucaacaaagccgucaacgcccuaaucaacgaccaacuaauaaugaaaaaccaccucagggacaucaugggaaucccauacugcaacuacuccaaauacugguaccucaaccacaccgugacaggccgcaccucccuaccccggugcuggcucgucagcaacggguccuaccucaacgaaacccacuucucggacgacaucgaacaacaggccgacaauaugaucaccgaacuccuacaaaaagaauacauagaccgacaaggcaaaacaccccuaggccucguagaccuauucguauucuccacguccuucuaccucaucuccaucuuccuccaccuuaucaaaauacccacccaccgccacguaaucggcaaacccugccccaaaccccaccgacucaaccacaugggcauaugcuccugcggacucuacaaacaucccggcguccccguaaaauggaaacguuga

SEQ ID NO: 2129 - RNA, 1473 nt, Artificial Sequence
  derived and/or modified protein sequence (opt11) from LASV(Lassa virus/H.sapiens-wt/NGA/2016/ISTH_1474;Clade II)__AVO03613__GPC
augggacagaucauaacauucuuccaagaaguaccccacgucauagaagaagucaugaacauuguccucauugcucuaucacuacuugcuauccucaaaggaaucuacaacgucgcaaccugcggccucuucggccucgucuccuuccuccuccuaugcggccguuccugcuccaccacuuacaaaggcguauacgagcuacaaacccuugaacucgacauggcuucccuaaacaugaccaugccccucuccuguaccaaaaacaacucccaucacuacauaauggucggaaacgaaacaggccucgaacuaacacugacaaacacguccauaauucaccacaaauucugcaaccucuccgacgcucacaagaaaaaccucuaugaccacgcccucaugagcaucauaucaaccuuccaccugucuauccccaacuucaaccaauacgaagccauguccugcgauuucaacggcggcaaaaucuccguccaguacaaccucucccacaccuacgccguagacgcugcaaaucauuguggcaccauagccaacggaguauugcagaccuucaugcggauggcguggggcggcuccuacaucgcucuagacuccggaaaaggcucaugggacugcaucaugaccuccuaccaauaccucaucauacaaaauacaacaugggaagaccacugccaauucucccgaccaucccccaucggcuaccucggccuucucucucaacgcacccgcgacaucuacaucucccgacgccuacuaggaaccuucacauggacacucucugacuccgaaggcaacgagacccccggcggcuauugccucacccgcuggaugcucaucgaagccgagcucaaaugcuucggaaacacugccgucgccaaaugcaaugaaaaacaugacgaagaguucugcgacaugcuccgccucuucgacuucaacaaacaagccauacgacgccucaaaaccgaagcccaaauguccauacaacuaaucaacaaagccgucaacgcccucaucaacgaccaacucaucaugaaaaaucaucugcgcgacaucaugggaauccccuacugcaacuacagcaaauacugguaccucaaccacacagucacaggacgaacaucccucccccgcugcuggcuagucuccaacggcucauaccuaaaugaaacccacuuuuccgacgacauagaacaacaggccgacaacaugaucacagaacuccuacaaaaagaauacauagaccgacagggaaaaacaccccuuggucuugucgaccucuuugucuucucuaccuccuuuuaccucaucuccaucuuccuccaccucauaaaaaucccuacccaccgccacgucaucggcaagccaugccccaaaccccaccgccuaaaccacaugggcauaugcuccugcggacucuacaaacaccccggcguccccguuaaguggaaacgcuaa

SEQ ID NO: 2130 - RNA, 1476 nt, Artificial Sequence
  derived and/or modified protein sequence (opt11) from LASV(Lassa virus/H.sapiens-wt/NGA/2016/ISTH_1496;Clade II)__AVO03579__GPC
augggacaaaucauaaccuucuuccaagaagucccccacgucaucgaggaagucaugaacaucguacucauagcccucucccugcucgccauccuaaaaggagucuacaacgucgcaaccugcggccucuucggccucguauccuuucuacuccucugcggccggucaugcuccaccaccaucuacaaaggcgucuacgaacuacaaacccuagaacucgacauggcaucccuuaacaugacaaugccccucucaugcaccaaaaacaacagccaccacuacaucauggucgggaacgagaccggccucgaacuaacccucaccaacaccuccaucaucaaccacaaauucugcaaucucuccgacgcacacaagaaaaaucucuacgaccacgcacucauguccauaaucuccacauuccaccucucgauccccaacuucaaucaauacgaagcuauguccugcgacuucaauggaggaaaaauauccgugcaauacaaccucucccacgccuacgcagucgacgccgcuaaccacugcggcacaaucgcaaacgguguacuacaaacauucaugcgaauggccuggggcggcuccuacauagcccuagacucaggcaaaagauccugggacugcaucaugaccucuuaccaauaccuaaucauccaaaacaccaccugggaagaccauugccaguucucccgucccagccccaucggcuaccugggccuccucucacaaagaacucgagacauauacaucucccgccgccuccugggcaccuucaccuggacccucuccgacucagaaggcaacgaaacacccggcggcuacugccucacccgcuggaugcucauagaggccgagcuuaaaugcuucggaaacaccgccgucgccaaauguaacgaaaaacaugacgaagaguucugcgacaugcuccgccuauucgacuucaacaagcaagccauccgaagacucaaaacagaagcacaaauguccauccaacuaaucaacaaagccgucaacgcacucaucaacgaccaacucaucaugaaaaaccaccuccgagacauaauggggauuccauacuguaacuacuccaaauacugguaccucaaccacaccgucaccggaaaaaccucccuaccccgaugcuggcucguaucaaacggaucauaccucaacgaaacacacuucagcgacgacaucgagcaacaagccgacaacaugaucacggaacuccuucaaaaagaauauauagaucgccaaggcaaaacaccacugggccucgucgaccucuucgucuucucgaccucauucuaucuaaucucaauauuccuccaucucgucaaaauccccacccaccggcacgucauaggaaaacccugccccaagccccaccgacucaaccacauggguaucugcucgugcggccuuuacaaacaccccggcguaccaguaaaauggaaacgcuaa

SEQ ID NO: 2131 - RNA, 1473 nt, Artificial Sequence
  derived and/or modified protein sequence (opt11) from LASV(Lassa virus/H.sapiens-wt/NGA/2016/ISTH_1541;Clade II)__AVO03553__GPC
augggccagaucgugaccuucuuccaggaggucccccacgugaucgaggagaucaugaacaucguacugaucacccucagccuacuggcgguccucaaggggaucuacaacuucgccacgugcggccugaucggucugaucaccuuccucuuccugugcggccgcuccugcagcaccaucuacaaggggaacuaccagcuacagacccucgagcugaacauggagacgcugaacaugaccaugccgcucuccugcacaaagaacaacagccaccacuacauccgggugggcaacgagaccggcuuggagcugacgcucaccaacguguccaucaucaaccaccgcuucugcaaccugagcgacgcgcauaagcggaaccuguacgaccacacccucauguccaucaucagcaccuuccaccuguccauccccaacuucaaccaguacgaggccaugagcugcgacuucaaugggggcaagaucuccguccaauacaaccugagccacggguacgccguggaugccgcgaagcacugcggcacgguggcgaacgggguccuccagaccuucaugcgcauggcauggggcggcuccuacaucgcccuggacagcgggaagggcaacugggacugcaucaugaccuccuaccaguaccugaucauccaaaacaccacgugggaagaccacugccaguucagccggcccucccccaucggguaccucggccugcucagccagcgcacccgggacaucuacaucucccgccggcuccugggcaccuucaccuggacgcugagcgacagcgaggggcgcgagacccccggcggguacugccucacacgguggaugcucaucgaggccgagcugaagugcuucggcaacaccgcgguggccaagugcaacgagaagcacgacgaggaguucugcgacaugcuccgccuguucgacuucaacaagcaggccauccagcggcugaagacggaagcccagauguccauccaguugaucaacaaggccguuaacgcgcugaucaacgaccagcugaucaugaagaaccaccuccgcgacauaauggggauccccuacugcaacuacucuaaguacugguaccugaaccacaccaccaccggcaagacgucccugcccaagugcuggcucgucaccaacggcagcuaccugaacgaaacccacuucuccgacgacaucgagcagcaggccgacaacaugaucaccgagaugcugcagaaggaguacaucgaccggcaggggaagacgccccucggccucguggaccuguucguguucuccacguccuuuuaccucaucagcaucuuccugcaccugaucaagaucccgaaccaccgccacaucgucgggaagcccugccccaagccacaccggcugaaccacaugggcaucugcuccugcggguucuacaagcagccgggcguucccgugcgcuggaagcgguga

SEQ ID NO: 2132 - RNA, 1473 nt, Artificial Sequence
  derived and/or modified protein sequence (opt11) from LASV(Lassa virus/H.sapiens-wt/NGA/2016/ISTH_1546;Clade II)__AVO03537__GPC
augggacaaaucgucaccuucuuccaggaaaucccccacgucguagaagaaauaaugaacaucguacucaucacccucucccuccucgccauccucaaaggacucuacaacuucgcaaccugcggacucaucggacucauaaccuuccuauucuuaugcggccgcagcugcagcaccauauacaagggcuccuaccaacuccaagcccucgaacucaacauggaaacccucaacaugaccaugccacuaagcuguacgaaaaacaauucacaccacuacauccgcguaggcaacgaaaccggacucgaacucacccucacuaauaccuccaucaucaaccacaaauucugcaaccugagcgacgcucacaagaaaaaccuauacgaccacacccuaaugucaaucaucuccacauuccaccuuuccauccccaacuucaaccaauaugaagccauguccugcgacuucaacggcggcaaaaucuccguacaguacaaccuaucccauuccuacgccggugacgccgcaagacacugcggcaccgucgccaacggcguccuccaaaccuucaugcgcauggccuggggaggcuccuacaucgcccucgacuccggaaaaggcaacugggacugcauaaugaccuccuaucaauaccugaucauccaaaacaccaccugggaagaccacugucaauucagccgccccucccccaucggcuaccuaggacuacucucacaaagaacacgcgacaucuacaucucccgccgccuacuuggaacauuuacauggacccucagcgacuccgaaggcaaagaaacaccuggcggcuacugccuaacccgcuggaugcucaucgaagccgaacuaaaaugcuucggcaacaccgcgguagcaaaaugcaacgaaaaacacgacgaagaauuuugcgacaugcuccgccucuucgacuucaauaaacaagccauccaacgccucaaaaccgaagcccaaaugucaauacaacuaaucaacaaagccgucaacgcccucaucaaugaccagcuaaucaugaaaaaccaccuccgcgacaucaugggcauaccuuacugcaacuacuccaaauacugguaucucaaccacacaaccacaggcaaaacaucccuccccagaugcuggcucguaucgaacggcuccuaccucaacgaaacccacuucagcgacgacaucgaacagcaagcggacaacaugaucacagaaaugcuacaaaaagaauacauugaccgacaaggcaaaacaccccucggacucguagaccucuucgucuucucaaccagcuucuaccucaucucuaucuuccuucaccucauaaaaauacccacccaccgccauaucguaggcaaaagcugcccaaaaccccaccgccuaaaccacaugggcauaugcuccugcggacucuauaaacagcccggagugcccgucaaauggaaacgauaa

SEQ ID NO: 2133 - RNA, 1473 nt, Artificial Sequence
  derived and/or modified protein sequence (opt11) from LASV(Lassa virus/H.sapiens-wt/NGA/2016/ISTH_1591;Clade II)__AVO03647__GPC
augggccagaucaucaccuucuuccaagaagucccacacguaaucgaagaagucaugaacaucguccucauagcacucucacuccuugccauccucaagggcauauacaacgucgcaaccugcggccucuucggacucguaucauuccuucuacuuugcggccgcucauguuccaccaccuacaaaggcgucuacgaacuacagacccucgaacuagacauggccucccuaaacaugaccaugccccuauccugcaccaaaaauaacagccaccacuacaucauggucggaaacgaaacgggccucgaacuaacacucaccaacaccuccauaauccaacacaaauucugcaaucucucugacgcccacaagaaaaaccucuacgaccacgcccucauguccaucgucucuaccuuccaccucucuauccccaacuucaaccaguacgaagcaaugagcugcgacuucaacggcggaaaaaucacgguccaauacaaccuaucacacagcuacgcgauugacgcagccaaccacugcggcacggucgccaacggaguccuacagaccuucaugcgaauggcauggggaggcuccuacaucgcgcuugacuccggccgcggcucuugggacugcaucaugaccagcuaccaauaucuaaucauccaaaacacuacaugggaagaccacugccaguucagccgacccucccccauuggcuaccucggccuccuaucccaaagaacacgcgacaucuacauaucccgccgacuccucggcaccuucaccuggacucuuuccgacuccgaaggcaacgaaacucccggcgguuacugccucacacgauggaugcuaaucgaagcagaacuuaaaugcuucggcaacaccgccgucgcaaaaugcaacgaaaaacaugacgaagaguucugcgacaugcuccgccucuuugacuucaacaaacaagcaauccgccgccucaaagccgaagcccaaauguccauccagcuuaucaacaaagcagucaacgcacuaauaaacgaucaacuaaucaugaaaaaccaccuacgcgacaucaugggaauaccauacugcaacuacuccaaauacugguaccuaaaucauaccgucaccggccgcaccucacucccccguugcuggcucgucuccaacggcuccuaccucaacgaaacccacuucuccgacgacaucgaacagcaagccgacaacaugaucaccgaacuccuucaaaaagaauacauggaccgccaaggaaaaacaccccucggccucguagaccuauucgucuucagcaccagcuucuaccuaauauccaucuuccuucaccucgucaaaauccccacccaccgccacauaaucggcaaaccaugccccaaaccacaccgacucaaccacauggguguaugcuccugcggccucuacaaacaucccggcguccccgucaaauggaaacgcuaa

SEQ ID NO: 2134 - RNA, 1473 nt, Artificial Sequence
  derived and/or modified protein sequence (opt11) from LASV(Lassa virus/H.sapiens-wt/NGA/2016/ISTH_1604;Clade II)__AVO03541__GPC
augggccaaaucgucaccuucuuccaagaagucccccacgucaucgaagaaaucaugaacaucguccucaucacacucagccugcuagccauccuuaagggcgucuacaaccuagcaaccugcggccucauaggccucauaaccuuccucuuucucugcggccguuccugcagcaugacauacaaaggauccuaccaacucgagacccucgaacucaacauggaaacacuuaauaugaccaugccacucucaugcaccaaaaauaccucacaccacuacauccgggucggaaacgaaacaggacucgagcucacccucaccaacaccucgaucauaaaccacaaauucugcaaccucucagacgcccacaagaaaaaccucuacgaccacucacucauguccaucguaagcacauuccaucucucaauacccaacuucaaccaauacgaagccauguccugcgacuucaacggaggaaaaaucuccauacaauacaaccucucccacgccuacgccggcgacgcagccaaacacugcgguacacuggcuaacggcguccuccagacauucaugcgcauggccuggggcggcucauacauugcacucgacuccggacgcggaaacugggacugcaucaugaccuccuaccaauaccucaucauccaaaacacaaccugggaagaccacugccaauucagccgccccucaccuaucggauaccucggacuacucucccaacggacucgcgagaucuacauaucucgucgacuucucggcaccuucacauggacccucucagacuccgaaggaaacgaagcccccggcggcuacugucuuacccgcuggaugcugauagaagcagaacuaaaaugcuucggaaacgccgcaguagccaaaugcaacgaaaaacacgacgaagaguucugcgacaugcuccgccucuucgacuucaacaaacaagccauccaacggcucaaaaccgaagcacaaaugucaauccaacuuaucaacaaagccgucaacgcccucaucaaugaccagcucaucaugaaaaaccaccuccgcgacauaaugggcaucccauacuguaacuacuccaaguacugguaccucaaccacaccacgacaggccgcacaucacuacccagaugcuggcucguauccaacggcuccuaucucaacgaaacccacuucuccgacgacaucgaacaacaggccgacaacaugaucaccgaaaugcuccaaaaagaauauaucgaccgccaaggcaaaacaccccucggccucguagaucucuucguauucucgaccagcuucuaccucauuagcaucuuccuccaccucgucaaaauacccacacaccgacacaucgucggcaaaucauguccaaaaccucaccgccuaaaccacaugggcaucugcagcuguggacuauacaaacaaccagguguccccguccgcuggaaacgauaa

SEQ ID NO: 2135 - RNA, 1473 nt, Artificial Sequence
  derived and/or modified protein sequence (opt11) from LASV(Lassa virus/H.sapiens-wt/NGA/2016/ISTH_1609;Clade II)__AVO03661__GPC
augggccaaauagucaccuucuuccaagaaaucccccacgucaucgaagaagucaugaacaucguacucaucacccuuucccuacucgccguacuuaaaggcaucuacaauuucgcaacuugcggacucauuggccucaucaccuuccuauuccuaugcggccgauccugcuccaccaucuacaaagguuccuaccaacuccaaaaacucgagcuaaacauggaaacccucaacaugacaaugccccugucaugcaccaaaaacuccucccaccacuacauccgcgucggcaacgaaaccggccuagaacucacccucaccaauaccucuaucaucucucacaaauucugcaaccucuccgacgcccacaagaaaaaccucuacgaccacgcgcucaugucgaucauauccacauuccacuuaucuauccccaacuucaaucaauacgaagcaaugagcugcgacuucaacggcgguaaaauauccguccaauacaaccucucacacuccuacgccggcgacgccgcccgacacugcgggacccucgccaauggcguccuacagaccuucaugcgcauggcguggggcggcuccuacauagccuuagacuccggcaaaggcaacugggacugcaucaugacaucauaccaauuccuaaucauccaaaacaccaccugggaagaccacugccaauucucccgccccucccccaugggcuaccucgggcucuuaucccagcgcaccagagacaucuacaucucccgccgccuccucggcacuuucaccuggacccucucugacuccgaaggcaaagaaacucccggcggauacugucuaacccgguggaugcucaucgaagcugaacucaaaugcuucggcaacacagccguagccaaaugcaacgaaaaacacgacgaagaguucugcgacaugcuccgccucuucgauuucaacaaacaagccauacaacgccuuaaaaccgaagcccaaaugagcauccaacucaucaacaaagcugucaacgcacucaucaacgaccaacucaucaugaaaaaccaccuccgcgacaucauggguauccccuacugcaacuacucucaauacugguaccucaaccacaccaucaccggcaaaacaagccucccaaaaugcuggcuaguauccaacggauccuaccucaacgaaacccacuucucagacgacaucgaacaacaagcagacaacaugauaaccgaaaugcuccaaaaagaguacauagaccggcagggcaaaaccccacucggccucgucgaccucuucguauucagcaccuccuuuuaccucaucuccaucuuccuccaccuuaucaaaauccccacccaccgccacaucguaggaaagucauguccuaaaccccaucgccucaaccgcauggguaucugcuccugcggccucuacaaacaacccgguguccccgucaaauggaaacgcuga

SEQ ID NO: 2136 - RNA, 1473 nt, Artificial Sequence
  derived and/or modified protein sequence (opt11) from LASV(Lassa virus/H.sapiens-wt/NGA/2016/ISTH_1610;Clade II)__AVO03603__GPC
augggccaaauaauuaccuuuuuccaggaagucccccacgucauagaagaagucaugaacaucguccuaaucgcacuuucccuacuugccauccucaaaggcaucuacaacgucgcaaccugcggccuauucggucuaguauccuuccucuuccucugcggacgguccugcagcaccaccuacaaaggagucuaugaacuacaaacccuagaacucgacauggccucacuaaacaugaccaugccccucuccugcaccaaaaacaacucccaccacuacaucauggucggaaacgaaaccggccucgaacucacacucaccaacaccuccaucaucaaccacaaauucugcaaccucagcgacgcacacaagaaaaaccuauacgaccacgcacucauguccauaaucucaaccuuccaccucagcaucccuaauuucaaccaauacgaagccauguccugcgacuucaacgguggaaaaauuuccguccaauacaaccugucccacaccuacgccaucgacgccgcaaaccacugcggcaccaucgccaacggcguccuacaaacuuucaugcgcauggccuggggcggaucauacauagcucuagauagcggccgcggcuccugggacugcaucaugaccucguaccaauaccucauaauccagaacaccacgugggaagaccacugccaauucucacggcccucccccauaggcuaccucggccuccuaucccaacguacacgagauaucuacaucucccgccgccuccuuggcacauuuacuuggacccucuccgacagcgaagguaacgaaacccccggcggcuacugccuaaccagauggaugcucauugaagcagaacuuaaaugcuucggcaacaccgcagucgccaaaugcaacgaaaaacacgacgaagaguucugcgacaugcuacgccucuucgacuucaacaaacaagcaauacgccgccucaaagcugaagcccaaaugaacauucaacucaucaacaaagcagucaacgcccucaucaacgaccaacuaaucaugaaaaaccaccuacgcgacaucauggggaucccuuacugcaacuacuccaaauacugguaccucaaccacaccgucacaggcagaacaucccucccacgcugcuggcucguaagcaacggcuccuaccucaacgaaacccacuucuccgacgacaucgaacaacaagccgacaacaugauuacagaacugcuccagaaagaguacauggaccgacaaggcaaaacaccccuaggccucgucgaccuauuugucuuuuccaccuccuucuacuuaaucuccauauuucuacaccucauaaaaauaccuacccaccgucacaucguuggcaaacccugcccgaaaccccaccgccucaaccacaugggaauaugcuccugcggccucuacaaacacccaggaguccccgucaaauggaaacgauaa

SEQ ID NO: 2137 - RNA, 1473 nt, Artificial Sequence
  derived and/or modified protein sequence (opt11) from LASV(Lassa virus/H.sapiens-wt/NGA/2018/ISTH_0959;Clade II)__AVV65099__GPC
augggacaaaucaucaccuucuuccaagaagucccacacguuauagaagaagucaugaacaucguacucaucgcacuuucacuacuugccauccucaaaggaaucuauaacgugguaaccugcggccuauucggccucgucuccuuccuccuccucugcggccgcuccugcuccaccaccuacaaaggagucuacgaacuccaaacccucgagcuugacauggccucacuaaauaugacaaugccacuuucaugcacuaagaacaacucacaccacuacauaauggucggcaacgaaaccggccucgaacugacccucacaaacaccucuaucauaaaccauaaauucugcaaucucuccgacgcacacaagaagaaccucuacgaccacgcucucaugucaauaauauccaccuuccaccucuccauacccaacuucaaccaauacgaagcaauguccugcgacuucaacggcggaaaaaucuccguccaauacaaccuaucccacgccuaugccaucgacgccgccaaucacugcggaacaaucgccaauggaguccuccaaacauucaugcgcauggccuggggcggauccuacaucgcacucgacucaggcaaaggcucaugggacugcauaaugacauccuaccaauaccucaucauccaaaacaccaccugggaagaccacugccaauucucccgccccucgccaaucggcuaccucggacuccucucccagcgcacucgcgacaucuacaucucacgccgccugcuaggcacauucaccuggacccuauccgacuccgaagguaacgaaacccccggcggguauugccuaacucgcuggaugcuaauagaagccgaacuaaaaugcuucgguaacaccgccgucgccaaaugcaacgaaaaacacgacgaagaguucugcgacaugcuccgacucuucgacuucaacaaacaagccauccgccgacuaaagacagaagcacaaaugucaauccagcugaucaacaaagccgugaacgcccuaaucaacgaccaacucaucaugaaaaaccaccuccgagacaucaugggcaucccguacugcaacuacuccaaauacugguaccuuaaccacaccgucacuggaaaaaccucacucccccguugcuggcucguuuccaacggaagcuaucuaaacgaaacccacuucuccgacgacaucgaacaacaagcagacaauaugaucacugaacuccuccaaaaagaauacauagaccgccaaggcaaaaccccacucggccuagucgaccuauucgucuucucuaccuccuucuaucucaucucuaucuuccuccaccuaguuaaaauccccacacaucgacacgucaucggaaaaccaugcccaaaaccccaucgccugaaccauaugggcaucugcucauguggccuauacaaacaccccggcguccccguaaaauggaaacgcuaa

SEQ ID NO: 2138 - RNA, 1473 nt, Artificial Sequence
  derived and/or modified protein sequence (opt11) from LASV(Lassa virus/H.sapiens-wt/NGA/2018/ISTH_1024;Clade II)__AVV65105__GPC
auggggcaaaucaucacuuucuuccaagaagucccccaugucaucgaagaggucaugaacaucguacuaaucgcccucucucuccuggccauccuaaaaggaguauacaacguagccacgugcggacucuucggccucguauccuuccuccuacuaugcggccgcucaugcuccaccaccuacaaaggcgucuacgaacuccaaacucucgaacucgacauggcaaaccucaacaugaccaugccccucagcugcaccaagaacaacucgcaccacuacauccgagucgguaacgagacaggccucgagcucacccucaccaacaccucaauaaucaaccacaaauucugcaaucucucugacgcccacaaaaacaacuuauacgaccacgcccucauguccauaaucuccacguuccaccucucaauacccaacuucaaccaauacgaagccauguccugcgacuucaacggcggcaaaaucagcguccaguacaaucucucccacgccuacgccguagacgcagccaaccacugcggcacaaucgccaacggcguccuacaaacauuuaugcgcauggccuggggcggcucauacaucgcacuagacuccggccgcggcuccugggacugcaucaugaccuccuaccaauaccuuaucauacaaaacaccaccugggaagaccacugucaauucucccgccccucacccauaggauaccuaggccuccucagccaacgaacacgagauaucuacaucucccgccgccuacucggcaccuucaccuggacacucuccgacucagaaggcaacgaaacccccggaggcuacugccucacacguuggaugcucaucgaagccgaacucaagugcuucggcaacaccgccgucgcaaaaugcaacgaaaagcacgacgaagaguucugcgauaugcuccgacucuucgacuucaacaaacaagcaauccgccgccucaaaaccgaagcccaaauguccauccaacuaaucaacaaagccgucaacgcccucauaaacgaucaacucauaaugaaaaaucaccucagagacaucaugggcauccccuacuguaacuacuccaaauacugguaccucaaccacacagucacaggcaaaacaucgcucccccgcugcuggcucguaucaaacggcaccuaccucaacgaaacccacuucagcgacgacaucgaacaacaagccgacaacaugauuaccgaacuacuacaaaaagaauauauggaccgacaaggaaaaacaccucucggccuagucgaccucuucguuuucuccacauccuucuaccucauauccaucuuccuacaccucgucaagauacccacccaccgacacguaaucggaaagcccugcccaaaaccccaccgccuaaaccacaugggaaucugcucauguggccucuacaagcaccccggaguacccgugaaauggaaacgauaa

SEQ ID NO: 2139 - RNA, 1473 nt, Artificial Sequence
  derived and/or modified protein sequence (opt11) from LASV(Lassa virus/H.sapiens-wt/NGA/2018/ISTH_1079;Clade II)__AVV65107__GPC
augggccaaauaaucaccuuuuuccaagaaguaccccacguaaucgaagaggucaugaacaucguccucaucgcccucucacuacucgccauccucaagggcaucuacaacgucgccacuugcggccucuucggccuaguugccuuccuccuccucugcggccgcuccugcuccaccacauacaaaggcgucuacgaacuacaaacccucgaacuagacauggcaucucucaacaugacaaugccgcucucaugcaccaaaaacaacucccaccauuacaucauggucggaaacgaaaccggccucgaacucacccucacaaacaccuccaucaucaaccauaaauucugcaaccucucugacgcccacaagaaaaaccuauacgaccacgcccucaugucaaucaucuccacguuccaucucuccauccccaacuucaaccaauacgaagcaauguccugugacuuuaacggaggaaaaaucuccguucaauacaaccucucgcacaccuacgcaguagacgcagcgaaccacugcgguacaaucgccaacggcguccuccaaaccuucaugcgaauggccuggggaggcucuuacaucgcacucgacuccggcaaaggcucaugggacugcauaaugaccucguaucaauaccucaucauccaaaacaccacgugggaagaccacugccaauucucccguccuucccccaucggcuaccuaggacuccucucacaacgcacccgugacaucuacaucucccgacgacuccucggcaccuuuaccuggacacuaagcgacucagaaggcaaugaaacaccaggcggcuacugcuugacccgcuggaugcuaaucgaagccgaacuaaaaugcuuugguaacaccgcagucgccaaaugcaacgaaaaacacgacgaagaguucugcgacaugcuccgccucuucgacuucaacaaacaagccauccgccgacucaaaaccgaagcccaaaugucgauccaacuaaucaacaaagcagucaacgcccucaucaacgaccaacucaucaugaaaaaccaucuccgcgacaucaugggaauaccauacugcaacuacuccaaauacugguaccucaaccacaccgucaccggccgcacuucccuaccccgcugcuggcucgucucuaacggcucauaccucaacgaaacacacuucucagaugacaucgaacagcaagcagacaauaugaucaccgaacuacuccagaaagaauacauggaccgccaaggcaaaacaccccucggccuaguagaccucuucguuuucagcaccuccuucuaccuaaucuccauauuccuccaccucaucaaaauacccacccaccgccacgucaucggaaagcccugccccaaaccccaccgccuaaaccacaugggcaucugcuccugcggccucuacaaacauccaggcguacccguaaaauggaaacgguaa

SEQ ID NO: 2140 - RNA, 1473 nt, Artificial Sequence
  derived and/or modified protein sequence (opt11) from LASV(Lassa virus/H.sapiens-wt/NGA/2018/ISTH_1177;Clade II)__AVV65101__GPC
augggccaaaucaucacauucuuccaagaaguaccccacgucaucgaagaagucaugaacauaguccuuaucgcccucucccuucuugcaauacucaaaggcaucuacaacguagccacaugcggccucuucggccucgucuccuuccuccuacucugcggacguuccugcucaaccacuuacaaaggcgucuacgaacuccaaacccuagaacuggacauggccucccuaaacaugaccaugccccucuccugcaccaaaaacaacucccaccauuacauccgcguaggcaacgagaccggccucgaacucacacuuaccaacaccuccaucaucgaccauaaauucugcaaccucagcgacgcccacaagaaaaaccucuacgaccacgcccucauguccaucauuuccaccuuccaccucagcauccccaacuucaaccaauacgaggccauguccugcgacuucaacggcggcaaaaucucuguacaauauaaccuuucccacaccuacgccgucgacgccgccaaccauugcgguaccaucgccaauggaguccuccaaaccuucaugcgaauggccuggggcggcuccuacauagcccuagacagcggcaaagggucuugggacugcaucaugaccuccuaccaauaccucauaauccaaaacacaaccugggaagaccacugccaauucucacgcccaucacccauuggcuaccucggccugcucucccaacgcacccgagacaucuacaucucucgccgacuucucggcaccuucaccuggacacuuucugacuccgaaggcaacgagacccccggcggcuacugccucacccgcuggauguuaauagaagccgaacucaaaugcuucggcaacacagcaguagccaaaugcaacgaaaaacacgacgaagaguucugcgacaugcuccgccucuucgacuucaacaagcaagccauccgacgucucaaaacagaagcacaaauguccauacagcucaucaacaaagccguuaaugcccucaucaacgaccaacucauaaugaagaaccaccucagagacaucaugggcauccccuacugcaauuacucuaaauacugguaccuaaaccacaccaucaccggacgcacaucccucccccgcugcuggcuugucucaaacggauccuaccuaaacgaaacacacuucuccgacgacaucgaacaacaagcagacaacaugauuaccgagcugcuccaaaaagaauacauggacagacaaggcaaaacaccccucggccucgucgaucuauucgucuucucaaccagcuucuaucuaaucuccaucuuccuccaccucgucaaaauucccacccacagacacguaaucggaaaacccugccccaagccccaucgucuaaaccacaugggcaucugcagcugcggacucuacaaacaccccggcguaccaguuaaauggaaacgcuaa

SEQ ID NO: 2141 - RNA, 1473 nt, Artificial Sequence
  derived and/or modified protein sequence (opt11) from LASV(Lassa virus/H.sapiens-wt/NGA/2018/ISTH_1375;Clade II)__AVV65115__GPC
augggccaaaucauuaccuucuuccaagaagucccccauguuaucgaagaaguaaugaacaucguccucauagcccucucccuccucgcaauacuaaaaggcauauacaacaucgcuaccugcggacucuuuggccucguauccuuccuccuacucugcggccgcuccugcucaaccacauacaaaggcguauacgaacuccaaacccucgaacucgacauggccucacucaacaugacaaugccccuauccugcaccaaaaacaacucacaccacuacauaauggucggcaacgagacuggccucgaacuuacacucaccaacaccuccaucaucaaccaccgcuucugcaaccucuccgacgcacacaagaaaaaccucuacgaccacgcccucaugucuaucaucucaacguuccaccucuccaucccaaacuucaaccaauacgaagcaaugucaugcgacuucaacggaggaaaaaucuccguccaauacaaccucucacacgccuacgccgucgacgcugccaaccacugcgggaccaucgcaaacggaguacuccaaaccuucaugcgcauggccuggggaggcuccuacaucgcacucgacucaggcaaaggcuccugggacugcaucaugacauccuaccaauaccuaaucauccaaaacaccaccugggaagaccacugccaauucucccgacccuccccaaucggauaccuaggcuuacucucccaacgcacacgcgacauuuacaucucccgccgccuccucggcaccuucacauggacccucuccgacuccgaaggcaaugaaacaccuggcggcuauugccuuacaagguggaugcucaucgaagcggaacucaaaugcuucggcaacaccgccgucgccaaaugcaacgaaaaacaugacgaagaguucugcgacaugcuccgccuguucgacuucaacaaacaggccauccgccgccucaagacagaagcccaaaugucaauacaacucaucaacaaagccgucaacgcccuuaucaacgaccaacuaauaaugaaaaaccaccuuagagacauaaugggcauccccuacugcaacuacucaaaauacugguaccucaaccacacagucaccggcaaaacaucccuuccccgaugcuggcuagucucaaacgguuccuaccucaacgaaacgcacuucuccgacgacaucgaacagcaggcggacaacaugaucaccgaacugcuucaaaaagaauacaucgaccgucaaggcaaaaccccgcucggccucguagaccucuucgucuucucaacaucauucuaccucaucucaauuuuccuccaccuaguaaaaauccccacccaccgccacguaaucgggaaacccugucccaaaccacacagacuaaaccacaugggaaucugcuccugcggccucuacaagcaccccggcguccccgucaaauggaaacgcuaa

SEQ ID NO: 2142 - RNA, 1473 nt, Artificial Sequence
  derived and/or modified protein sequence (opt11) from LASV(Lassa virus/H.sapiens-wt/NGA/2018/ISTH_1381;Clade II)__AVV65111__GPC
augggccaaaucguaaccuuuuuccaagaaguaccccacgucaucgaagaagucaugaacaucguccucaucgcccucucacuccucgccauccucaaaggcauauacaacguagcaaccugcggccucuucggccucgucuccuuccuccuacucugcggacgaucaugcagcaccaccuacaaaggagucuacgaacuccaaacacuugaacuagacauggccucccucaacaugaccaugccccucagcugcaccaaaaauaacucccaccacuacaucauggucggaaacgaaacaggccucgaacucacccucaccaacacuucaaucauaaaucacaaauucugcaaccuauccgacgcccacaagaaaaaccucuacgaccacgcccucaugagcaucaucuccacauuucaccuaucaauacccaacuucaaccaauacgaagccauguccugcgacuucaauggcggaaaaaucucaguccaauacaaccucucgcacaccuacgccgucgacgccgcgaaccacugcggcaccauagccaacggcguccuccaaacauucaugcgcauggccuggggcggauccuacauagcccucgacuccggaaaaggcucaugggacugcaucaugacauccuaccaauaccucauaauacaaaacaccaccugggaagaccacugucaguucucccgcccuagcccuauagguuaccuaggccuccucagccaacgaacacgcgacauauacaucucacgucgccuccuuggcaccuucaccuggacucugucagacuccgaaggcaacgaaacccccggagguuacugccucacucgguggaugcuaauagaagcagaacucaaaugcuucggcaacaccgcagucgccaaaugcaacgaaaaacacgacgaagaguucugcgacaugcuacgccuguucgauuucaacaaacaagccauccgacgccucaaaaccgaagcccaaauguccauccaacuaaucaacaaagccguuaacgcccuaauaaacgaccaacucauaaugaaaaaccaccuccgcgacaucaugggcauccccuacugcaacuacucaaaauauugguaccucaaccacaccgucaccggaaaaaccuccuuaccccgaugcuggcuaguuagcaacgguucuuaccucaacgaaacccacuucuccgacgacaucgaacaacaagccgacaacaugauaacugaacuacuccaaaaagaauacauggaccgccaaggcaaaacaccccucggccuuguagaucucuucguauuuuccacauccuucuaccuuaucucaaucuuccuccaccuugucaaaaucccaacccaccgacacgucgucggcaagccaugcccaaagccccaucgacucaaccacaugggcauaugcucuugcggccucuacaaacaccccggaguccccguccgcuggaaacgcuaa

SEQ ID NO: 2143 - RNA, 1473 nt, Artificial Sequence
  derived and/or modified protein sequence (opt11) from LASV(Lassa virus/H.sapiens-wt/NGA/2018/ISTH_1643;Clade II)__AVV65119__GPC
augggccaaaucauaacauucuuccaagaagucccccacgucaucgaagaagucaugaacauaguccugaucgcacucucacuccucgccauccuuaagggcauauacaacgucgccacaugcggacucuucggucuagucucauuccuccuacucugcggaagaucaugcucuaccaccuacaaaggcguuuacgaacuccaaacccucgaauuagacauggccucccuuaacaugacaaugccccuauccugcaccaaaaacaacucccaccacuacaucauggucggcaacgaaacaggccucgaacuuacccucaccaacaccagcaucauaaaccacaaauucugcaaccucagcgacgcccacaagaaaaaccucuaugaccacgcccucauguccaucaucucaaccuuccaccuaucaauaccaaacuucaaccaguacgaagccauguccugcgacuucaacggcggcaaaaucucaguccaauacaaccucucucacaccuacgccgucgacgccgcaaaccacugcgguaccaucgccaacggcguucuacaaaccuucaugcgcauggcuuggggaggcuccuacaucgcccucgacuccggcaaaggcuccugggacugcaucaugaccucauaccaauaccucaucauacaaaacacaagcugggaagaccacugccaauucucacgcccuucccccauaggcuaccucggucuccucucacaacgcaccagggacaucuacaucucccgccgccuacucggcaccuucaccuggacccuauccgacuccgaaggcaacgaaaccccaggcggcuacugccucacgcgcuggaugcucaucgaagcagaacuaaaaugcuucggaaacacggccgucgcaaaaugcaacgaaaaacacgacgaagaguucugcgacaugcuccgccucuucgacuucaacaagcaggccauccgccgccuaaaaaccgaagcccaaauguccauccaacuaaucaacaaagccguaaacgcccucauaaacgaccaacuaaucaugaaaaaccaccucagagacaucaugggcaucccuuacuguaacuacagcaaauauugguaccucaaccacacagucaccgguaaaaccuccuuaccccgaugcuggcucguauccaacggcaccuaccuuaaugaaacccacuucucugacgacauagaacaacaagcagacaacaugauaacagaacuccuccagaaagaauacaucgaccgccaaggcaaaacgccacucggacucgucgaccucuucgucuucucaaccuccuucuaccugauuuccaucuuccuccaccucgucaaaauacccacccaccgccacgucauaggcaaaccaugccccaaaccccaccgacuuaaucauaugggcaucugcagcugcggccucuacaaacaccccggcgucccgguaaaauggaagcgcuaa

SEQ ID NO: 2144 - RNA, 1473 nt, Artificial Sequence
  derived and/or modified protein sequence (opt11) from LASV(LASV003-NIG-2008;Clade II)__AIT17580__GPC
augggacaaaucauaaccuuuuuccaagaagucccgcacguaaucgaagaagucaugaacauuguccucaucgcccucucacuccuugccauuuuaaaaggcaucuacaacgucgcaaccugcggacuauucggacucgucucuuuccuccuccuaugcggccgcuccugcuccaccaccuacaaaggagucuacgagcuucaaacccucgaacucgacauggccucacucaacaugacaaugccccucagcugcacuaaaaacaacucacaccacuacauaaugguuggaaacgaaaccggccucgaacucacccuaacaaacaccuccauuaucaaccauaaauucugcaaccucuccgacgcccacaaaaagaaccucuacgaccacgcccugaugucuaucaucuccacauuccaccucucaauccccaacuucaaccaauacgaggccauguccugcgacuucaaugguggcaaaaucuccguacaauacaaccucucccacaccuacgcagucgacgccgcaaaccacugcggcaccaucgccaacggaguacuucaaaccuucaugcgaauggccuggggcggcuccuacaucgcccucgacuccggaaaaggcagcugggacugcaucaugaccucauaccaauaccuaaucauccaaaacaccaccugggaagaccacugccaauucagccgcccaucccccaucggcuaccucggccuccucucccaacgcacacgcgacaucuacaucucccgccgccuacucggcaccuucacuuggacccuaucugacagcgaauccaacgaaacuccaggaggcuacugccuaacucgcuggaugcucaucgaagcagaacucaaaugcuucggcaacacugccguagcaaaaugcaacgaaaaacacgacgaagaguucugcgacaugcuccgccuauucgacuucaacaagcaggccauccgccgccucaaagccgaagcucaaauguccauccaacuaaucaacaaagccgucaacgcccucaucaacgaccaacucaucaugaaaaaccaccuccgcgacaucaugggcauccccuacugcaacuacucuaaauacugguaccucaaccacaccguaaccggccgcacaucccucccacgcugcuggcucgucagcaacggauccuaccuaaacgaaacccacuucucagacgacauugaacaacaagcagacaacaugaucaccgaacuccuccaaaaagaauacauggaccgccaagguaaaaccccacucggccuaguggaccuauucgucuucuccaccucauucuaccugauauccaucuuccuccaccucgucaaaauccccacacaccgccacgucaucggcaaacccugccccaaaccccaccgccuaaaccacaugggaauaugcucuugcggccucuacaaacacccaggaguccccguaaaauggaaacgauaa

SEQ ID NO: 2145 - RNA, 1473 nt, Artificial Sequence
  derived and/or modified protein sequence (opt11) from LASV(LASV006-NIG-2008;Clade II)__AIT17584__GPC
augggccaaaucauaacauucuuccaagaagucccccaagucaucgaagaagucaugaacaucguccucaucgcccuaagccugcuagcuauccucaaaggaaucuacaacguugccacuugcggccucuucggccucgucuccuuccuccuacucugcggccggucaugcuccaccaccuacaaaggcgucuacgagcuacaaaccuuggagcucgauauggccucccucaacaugaccaugccccucuccugcaccaaaaacaacucccaccacuacaucaugguaggcaacgaaacaggccuagaacucacacucaccaaccaauccaucaucaaccacaaauucugcaaccucuccgacgcgcacaagaaaaaccucuacgaccacgccuuaauguccauaaucuccaccuuccaccucuccaucccaaacuucaaccaguacgaagccauguccugcgacuucaacggaggcaaaaucuccguccaauacaaucucucccacucauuugccguagacgccgccaaccacugcggcaccaucgcuaacggcguacuccaaacauuuaugcgcauggccuggggcggauccuacauagcccucgacuccggaaaaggauccugggacugcaucaugacauccuaucaguaccucaucauccaaaacaccacaugggaagaucacugccaauucucacgccccucccccaucggcuaccucggacuucucucccaacgaacccgcgacaucuacaucucccgccgacuccucggcacuuucaccuggacucuaucagacucggaaggcaacgaaacccccgguggcuacuguuuaacucgcuggaugcucauagaagccgaauuaaaauguuucggcaacaccgccgucgccaaaugcaacgaaaaacacgacgaggaguucugcgacaugcuacgccucuucgacuucaacaaacaagccauucgccgccuuaagacagaagcacaaaugucaauccaacuaauaaacaaagccgucaacgcucucaucaacgaccagcuuaucaugaaaaaccaccuccgcgacauuauggguauacccuacugcaacuacuccaaauacugguaccuaaaccauaccaaaaccggaaaaaccucccucccccgaugcuggcuagucucuaacggcuccuaccuaaacgaaacccacuucucagacgacaucgaacagcaagccgacaacaugaucaccgaacuacuacagaaagaauacauggaccgccaaggaaaaacgccgcucggccugguagaccuauucguauucuccaccuccuucuaccuaauauccaucuuccuacaccucgucaaaauccccacccaccgccacguaaucggcaaacccugccccaaaccacaucgccucaaccacaugggcaucugcuccugcggacucuacaaacaccccggcguccccgucaaauggaaacguuaa

SEQ ID NO: 2146 - RNA, 1473 nt, Artificial Sequence
  derived and/or modified protein sequence (opt11) from LASV(LASV035-NIG-2009;Clade II)__AIT17588__GPC
augggccaaaucaucaccuucuuccaggaagucccccacgucaucgaagaaguaaugaacauaguccuaaucgcccuaucccuccucgccauucuaaaaggcaucuacaacgucgcaaccugcggacucuucggacucgucuccuuccuucucuuaugcggccgaucaugcuccaccacuuauaaagggguuuacgaacuccaaacccucgaacucgacauggccucccucaacaugaccaugccccuauccugcaccaaaaacaauucacaccacuacaucaugguaggcaacgaaacaggccucgaacucacccucacaaacaccuccaucauaaaccacaaauucugcaaccugucagacgcacacaagaaaaaccuauaugaccacgcacucauguccaucaucuccaccuuccaccucagcaucccaaacuucaaccaauacgaagccaugucaugcgacuucaacggcggcaaaaucuccguacaauacaaccucucccacgccuacgccgucgacgcagcaaaccacugcggaaccaucgccaauggcguccuacaaacauucaugcguauggccuggggcgguuccuacauagcacucgacuccggaaaaggauccugggacugcaucaugaccuccuaccaauaucucaucauccaaaacaccaccugggaagaccacugccaauucucacgcccuucucccauaggcuaccucggccuacuaucgcaacgaacacgcgacaucuacauuucccgacgacuacucggcaccuucacauggacccuuucagauucugaaggcaacgaaaccccaggcggauacugccuaacccgcuggaugcuaaucgaagccgaacuuaaaugcuucggcaauacagccguagccaaaugcaacgaaaaacacgacgaagaguucugcgacaugcuccgccucuucgacuucaacaaacaagcaauccgccgccucaaagccgaagcccaaauguccauccaacucaucaacaaagccgucaacgcccucaucaacgaccaacuuauaaugaaaaaucaccuccgcgacaucaugggaauaccauacuguaacuacuccaaauacugguaccucaaccacacagucaccggcaaaacaucacucccucgcugcugguuagucuccaauggauccuaccucaacgaaacccacuucuccgacgacaucgaacaacaagcagacaacaugaucaccgaacuccugcaaaaagaauacaucgaccgccaaggcaaaacaccacucggccuugucgaccuauucguauucucaaccuccuucuaccugaucuccaucuuccuccaccucguaaaaauaccaacccaccgccacgucauagggaaacccugccccaaaccccaccgccugaaccacaugggaauaugcucaugcggccucuacaaacacccgggcguacccgucaaguggaaacgcuaa

SEQ ID NO: 2147 - RNA, 1473 nt, Artificial Sequence
  derived and/or modified protein sequence (opt11) from LASV(LASV042-NIG-2009;Clade II)__AIT17592__GPC
augggccaaaucaucaccuucuuccaagaagucccacacgucauugaagaagucaugaacaucguccuaaucgcccuaagccugcucgcgauacucaaaggaaucuacaacgucgcaaccugcggccucuucggccuaguaucauucuuacuccucuguggccgaucaugcuccaccacauacaaaggagucuacgaacuccaaacacucgaacucgacauggccucacuaaauaugacaaugccccucucaugcacaaagaacaacucccaccacuacaucauggucggaaacgaaaccggacuagaacucacccuaaccaacacauccaucaucaaccacaaauucuguaaccucucugaugcucacaagaaaaaccucuacgaccauacacucaugucaaucaucuccaccuuccaccucuccauaccuaauuucaaccaauacgaagcuaugagcugcgacuuuaacggcggacgcaucuccguccaauacaaccucucacacgcauacgcagucgacgcugccaaccacugcgguaccaucgcuaacggcguucuacaaacauucaugcgcauggccuggggaggauccuacaucgcucucgauuccggcaaaggaucaugggacugcauaaugacauccuaccaguaccucaucauccaaaacaccaccugggaagaucauugccaauucucccgcccauccccgauaggcuaccucggccuccucucccaacgcacccgcgacauauacaucucccgccgccuccucggcaccuucaccuggacccuaucagacuccgaaggaaacgaaacccccggcggcuacugccuaacccgcuggaugcuaaucgaagccgaacucaaaugcuucggcaacaccgcaguagccaaauguaacgaaaaacacgacgaagaguucugcgacaugcuccgacucuucgacuucaacaaacaagccauccgccggcucaaaaccgaagcccaaauguccauccagcucaucaacaaagccguuaacgcccuaaucaacgaccaacucauaaugaaaaaccaccuccgagacaucaugggcaucccauacugcaacuacucaaaauacugguaccucaaucacacuaucaccggcaagaccucccuaccccgcugcuggcuagucuccaacggcuccuaccucaacgaaacccacuucuccgaugacaucgaacaacaagcagacaacaugaucacugaacuacuccaaaaagaauacauugaccgacaaggcaaaaccccacugggccucguugaccuuuucgucuucuccaccuccuucuaccucaucucaauuuuccuacaccugguuaaaauccccacacaccgacacgucgucggcaaacccugcccaaaaccacaccgccucaaccacaugggaaucugcagcugcggccucuacaaacaccccggcgucccaguuaaauggaaacgcuaa

SEQ ID NO: 2148 - RNA, 1473 nt, Artificial Sequence
  derived and/or modified protein sequence (opt11) from LASV(LASV045-NIG-2009;Clade II)__AIT17596__GPC
auggggcaaaucaucaccuucuuccaagaagucccccacgugaucgaagaagucaugaacaucguccuuauagccuuaucgcuacuugccauccucaagggcaucuacaaugucgccaccugcggccuauucggccucgucucuuuccuacuccucugcggccgcuccugcucuaccaccuacaaaggcgucuacgaacuccaaacccucgaacuagacauggcaucccugaauaugaccaugccccucuccugcaccaagaacaacucacaccacuacaucauggucggcaacgaaaccggccuagaacucacccucacaaacacaucaauaaucaaccacaaauucugcaaccucuccgacgcccacaaaaaaaaccucuacgaccacgcccuaaugagcauaaucucaacauuccaccucuccauccccaacuucaaccaauacgaagcaauguccugcgacuucaauggcggaaaaaucucaguucaauacaaccugucacacacauacgcagucgacgccgccaaccacugcggaacuaucgccaacggcguccuccagacauucaugcgaauggcauggggcggaagcuacaucgcgcucgacuccggcaaaggcuccugggacugcaucaugaccucauaccaauaccucauaauccaaaacaccucgugggaagaccacugccaauucucccgccccucacccaucggcuaccuaggccuacuaucgcaacggacccgcgacaucuacaucucacgccgccuccucggaaccuucaccuggacgcuauccgacuccgaaggcaacgaaaccccagguggcuacugccuaacacgcuggaugcucaucgaagccgaacuuaaaugcuucggaaauaccgccgucgccaaaugcaacgaaaaacacgacgaagaauucugcgacaugcugcgccucuucgacuucaacaaacaagccauccgacgucucaaaacagaagcacaaaugagcauucaacucaucaacaaagccgucaacgcccuuaucaacgaccagcucauaaugaaaaaccaccugcgcgacauaaugggcauacccuacugcaacuacucaaaguacugguaccucaaccauaccgucaccggaaaaaccucccucccccgcugcuggcucgucuccaacggauccuaccucaacgaaacccacuucuccgacgacaucgaacagcaagccgacaacaugauuaccgaacuucuccaaaaagaauauaucgaccgccaaggcaaaacaccccuaggccuagucgaucuuuucguauucuccaccaguuucuaccuuaucucaaucuuccuacaccuagucaaaauacccacucaccgacacguaaucggcaaacccugccccaaaccccaccgccucaaccauaugggcauaugcuccugcggccuuuacaagcaccccggcguccccgucaaauggaaacgauaa

SEQ ID NO: 2149 - RNA, 1473 nt, Artificial Sequence
  derived and/or modified protein sequence (opt11) from LASV(LASV046-NIG-2009;Clade II)__AIT17600__GPC
augggucaaaucauaacuuucuuccaagaagucccccacguaauugaggaagucaugaacauaguccuuaucgcacucucccuacucgccauccuaaaaggcaucuacaacgucgcaaccugcggccuauucggucucguaucauuccuccuccucugcggccgcagcugcuccaccaccuacaaaggcgucuacgaacuccaaacacucgaacucgacauggccucccuaaacaugaccaugccucuuuccugcaccaaaaacaacucccaccacuacaucaugguuggcaacgaaaccggccucgaacucacacuaaccaauacauccaucauuaaccacaaauucugcaaccuaucagacgcccacaagaaaaaccucuacgaccacgcccucaugagcaucauaucaaccuuccaccucucaaucccaaacuucaaccaauacgaagccauguccugcgacuucaacggcggcaaaaucuccguccaauacaaccucucacacgccuacgccggcgacgccgcaaaccacugcggcaccaucgccaacggcguccuacaaaccuucaugcgcauggcguggggcggauccuauaucgcccuagacuccggcaaaggcuccugggacugcauaaugacaucauaccaauaccucaucauucaaaacaccaccugggaagaccacugccaauucucccgccccucacccaucggcuaccucggacuacuaucccaacguacccgcgacauauacaucucccgacgucucuuaggcaccuucaccuggacacucuccgacucugaaggcaacgaaacccccggcggcuacugccucacccgcuggaugcucaucgaagcagaacucaaaugcuucgguaacaccgccgucgccaaaugcaacgagaaacacgacgaagaguucugcgacaugcuccgccuauuugacuucaacaaacaagcaauccgccgccuaaaaaccgaagcccaaauguccauacaacuaaucaacaaagccguaaacgcccuaauaaacgaccagcuaaucaugaaaaaccaccucagagacaucaugggaaucccauacugcaacuacuccaaauacugguaucucaaccacaccguaaccggaaaaaccucccucccaagaugcuggcucgucuccaacggcuccuaccuaaacgaaacccacuucuccgacgacauugaacaacaagccgacaacaugaucaccgagcugcuccaaaaagaauacaucgaccgccaaggaaagacaccccuuggucucgucgaccucuucgucuucuccaccuccuucuaccucaucagcauauuccuccaccuagucaaaauccccacccaccgucacgucaucggcaaaccaugccccaaaccccaccgccuuaaccacaugggcauauguucaugcggccucuacaagcaccccggcguccccgucaaauggaaacgauaa

SEQ ID NO: 2150 - RNA, 1473 nt, Artificial Sequence
  derived and/or modified protein sequence (opt11) from LASV(LASV049-NIG-2009;Clade II)__AIT17604__GPC
augggccagauaaucaccuucuuccaagaagucccacacgucaucgaagaagucaugaacaucguccucaucgcccucucccuccucgccauccucaaaggcaucuacaacgucgcuacuugcggccucuucggccucgucuccuuccuccuacucugcggccgcuccugcucgaccaccuauaagggugucuacgaacuccaaacacuugaacuugauaugaccucccuaaacaugaccaugccccucuccugcaccaagaacaacucacaccacuacauaaugguaggaaacgagaccggccucgagcuaacucucaccaacacauccauuaucaaccacaaauucuguaaccuauccgacgcgcacaagaaagaccuguacgaccacgcacuaaugucaaucaucuccacuuuccaccucuccaucccaaacuucaaccaauacgaagccauguccugcgacuucaacggcggcaaaauuuccguccaauauaaccugucccacacguacgccgucgacgccgccaaacacugcggaaccauagccaacggcguccuccaaaccuuuaugcgcauggccuggggcgggucuuacaucgcccucgacuccggcaaaggauccugggacugcauaaugacaagcuaccaauaccuaaucauacaaaacacaaccugggaagaccacugccaguucucccgaccaagcccagucggauaccucggccugcucucccaacgcacccgagacaucuacaucucacggcgacuacuaggaaccuucaccuggacccuuuccgacuccgaaggcaaugaaacaccgggcggcuacugccugacccgcuggaugcuaaucgaagccgaacuuaaaugcuucggaaacacagcugucgccaaaugcaacgaaaaacaugacgaagaguucugcgacaugcuccgccuauucgacuucaacaaacaagccaucagacgacucaaaaccgaagcacaaaugagcauccaacuaaucaacaaagccgucaacgcccuaaucaacgaccaacucaucaugaaaaaccaccuacgcgacauaaugggcauuccauacugcaacuacuccaaauauugguaccucaaccacacagucaccggcaagaccucccucccacgcuguuggcucguaagcaacgguuccuaccuaaacgaaacccacuucucagacgacaucgaacaacaagcugacaacaugaucacagaacuccuacaaaaagaauaccuagaccgacaaggcaaaacaccccucggccuugucgaccuauucgucuucucaaccucauucuaccuaaucuccaucuuccuccaccuagucaaaauaccaacucaccgucacgucaucggaaaacccugcccaaaaccucaccgccucaaccacaugggcaucugcuccugcggccucuacaaacaccccggcgugcccgucaaauggaaacgcuaa

SEQ ID NO: 2151 - RNA, 1473 nt, Artificial Sequence
  derived and/or modified protein sequence (opt11) from LASV(LASV052-NIG-2008;Clade II)__AIT17608__GPC
augggccaaauaauaacuuucuuccaagaaguaccccacguuaucgaagaaguaaugaauaucguccucauugcccucucccuacucgcaauccuaaagggcaucuacaacgucgcaaccugcggacuauucggccucguauccuuccuccuacucugcggccgcagcugcuccacaaccuacaagggaguauaugaacuacaaacccucgaacucgacauggccagccuaaacaugacaaugccucucucaugcaccaaaaacaacucccaccacuacauaauggucggcaaugaaaccggccucgaacucacccucaccaacaccucaauaaucaaccacaaauucugcaaccucucagacgcucacaagcgaaaccuuuauaaccacgcccuaauguccaucaucuccaccuuccaucuaucuauccccaacuucaaccaguacgaagcaaugucgugcgacuucaacgguggcaaaaucuccguccaauacaaccucucccacacauacgccguugacgccgccaaccacugcggcaccaucgcaaacggcguccuccaaaccuucaugcgcauggcauggggcggcuccuacaucgcccucgacuccggcaaaggauccugggacugcaucaugacauccuaccaauaccucaucauccaaaauaccaccugggaagaccacugccaguucucacgccccucccccauuggcuaucucggccuacuaagccaacgaacuagagacaucuacaucucacgacgacuccucggcaccuucaccuggacacuuucugacucagaaggaaacgaaaccccaggcggcuacugccuuacccgcuggaugcuaaucgaggccgaacucaaaugcuucggcaacaccgcagucgccaaaugcaacgaaaaacacgacgaagaguucugcgacaugcuccgccucuucgacuucaacaagcaagcaauucgucgccucaaaaccgaagcacaaaugucgauccagcucauaaacaaagccgucaacgcccucaucaacgaccaacuaaucaugaaaaaccaccuccgugacauaaugggaauccccuacugcaacuacucaaaauacugguaccuuaaccacacaguaacuggaaaaacaucccuaccccgaugcuggcucgucuccaacggauccuaccucaacgaaacccacuuuucagaugacaucgaacaacaagccgacaacaugaucacagaacuccuacagaaagaauacaucgaccgccaaggcaagaccccacuuggacucguagaccuauucgucuuuuccacaucuuucuaccucaucaguauuuuccuccaccucguaaagauccccacccaccgccacaucauaggcaaacccugccccaaaccccaccgccucaaccacaugggcaucugcuccugcggacucuacaaacaccccggcgucccuguaaaauggcgccgcuaa

SEQ ID NO: 2152 - RNA, 1473 nt, Artificial Sequence
  derived and/or modified protein sequence (opt11) from LASV(LASV056-NIG-2008;Clade II)__AIT17612__GPC
augggccaaaucaucaccuucuuccaagaggucccccacgucaucgaggaagucaugaacauaguccucaucgcucugucccuccuagccauacuaaaaggcauuuacaacguugccacaugcggccuauucggccucguauccuuccuacuccuaugcggccgcuccugcucaaccaccuauaaaggaguauacgaacuccagacccuagaacucgacauggccagucucaacaugaccaugccccucuccugcaccaaaaacaacucacaccacuacauccgagucggaaacgaaaccggccuagaacucacacugaccaacaccuccaucaucaaccacaaauucugcaaccuauccgacgcgcacaagaaaaaccucuacgaccacucccuaauguccaucaucaguacauuccaccucucuauaccaaacuuuaaccaauacgaagccaugagcugcgacuucaacggaggcaaaaucucaguccaauauaaccucucacacaccuacgcaguugacgcagccaaccacugcggcaccauugccaacggcguccuccaaacuuuuaugcgcauggcauggggcggcucuuauaucgcccucgacuccggcaaaggaaacugggacugcauaaugacaucauaccaauaccuaaucauccaaaacacaaccugggaagaucacugccaauucucccgccccucccccauuggcuaccuaggucuucuuucccaacgcacucgcgacauauacaucucccgccgccuccucggaaccuucaccuggacgcuuuccgacucagaaggcaacgaaaccccaggaggcuacugccuaacacgcuggaugcucaucgaggccgaacucaaaugcuucggcaacacugccguagccaaaugcaacgaaaaacacgaugaagaguucugcgacaugcuacgacucuucgacuucaacaaacaagccaucagacgccuuaaaaccgaagcgcaaauguccauccaacuaauuaacaaagccgucaacgcacucaucaacgaccaacucaucaugaaaaaccaucuccgagacaucaugggcauccccuacugcaacuacuccaaauacugguaccucaaucacaccgucacuggcaaaacuucccucccccgaugcuggcucgucuccaacggauccuaccucaacgaaacccacuucuccgacgauaucgaacaacaagccgacaacaugaucaccgaacuccuccaaaaagaauacaucgaccgucaaggcaaaacaccccucggccuagucgaccucuucguauucuccaccuccuucuaucuuauauccauuuuccuucaccucguaaaaauccccacccaccgccacguagucggcaaaccaugcccaaaaccacaccgccuuaaccacaugggcaucugcuccugcggacuuuacaagcacccaggcguacccgucaaauggaaacgauaa

SEQ ID NO: 2153 - RNA, 1473 nt, Artificial Sequence
  derived and/or modified protein sequence (opt11) from LASV(LASV058-NIG-2008;Clade II)__AIT17616__GPC
augggccaaaucauaaccuucuuccaagaaguaccccacgucaucgaagaagucaugaacaucguccucaucgcacucagccuccucgcaauccuaaaaggcaucuacaacgucgccaccuguggacucuucggccuaguaucauuccuucuccuuugcggaagauccugcuccacaacauacaaaggcgucuacgaacuacagacccucgaacuagacauggccagccucaacaugaccaugccccuauccugcaccaaaaacaacucccaccauuacaucauggucggaaacgaaacaggccuagaacucacccucacuaauacaucaaucaucaaccacaaauucugcaaccuuucggacgcccacaagaaaaaccuauacgaccacgcccucaugucgaucaucuccaccuuucaccucucuauccccaacuucaaccaauaugaggccaugucaugcgauuucaacggcggcaaaaucagcguacaauacaaccucucccaugcauacgccgucgacgccgccaaccacugcggcaccauagcaaacggcguccuucaaaccuucaugcgcauggccuggggcggauccuacaucgcacucgacuccggaaaaggauccugggacugcaucaugaccuccuaccaguaccuaaucauccagaacaccaccugggaagaccacugucaauucucacggccaucccccauaggcuaccuaggccuacucagccagcgcacccgcgacaucuauauaucacgccgccuccucggcacauucacauggacccucuccgacucagaaggcaacgaaaccccaggcggcuacugccucacccgauggaugcucaucgaagccgaacuaaaaugcuucggaaacaccgccgucgcaaaaugcaacgaaaaacacgacgaagaguucugcgacaugcuccgccucuucgacuuuaacaaacaagccauccgccgacucaaaacagaagcacaaauguccauacaacucaucaacaaagccgucaacgcccucaucaacgaccaacugauuaugaaaaaccaccuacgagacaucauggguauacccuacugcaacuacuccaaauacugguaccucaaccauaccgucacuggcaaaacaucacucccacgcugcuggcucguauccaacggcuccuaccucaacgaaacacacuucuccgacgacaucgaacaacaagccgacaacaugauaaccgaacuucuacagaaagaauacauagaccgccaaggcaaaacuccacucggccuggucgaccucuucguguucucaacauccuucuaccuaauauccaucuuccuccaccuaguaaaaaucccaacccaccgccacgucaucggaaaacccugccccaaaccacaccgccucaaccacaugggaauaugcuccugcggccucuacaaacaccccggcguacccgucaaauggaaacgauaa

SEQ ID NO: 2154 - RNA, 1473 nt, Artificial Sequence
  derived and/or modified protein sequence (opt11) from LASV(LASV063-NIG-2009;Clade II)__AIT17620__GPC
augggacaaauaaucaccuucuuccaagaagucccccacguaauagaagaaguaaugaacaucguccuaaucgcccuaucccuacucgccauccuuaaaggaaucuacaacgucgccacaugcggcuuauucggccucgucagcuuccuccugcucugcggcagauccugcucaaccaccuacaaaggcgucuacgaacugcaaacacuggaacucgacauggcaucccucaacaugaccaugccccucucgugcacuaaaaacaacagccaccacuacaucauggucggcaacgaaaccggccucgaacucacccucaccaacaccuccauaauuucccacaaguucugcaaccuauccgacgcccacaagaaaaaccuauaugaccacgcccucaugaguaucauauccacuuuccaccucuccauccccaacuucaaccaauacgaagccauguccugcgacuuuaacggcggcaaaaucagcguccaguacaaccucucucacgcuuacgccaucgacgccgcaaaccacugcggcaccgucgccaacggcguccuccaaaccuucaugcgcauggccuggggaggaucauacaucgcccucgauuccggcaaaggcaguugggacugcauaaugaccucauaccaauaccuaauaauccaaaacaccaccugggaagaccacugccaauucucacgccccuccccaaucggcuaccucggccuacucucccaacguacccgcgacauauacauaucccgacgacuccucggcaccuucaccuggacacucucugacucagaaggaaacgaaacccccggcggcuacugccucacccgauggaugcucauagaagcagaacuaaaaugcuucgguaacaccgccgucgccaaaugcaacgaaaaacacgacgaggaguucugcgacaugcuccgccucuucgacuucaacaaacaagccauccgccgccucaaagccgaagcccaaauguccauccaacucaucaacaaagccgucaacgcccucaucaacgaccagcucaucaugaaaaaccaccuucgcgacaucaugggcauacccuacuguaauuacagcaaauacugguaccuaaaccacacagucacaggcaaaacuucccucccccguuguuggcucguuuccaauggcuccuaccucaacgaaacccacuucucagacgacauagaacaacaagccgacaacaugaucaccgaacuacuccaaaaagaauacauggauagacaaggaaaaacuccccucggacucgucgaccucuucgucuucuccaccuccuucuaccucaucucuaucuuccuucaccucgucaaaauaccaacacaccgccacgucaucggaaaaccaugccccaaaccacaccgccugaaccacaugggcauaugcuccugcggccucuacaaacaccccggcgucccagucaaauggaaacgauag

SEQ ID NO: 2155 - RNA, 1473 nt, Artificial Sequence
  derived and/or modified protein sequence (opt11) from LASV(LASV1000-NIG-2009;Clade II)__AIT17782__GPC
augggacaaaucaucaccuucuuccaagaggucccccacgucauagaagaagucaugaacaucguccucaucgcacucucccuccucgccauccugaaaggcauauacaacgucgcgaccugcggccucuucggccucgucucuuuccuccuccucugcggcagaucgugcuccaccaccuacaaaggcgucuacgaacugcaaacccucgagcucgacauggccucccucaacaugacuaugccccuguccuguaccaaaaacaacucccaccauuauaucauggucggcaaugaaaccggacucgaacucacccucacuaacaccucaauaaucaaccacaaauucugcaaccucucagacgcccacaaaaagaaccucuacgaccacgcacuaauguccauaauaucaaccuuccaccucucaauccccaacuucaaccaauacgaggcgauguccugcgacuuuaacggcgggaaaaucuccguccaauacaaccuuucucacaccuacgccgucgacgcagccaaccacugcggcacaaucgccaacggcguccuccaaacauucaugcgaauggccuggggcggcuccuacauugcccucgacuccggcaaaggcuccugggacugcaucaugaccuccuaccaguaccucauaauucaaaacacaacuugggaagaccacugccaauuuucccgcccguccccaauuggauaccucggccuccuuagccaaaggacccgcgacaucuauauuucccgacgccuccucggcacauucaccuggacacuauccgacuccgaaggcaacgaaacccccggcggauacugccuaacccgcuggaugcucaucgaagccgaacucaaaugcuucggaaacaccgccgucgcuaaaugcaacgaaaaacacgacgaggaguucugcgacaugcuccgccuauucgacuucaacaagcaagcuaucaaacggcucaaaaccgaagcgcaaauguccauccaacucaucaacaaagcaguaaacgcccucaucaacgaccaacuaaucaugaagaaccaccuacgcgacaucaugggaauccccuacugcaacuacuccaaauauugguaccuaaaccacaccgucacaggcaaaaccucccuaccccgaugcuggcuaguuagcaacggcucauaccuaaaugaaacccacuucucagacgacaucgaacaacaggcggacaacaugaucaccgaacuccuccaaaaggaauacaucgacaggcaaggaaaaacgccccugggccuagucgaccuauucgucuucuccaccucauucuaccuaauaagcaucuuccuccaccucgucaaaauccccacccaccgacacgucgucggaaaacccugcccaaaaccccaccgacucaaccacauggguaucugcuccugcggccuauacaaacaucccggcguccccguaaaauggaaacgcuaa

SEQ ID NO: 2156 - RNA, 1473 nt, Artificial Sequence
  derived and/or modified protein sequence (opt11) from LASV(LASV1008-NIG-2009;Clade II)__AIT17786__GPC
augggucaaaucaucaccuucuuccaggaagugccccaugucaucgaagaaguaaugaauaucguucucauagcccucucacuccucgcaauccucaaggguaucuacaacguagcaaccugcggccuauucggccucgucuccuuccuccuccucugcggccgaucuugcuccaccacuuacaaaggagucuacgaacuacagacacuagaacucgacauggccucgcucaacaugacaaugccccuaucaugcacgaaaaacaauucccaccacuacaucauggucggcaacgagaccggccuagaacucacccucacgaacacauccaucaucaaccauaaauucuguaaccuuuccgacgcccacaagaaaaaucucuaugaccacgccuugauguccaucauauccaccuuccaccuauccaucccaaacuucaaccaauacgaagccaugucuugcgacuucaacggcgggaaaaucuccguacaauacaaccucucccacgccuacgcaauagacgccgccgaucacugcggcaccaucgccaacggcguccuccaaaccuucaugcgcauggccuggggcggcuccuacaucgcccuagacuccggcaaagguuccugggacugcaucaugacauccuaccaauaccucaucauccaaaacacaacaugggaagaccacugccaauucucacgacccuccccaauaggcuaccucggccuccucucccaaagaacaagagacaucuacaucuccagacgacuccucggcaccuucaccuggacccucagcgacuccgaagguaacgaaacccccggaggcuacugccuaacccgcuggaugcuaaucgaagccgaacucaaaugcuucggcaacacugccgucgccaaaugcaacgaaaaacacgacgaagaguucugcgacaugcuccgccucuucgacuuuaacaaacaggcaauccgccgacucaaaaccgaagcccaaauguccauccaacucaucaacaaagcggucaacgcccuuauaaacgaucaacuaauaaugaaaaaccaccuacgagacauaaugggcauccccuacugcaauuacuccaaauacugguaccucaaccacacugucacaggcaaaaccucccuaccccgcugcuggcucgucuccaacggaagcuaccucaaugaaacacacuuuuccgacgacauugaacaacaggccgacaauaugauuaccgaacuccuccaaaaagaauacauggaccgacagggcaaaaccccacucggccuagucgaccucuucgucuucucgaccuccuucuaccuaaucuccaucuuccuccaccucgucaaaauccccacccaccgccacauaacaggcaaacccugccccaaaccacaccgccucaaccacaugggcaucugcucuugcggucucuacaaacacccaggcgucccaguaaaauggaaacgcuaa

SEQ ID NO: 2157 - RNA, 1473 nt, Artificial Sequence
  derived and/or modified protein sequence (opt11) from LASV(LASV1011-NIG-2009;Clade II)__AIT17790__GPC
augggccaaaucauaaccuucuuccaggaagucccacacguaaucgaagaaguaaugaacaucguccucaucgcccucucacuccuagccauccucaagggcauuuacaacgucgcuaccugcggacucuuuggccucgucagcuuccuccuccuauguggccgaagcugcuccacaaccuacaaaggagucuaugaacuucaaacacuagaacucgacauggcaucucucaacaugacaaugccacuaagcuguaccaaaaacaacucccaccacuacaucaugguaggcaacgaaaccggccucgaacugacccuaaccaacaccagcaucaucaaccacaaauucugcaacuuauccgaugcccacaagaaaaaccuauacgaccacgcccuuaugucaaucaucuccaccuuccaccucucaauccccaacuucaaccaauacgaagcaauguccugcgacuucaacggcggcaaaauuuccguccaauacaaccucucccacacauacgccgucgacgcagccaaccacugcggcaccaucgcaaauggcguccuccaaacauucaugcgcauggccuggggcggcuccuacaucgcccucgauuccggcaaaggcucaugggacugcaucaugaccuccuaccaauaccuaaucauccaaaacacgaccugggaggaccacugccaauucagccgccccucacccauuggauaccuaggccuacucucccaacgcacccgagacaucuacauaucccgccgccuacuaggcacauucacauggacacuauccgacucagaaggcaacgaaacccccggcggauacugccucacccguuggaugcucaucgaagcagaacuaaaaugcuucggcaacacagccguagccaaaugcaacgaaaaacacgaugaagaguucugcgacaugcuccgccucuucgacuucaacaaacaagcaauacgccgccuaaaaaccgaagcccaaaugucaauacaacucaucaacaaagcugucaacgcacuaaucaacgaccaacucaucaugaaaaaccaccuccgugacaucaugggcaucccauacugcaacuacagcaaauacugguaccugaaccacacuguaaccggaaaaaccucccucccccgcugcuggcucgucuccaauggcucauaccucaaugaaacccacuucucugacgacauagaacaacaagcagacaacaugaucaccgaacuccuccaaaaggaauauauggaccgccaaggcaaaacaccacucggucugguagaccuauucgucuucagcaccuccuucuaccucaucucaaucuuccuacaccuugucaagauccccacccaccgacacaucaccggcaaacccugcccaaagccccaccgccucaaccacaugggcauaugcuccugcggccucuacaaacacccaggcguccccguaaaauggaaacgauaa

SEQ ID NO: 2158 - RNA, 1473 nt, Artificial Sequence
  derived and/or modified protein sequence (opt11) from LASV(LASV1016-NIG-2009;Clade II)__AIT17798__GPC
augggccaaauuaucaccuucuuccaggaagucccacacgucauagaagaaguuaugaacauuguccucaucgcccucagccuccuagccauccucaaaggcaucuacaacgucgcaaccugcggccuguucggccuugucuccuuccuucuccucugcggacgcucaugcucaaccaccuacaaaggaguauacgaacugcaaacccucgaacucgacauggccagccucaacaugacaaugccccucagcugcaccaaaaacaauagccaccacuacaucauggucggcaacgaaacaggacucgaacuaacccuaaccaacaccuccauaauaaaccacaaauucugcaaccuauccgaugcacacaaaaagaaccucuacgaccacgcacuaauguccaucaucuccaccuuccaccucagcauccccaacuucaaccaauacgaagcaauguccugcgauuucaacggaggcaaaaucucaguccaauacaaccucucccauaccuacgccguugacgcugcaaaccauugcggaacaauagccaacggcguacuccaaaccuucaugcguauggccuggggcggcuccuacaucgcucucgacucaggaaaaggcucaugggacugcauaaugaccuccuaccaauaccucaucauacaaaacacaaccugggaagaccacugccaauucucccggccaagccccaucggcuaccuaggacuccucucccaacgaacacgcgacaucuacaucagccgucgccuacucgggaccuucacauggacccucucugacuccgaaggcaacgaaacccccggcggcuacugccucaccagauggaugcucauagaagccgaacuaaaaugcuucggaaacacugcagucgcaaaaugcaacgaaaaacacgacgaagaauuuugcgacaugcuccgccucuucgacuucaacaaacaagccauaaugcggcucaaaaccgaagcacaaaugucaauacagcuaaucaacaaagccgucaacgcccucaucaaugaccaacugauaaugaaaaaccaucuacgcgacauaaugggaauacccuacugcaacuacucaaaauacugguaccuaaaccacaccgucaccggcaaaaccucccuaccacgcuguuggcuggucucaaacggaucauaucucaacgaaacccacuucagcgacgauaucgaacagcaagccgacaacaugaucaccgaaaugcuccagaaagaauaccucgaccggcaaggcaaaacaccccuaggccuggucgaccuauucgucuucuccaccagcuucuaccucauaucaauauuccuacacuuagucaaaauacccacccaccgccacauaaucggaaaacccugccccaaaccccaccgccucaaccacaugggaaucuguagcugcggccucuacaaacauccuggagucccagucaaauggaaacgguga

SEQ ID NO: 2159 - RNA, 1473 nt, Artificial Sequence
  derived and/or modified protein sequence (opt11) from LASV(LASV221-NIG-2010;Clade II)__AIT17624__GPC
augggacaaaucaucaccuucuuccaggaaguaccacacguaauagaagaagucaugaacaucguucuaaucgcccucucacuacucgcaauacucaaaggcauauacaacgucgcaaccugcggccucuucggccucgucuccuuccuacuccuuugcggccgcuccugcuccacaaccuacaaaggcgucuacgaacuccaaacucucgaacuagacauggcuucccucaacaugaccaugccccuuucuugcaccaaaaacaacucccaccacuacaucauggucggcaacgaaaccggccuagaacucacccuaacaaacaccuccaucaucaaccacaaauucugcaaccucucagaugcccacaaaaagaaccucuacgaucacgccuuaaugaguaucaucuccaccuuccaccuaucaauacccaacuucaaccaguacgaagcaauguccugcgacuucaacggcggaaaaaucucgguccaauacaaccucucccacaccuacgccaucgacgccgcaaaccacugcggcaccaucgccaacggcguucuccaaacauucaugcgcauggccuggggcggcuccuacaucgcccucgacuccggaaaaggaagcugggacugcaucaugaccagcuaccaguaccuaaucauacaaaacaccaccugggaagaucacugccaauuuucucgccccucccccaucggcuaccucggccuacucucccaacgcacucgcgacaucuacaucagcagacgccuccuuggcaccuucaccuggacccuauccgacuccgaagguaacgaaacucccggcggcuacugccucacacgcuggaugcuuaucgaagccgaacucaaaugcuucggaaacacagccguagccaaaugcaacgaaaaacacgacgaagaauuuugcgacaugcuccgccuauucgacuucaacaagcaagccauccgccgcuuaaaaaccgaagcccaaaugucaauccaacucaucaacaaagccgucaacgcccucauaaacgaccaacucaucaugaaaaaccaccuccgugacaucaugggcauccccuacugcaacuacuccaaauacugguaccucaaccacacugucacgggaaaaacaagccuuccccgaugcuggcuagucuccaauggcucuuaccucaacgaaacacacuucucugacgacaucgaacaacaagccgacaacaugaucaccgaaaugcuacaaaaggaauacauggaccgacagggcaaaacaccccucggccucgucgaccucuucguguucucaaccuccuucuaccugaucuccaucuuccuucaccucguaaaaauccccacccacagacacguaaucggaaagccaugcccaaaaccccaccgccuaaaccacaugggaauuugcucaugcggccucuacaaacaccccggcgucccagucaaauggaaacgcuaa

SEQ ID NO: 2160 - RNA, 1473 nt, Artificial Sequence
  derived and/or modified protein sequence (opt11) from LASV(LASV224-NIG-2010;Clade II)__AIT17626__GPC
augggccaaaucaucaccuucuuccaagaggucccucacgucaucgaagaagucaugaacaucguccucaucgcacuuucccuccucgcuauccuuaaaggaguauacaacgucgcaaccugcggccucuucggccucguaucauuccuucuacucugcggacgcuccugcucaaccaccuacaaaggcguauacgagcuccagacucucgaacuagacauggccucccucaacaugaccaugccccucucuugcaccaaaaacaacucccaccacuacauuauggucggaaaugaaaccggccucgaacugacacuaaccaacaccucuaucauccaacacaaauucugcaaccucuccgacgcucacaagaaaaaccucuacgaccacgcccucaugucaaucauaucaaccuuucaccuauccaucccaaacuucaaccaauaugaagccauguccugcgauuucaacggcgguaaaaucacaguccaauacaaccucucccacucauacgccauagacgccgccaaccacugcggaacuaucgcuaacggcguccuacaaaccuucaugcgcauggcuuggggcggcuccuacaucgcccucgauuccggcaaaggauccugggacugcaucaugaccuccuaccaauaccucaucauccaaaacaccaccugggaagaccacugccaauucucccgacccucucccaucggauaccucggccuccugagccaacggacccgugacaucuacauauccagacgccuccuugguacauucaccuggacccucuccgacucagaaggcaacgaaacucccggcggauacugccuaacacgcuggaugcucauagaagcagaacuaaaaugcuucggaaacaccgccgucgcgaaaugcaacgaaaaacacgacgaagaguucugcgacaugcuacgccucuucgacuucaacaaacaagccauccgccgccuuaaaaccgaagcacaaaugagcauacaacucauaaacaaagcagucaacgcccucauuaacgaccaacucaucaugaaaaaccaucuccgcgacauaaugggcauacccuacugcaauuacuccaaauacugguaucucaaccacaccgucacaggacgcaccucacucccccgaugcuggcuuguuuccaauggcuccuaccucaacgaaacccacuucuccgacgacaucgaacaacaagcugacaacaugaucacagagcuccuacagaaagaauacauggaccgacagggcaaaacaccccucggccucgucgaccucuucguauucucaaccagcuucuaccucaucucaaucuuccuccaccucgucaaaauucccacacaucgacacaucaucggcaaaccaugccccaaaccacaccgccucaaccacaugggcgucugcuccugcggacucuauaaacaccccggcgucccagucaaauggaagcgcuaa

SEQ ID NO: 2161 - RNA, 1473 nt, Artificial Sequence
  derived and/or modified protein sequence (opt11) from LASV(LASV225-NIG-2010;Clade II)__AIT17630__GPC
augggacaaaucauaaccuucuuccaggaaguaccacacgucaucgaagaagucaugaacaucguacugauugcacucucccuacucgcaauccuaaaaggaauauacaacgucgcuaccugcggucuauucggccuccuauccuuccuccuccucugcggccgcucaugcucuacaacauacaaaggagucuaugaacuccaaacccucgaacuagacauggccagccucaacaugaccaugccacucucuugcaccaaaaacaacucccaccacuacauaaugguuggaaacgagaccggccucgaacucacacuaaccaacaccuccauaaucaaccacaaguucugcaaccuaucagacgcccacaagaaaaaucuauacgaccacgcccucaugagcaucaucucaaccuuccaccuauccaucccaaacuucaaccaauacgaagccauguccugcgacuucaacggaggcaaaaucuccguccaauacaaucuaucacacgccuacgccguugacgccgccgaacacugcggcaccaucgccaacggaguccuccaaaccuucaugcgaauggccuggggcggguccuacaucgcccucgacuccggcaaaggcuccugggacugcgucaugaccagcuaccaauaucucaucauacagaacaccuccugggaagaccacugccaauucucacgacccucacccauagguuaccuaggccuacucucccaacgcacacgcgacaucuacaucucccgccgucuccucggcaccuucaccuggacccucuccgacuccgaaggcaacgaaacaccgggcggcuacugccuaacccgauggaugcucauagaagcagaacucaaaugcuucggcaacacugccgucgccaaaugcaacgaaaaacacgacgaagaguucugcgacaugcuccgccuuuucgacuucaacaaacaagcaauccgccgccuaaagaccgaagcgcagaugucaauccaacucauaaacaaagccgucaacgcccuaaucaacgaccagcucauuaugaaaaaccaccuccgagacaucaugggaaucccauacugcaauuacuccaaauacugguaccuaaaccacaccgugaccggcaaaaccuccuuaccccgcugcuggcucguaucaaacggcuccuaccuuaacgaaacacacuucucagacgacaucgaacaacaagccgacaacaugaucaccgaacuccuacaaaaagaauacaucgaccgacaaggcaagaccccucucggccucguagaccucuucgucuucucaaccuccuuuuaccucaucagcaucuuucuacaccuaguaaagaucccaacacaccgccacgucaucggcaaaccaugccccaagccucaccgccucaaccacaugggcaucugcucauguggccucuacaaacaccccggcguccccgucaaauggaagcgcuaa

SEQ ID NO: 2162 - RNA, 1473 nt, Artificial Sequence
  derived and/or modified protein sequence (opt11) from LASV(LASV229-NIG-2010;Clade II)__AIT17634__GPC
augggacaaauuaucacauucuuccaagaggucccccacguuaucgaagaaguaaugaacaucguccucauagcacugucccuccucgcuauacucaaaggcauauacaaugucgcaaccugcggacucuucggccucgucucauuccuacuccuaugcggcagauccugcuccacuaucuacaaagacgucuacgaacuacagacccucgaacuggacauggccucgcuaaacaugacgaugccccuaucaugcaccaaaaacaacucccaccacuacaucauggucggcaacgaaaccggccucgaacucacacugaccaacacauccaucaucaaccacaaauuuugcaaccuaucagacgcccacaagaaaaaccucuacgaccaugcccucauguccaucaucuccaccuuccaccucucaauccccaacuucaaccaauacgaagccaugucaugcgacuucaacgguggcaaaaucuccguccaauacaaccuaucacacaccuacgccaucgacgccgccaaccacugcggaacaaucgccaacggcguccuccaaaccuucaugcgcauggccuggggcggaucauacaucgcccucgacucgggcaaaggcaguugggacugcaucaugaccuccuaccaauaccucaucauucaaaacacaacaugggaagaccacugccaauucucaagacccucuccaaucggcuaccucggccuccucucacaacgaacacgcgacaucuacaucucucgacgccuccuuggaaccuucacauggacacucucagacuccgaaggcaacgaaacccccggcggauacugccugacccgcuggaugcuuaucgaagccgagcuuaaauguuuuggcaacaccgccgucgccaaaugcaacgaaaaacacgacgaagaguucugcgacaugcuccgacuuuucgacuuuaacaaacaagccauccgccgccucaaaacagaagcccaaauguccauccaacucaucaacaaagccgucaacgcccucauaaacgaucaacuaaucaugaaaaaccaccuccgcgacaucaugggcaucccauacugcaacuauucccguuacugguaucuaaaccacaccgucaccggccgaaccucucuaccccggugcuggcuuguguccaacggaucauaccucaacgaaacccacuucuccgaugacauugaacaacaagccgacaacaugauaacagaacuccuacagaaagaauacauggaccgccaagguaagacaccacuaggacucgucgaccuguucguauucucaaccuccuucuacuuaaucuccaucuuccuccaccucgucaagauccccacccaccgccacgucaucggcaaaccaugccccaagccucaccgccucaaccacaugggaaucugcucaugcggccucuacaaucaccccggaguccccguaaaauggaaacgauaa

SEQ ID NO: 2163 - RNA, 1473 nt, Artificial Sequence
  derived and/or modified protein sequence (opt11) from LASV(LASV237-NIG-2010;Clade II)__AIT17638__GPC
augggccagaucaucaccuucuuccaagaaguaccccacgucaucgaagaagucaugaacauaguccugaucgcacucucacuccuagccauacucaagggaaucuauaacguagccacaugcggacuauucggucucguaucauuccuacuacucugcggccguuccugcucgaccaccuauaaaggcgucuacgaacuccagacacucgaacucgacauggcaucccucaacaugaccaugccccuaucuugcaccaaaaacaacucccaccacuacaucauggucggaaacgaaaccggacucgaacucacacucaccaacaccucuauaaucaaccacaaauucugcaaccuaucagacgcucacaaaaaagaccucuacgaccacgcacucaugucaaucaucucaaccuuccaccucuccaucccaaacuucaaccaguacgaagccaugucuugcgacuucaauggaggaaaaaucucgguucaguacaaucucagccacaccuacgccgucgacgccgccaaccauugcggaaccaucgcaaacggcguccuacaaaccuucaugcgcauggccuggggcggcuccuacaucgcccucgacuccggcaaaggcuccugggacugcaucaugacuagcuaccaauaucuuaucauacaaaacacaaccugggaagaccacugccaauucucucgacccucaccaaucggcuaccucggacuacucucccagcggacacgcgacaucuacaucagccgccgacuccuaggcacauucaccuggacccuaagcgacagcgaaggcaacgaaacacccggaggcuacugccucacccgcuggaugcucaucgaagccgaacucaaaugcuucggaaacacagcagucgcaaaaugcaacgaaaaacacgacgaagaauucugcgacaugcuccgccucuucgacuucaacaaacaagccauucgcagacucaaaacggaagcccagaugucaauacaacuaauaaacaaagccgucaacgcccuaaucaacgaccaacucaucaugaaaaaccaccuccgcgacaucaugggcauccccuacugcaacuacagcaaauacugguaccucaaccacacagucaccggcaaaaccucacucccacgcuguuggcucgucuccaacgggucauaccucaacgaaacccacuucuccgacgacauugaacaacaagccgacaacaugauaaccgaacuccuccaaaaagaauacauggacagacaaggcaaaacuccccuaggccuagucgaccucuucgucuucagcaccucguucuaccucaucucaauauuccuccaccuaaucaaaauccccacccaccgacacauaaccggcaaacccugucccaaaccacaccgccucaaccacaugggaauaugcucauguggccucuacaaacaccccggcguccccgucaaguggaaacguuaa

SEQ ID NO: 2164 - RNA, 1473 nt, Artificial Sequence
  derived and/or modified protein sequence (opt11) from LASV(LASV239-NIG-2010;Clade II)__AIT17642__GPC
augggccaaaucaucaccuucuuucaagaagucccccacguaaucgaagaagucaugaacaucguacuaaucgcucucucacuccucgccauccuaaaaggcgucuacaacgucgcaaccugcggcuuauucggccucgucagcuucuuacuccucuguggacgauccugcuccaccaccuacaaaggcguauacgaacuccaaacccuagaacucgacauggccucccucaacaugaccaugccccucuccuguaccaaaaacaacucccaccacuacaucauggucggcaacgacaccggccuagaacuuacacucaccaacaccuccaucauaaaccacaaauucugcaaccuauccgaugcccacaagaaaaaccuauacgaccacgcccucaugucaaucaucuccacauuccaccuaagcauccccaacuucaaccaauacgaagccaugucaugcgacuucaacggcggcaaaauaagcguccaauacaaccucagccacgcauacgccguagacgccgccagccacugcggaaccaucgccaacggcguccuucaaaccuucaugcgaauggccuggggcggcucguacauagcacucgacuccggcaaaggcucuugggauugcaucaugaccuccuaccaauaccucauaauccaaaacaccacgugggaagaccacugccaauucucccgcccaagccccaucggauaccuaggccuccucagccaacgcacccgcgacauauacaucucacgacgccuccugggcaccuucaccuggacccucucugacucagaaggcaacgaaacacccggaggcuacugccucacacgcuggaugcucaucgaagccgaacucaaaugcuucggcaacaccgccgucgcaaaaugcaaugagaaacacgacgaagaguucugcgacaugcuaagacuguucgacuucaacaaacaagccauacgccgacucaaaaccgaagcccaaaugucgauccaacucaucaacaaggccgucaacgcccucaucaaugaucaacuaaucaugaaaaaccaccuacgcgacaucaugggcauccccuacugcaacuacaguaaauacugguaccucaaccacacugucaccggcaaaaccucccucccucgcuguuggcucguuucaaacgggagcuaucuuaacgaaacccacuuuagcgacgacaucgaacaacaagcagacaacaugaucaccgaacuacuucaaaaagaauacauggacagacaaggcaaaacaccccucggccucgucgaccucuucgucuucagcaccagcuucuaccucaucagcaucuuccuccaccucguaaaaauacccacacaccgacacauaaucggcaaaccaugccccaaaccccaccgccuaaaucacaugggaauuugcucuugcggccucuacaaacacccaggcgucccggucaaauggaaacgcuaa

SEQ ID NO: 2165 - RNA, 1473 nt, Artificial Sequence
  derived and/or modified protein sequence (opt11) from LASV(LASV241-NIG-2011;Clade II)__AIT17646__GPC
augggccaaaucaucaccuucuuccaagaaguaccacacgucaucgaagaagucaugaacaucguccuaaucgcacuaucccuacuagccauacuuaaaggaauauacaacgucgccacaugcggccuauucggacucguauccuuccuccuccugugcggacgcagcugcuccaccacauacaaaggaguauacgaacuccaaacacuugaacuggacauggcgucacucaacaugaccaugccacucuccugcaccaaaaacaacucucaucauuauaucauggucggcaacgaaacaggccuggaacuuacccucaccaacacaucaaucauaaaucacaaauucugcaaucuauccgacgcccacaagaaaaaccucuacgaccacgcccucauguccauaaucucgaccuuccaccuauccauccccaacuucaaccaauacgaagcgauguccugcgacuucaacggcggcaaaaucuccguccaauauaaccuaucccacgcguacgccgucgacgccgcaucccacugcggcacaguagcaaacggcguccuccaaacuuucaugcgcauggccuggggcggauccuacaucgcacucgacucuggaaaaggcuccugggacugcaucaugaccuccuaccaauaccuaaucauacaaaacaccaccugggaagaccacugccaauucucgcgcccaagccccaucggcuaccucggccuccucucgcagcgaacacgcgacaucuacaucucacgccgccugcucggcacauucacauggacccucucagacuccgaaggaaacgaaacccccggaggcuacugccucacucgcuggaugcuuaucgaagccgaacucaaaugcuucggcaacacugccgucgccaaaugcaacgagaagcacgacgaagaguucugcgacaugcuccgacucuuugacuucaacaaacaagccauccgacgacuaaaaacugaagcucaaauguccauacagcucaucaacaaggccgugaacgcccucauaaacgaccaacucauaaugaagaaccaccuccgcgacaucaugggaauacccuacuguaacuacuccaaauacugguaccuaaaccacaccguaaccggcaagacaucucucccccgcugcuggcucgucucaaacggcucauaccuaaacgaaacacacuucuccgaugacaucgaacaacaagccgacaacaugaucacagaacucuuacaaaaagaauacauggaccgccaaggcaaaaccccucucggccuagucgaccucuucgucuucuccaccucauucuaccucaucagcaucuuccuccaccuagucaaaauccccacccaccgccacgucaucggaaaacccugccccaaaccccaccgauuaaaccacaugggaauaugcucuugcggccuauacaaacaccccggcguacccgucaaauggaaacgcuaa

SEQ ID NO: 2166 - RNA, 1473 nt, Artificial Sequence
  derived and/or modified protein sequence (opt11) from LASV(LASV242-NIG-2010;Clade II)__AIT17650__GPC
augggacaaaucaucaccuucuuccaagaagucccacacgucaucgaagaagucaugaacauaguccucauugcccucucccuccucgccauccuaaaaggcaucuacaacgucgcaaccugcggccucuucggccucguauccuuccucuuauuaugcggcagauccugcucuacaacauacaaaggcgucuacgaacuccaaacccucgaacucgacauggccucccucaacaugaccaugccccucuccugcaccaagaacaacucccaccacuacaucauggucggcaaugaaaccggucucgaacucacccuaacaaacaucuccaucaucaaccacaaguucugcaaccuaagcgacgcccacaagaaaaaccucuacgaccacgcccuaauguccaucaucucaaccuuccaucucagcauacccaacuucaaccaauacgaagcaauguccugcgacuucaacggcggcaaaaucagcguccaauacaaccucagucacaccuacgcagucgacgccgccaaucacugcggcaccaucgccaacggaguccuccaaaccuucaugcgcauggccuggggcggcucauacauagcccuugacagcggcaaaggcagcugggacugcaucaugaccuccuaccaauaccucauaauccaaaacacaaccugggaagaccacugccaauucucacggccaucccccauuggcuaccucggccuccuaucccaacgcacccgcgauaucuacaucucccgacgacuacucgguaccuucaccuggacccucuccgacucugaaggcaacgaaacccccggcggcuacugccuaacacgauggaugcucauagaagcugaacuaaaaugcuucggcaacacagccguggccaaaugcaacgaaaaacacgacgaagaguucugcgacauguuacgccuauucgacuucaacaaacaagccauccgucgccuaaaagccgaagcccaaaugucaauccaacuaaucaacaaagcagucaacgcccuaauaaacgaccaacuuaucaugaaaaaccaccuacgagacaucaugggaaucccauacugcaacuacuccaaauacugguaccucaaccacacaguaaccggacgcaccucacucccccgcugcuggcuugucagcaauggcuccuacuuaaacgaaacccacuucucagacgauaucgaacaacaagcugacaacaugaucaccgaacuccuucagaaagaauacaucgaccgacaaggcaagacaccccuaggucuuguugaccucuucgucuucucgacaucuuucuaccuuaucucaaucuuccuccaccucguuaaaauucccacucacagacacaucauaggaaaacccugccccaaaccacaccgacuaaaccacaugggcaucuguuccugcggucucuacaaacaccccggaguacccguaaaauggaaacgauaa

SEQ ID NO: 2167 - RNA, 1473 nt, Artificial Sequence
  derived and/or modified protein sequence (opt11) from LASV(LASV246-NIG-2010;Clade II)__AIT17658__GPC
augggacagaucaucaccuucuuccaagaagucccacacgucaucgaagaagucaugaacaucgugcucauagcccucucacuccuagccauccucaaaggagucuacaacgucgccaccuguggccucuucggcuuagucuccuuccuccuccucugcggccgcucauguuccaucaccuacaaaggaguauacgaacuccaaaccuuagaacucgauauggcuaaccucaacaugacaaugccccucuccugcaccaaaaacaacucccaccacuacauaaugguaggcaaugaaacaggucucgaacugacccuaaccaacaccuccauaauuaaccacaaauucugcaaccucucugacgcacacaagaaaaaucucuacgaccacgcccuuaugucaaucauauccacauuccaccucuccauccccaacuucaaccaauacgaagccaugucuugcgacuucaacggaggcaaaaucuccguccaguacaaccucucucauaccuacgccggcgacgcagcagaccacugcggcaccaucgccaacggcguacuccaaaccuucaugcgcauggccuggggcggcucguacaucgcacucgauucuggcaaaggcuccugggacugcaucaugaccuccuaccaauaccucaucauccaaaacaccaccugggaagaccacugccaauucagccgccccuccccaaugggcuaccucggacuccuaucccaacgcacacgcgacaucuacaucucgagacgccuccuaggcacauucaccuggacucuaagcgacuccgaaggcaacgaaacccccggcgguuacugccuaacccgcuggaugcucaucgaagccgaacucaaaugcuucggcaacaccgcagucgccaaaugcaacgaaaaacacgacgaagaauuuugcgacaugcuacgccucuucgacuucaacaaacaagccauccgccgccuaaaaacagaagcccaaaugucuauccaacucaucaacaaagcagucaacgcacucauaaacgaccaacuaauuaugaaaaaccaccuccgugacaucauggguauccccuacugcaacuacuccaaauacugguaccucaaccacacaauaaccggaaaaaccucccugccccgaugcuggcuaguuucuaacggcuccuaccucaaugaaacccacuucuccgacgacaucgaacaacaagcagacaacaugaucaccgaacuucuccaaaaagaauauauagaccgucagggcaaaacaccccucggacucgucgaccuauucguauucuccaccuccuucuaccugaucucaauauuccuacaccucgucaaaauccccacccaccgacauaucaccgguaaacccugccccaaaccacaccgauuaaaucacaugggcaucugcucauguggacucuacaaacaccccggagucccaguccgauggaaacgcuga

SEQ ID NO: 2168 - RNA, 1473 nt, Artificial Sequence
  derived and/or modified protein sequence (opt11) from LASV(LASV251-NIG-2010;Clade II)__AIT17666__GPC
augggacagaucgucaccuucuuccaagagguuccccacgucaucgaggaagucaugaacaucguuuuaauagcacuauccuuacucgccauucuaaaaggcaucuacaacgucgcuaccugcggacuauucggccucgucucuuuccugcuucuaugcggccguuccugcucaaccacauacaaaggcgucuacgaacuccagacucucgaacucgacauggccucacuaaacaugaccaugccccucuccugcaccaaaaacaacucccaccacuacaucauggugggcaacgagaccggccucgaacucacccuaaccaacaccuccaucaucaaccacaaauucugcaaccuaucagacgcccacaagaaaaaccucuacgaccacgcccuaaugucaaucauuucaacauuccaccuauccauccccaacuucaaccaauacgaagccauguccugcgacuucaacggcggcaaaauauccguucaauacaaccucucccacaccuacgcugucgacgcagccaaccacugcgguaccaucgccaacggcguccuccagacauucaugcgcauggccuggggcggcuccuacaucgcccuggacuccggcaaaggcuccugggauugcaucaugaccucauaccaauaccucaucauccaaaacacaacgugggaagaccacugccaauucucucgucccucccccaucggcuaccucggccuccucagccaacgaacgcgcgacaucuacaucucacgccgucuacuaggcaccuucacauggacacucucugacuccgaaggcaacgaaacccccggcggcuacugccuaacacgcuggaugcucauagaagccgaacuaaaaugcuucggcaacaccgccgucgcuaagugcaacgaaaaacacgacgaagaguucugcgacaugcuaagacuauucgacuuuaacaaacaagccauccgacgacuaaaaacagaagcccaaauguccauccagcuaauaaacaaagccgucaacgcccuaaucaacgaccaacucaucaugaaaaaccaccuccgagacaucaugggcauccccuauugcaacuacucaaaauacugguaccucaaccacaccguaaccggcaaaaccucacucccccguugcuggcuagucuccaacggcucauaccuaaacgaaacacacuucucagacgacauugaacaacaagccgacaauaugaucacagaacuccuccaaaaagaauacauggaucgccagggcaaaacaccacucggccucgucgaccucuucgucuucuccaccucguucuaccucaucagcaucuuccuucaccucgucaaaauccccacccaccgccacaucacgggcaaacccugccccaaaccccaccgccuuaaccacaugggcaucuguaguugcggccucuacaaacacccuggcguucccgucaaauggaaacgauaa

SEQ ID NO: 2169 - RNA, 1473 nt, Artificial Sequence
  derived and/or modified protein sequence (opt11) from LASV(LASV253-NIG-2011;Clade II)__AIT17670__GPC
augggacaaaucaucacauucuuucaagaagucccccacgucaucgaagaaguaaugaacauaguccucaucgcacucagccuccucgcaauacucaaagguaucuacaacguggccacuugcggucucuuuggccuagucucauuccuucuucucugcgggcguucaugcuccaccacauacaaaggcgucuacgaacuccaaacccuagaacucgacauggccucccucaacaugaccaugccccucuccugcaccaaaaauaacucccaccacuacaucauggucggcaacgaaaccggccucgaacuaacccucaccaacaccuccaucaucaaccacaaauucugcaaccucuccgacgcacacaagaaaaaccuauacgaccacgcacuaaugucaaucaucucaaccuuccaccucuccauccccaacuucaaccaguacgaagccauguccugcgacuucaauggcggcaaaaucuccguccaauacaaccucucccacaccuacgccgucgacgccgccaaccacugcggcacgauagccaauggaguccuacaaaccuucaugcgcauggccuggggcggcucauauauagcccuagacuccggcaaaggcuccugggacugcaucaugacauccuaccaauaccucaucauucaaaacaccaccugggaagaccauugccaauucucccgacccagccccaucggauaccuaggacuccuaagccagcgcacccgcgacaucuacaucucccgacgccuccuaggaaccuucaccuggacacuauccgacuccgaaggaaacgaaaccccaggcggauacugucucacccgcuggaugcucauagaagccgaacucaaaugcuucggaaauaccgccgucgccaaauguaacgaaaaacaugacgaagaauuuugcgacaugcuccgccucuucgacuucaacaaacaagccauacgccgccucaaggccgaagcccagaugucaauccaacucaucaacaaagccgucaacgcccuaauaaacgaucaacuuaucaugaagaaccaccuacgagacaucaugggaauacccuacugcaacuacuccaaauauugguaucuaaaccauacagucacaggccgcaccucacuaccccgcugcuggcucguauccaacgguucauaccucaacgaaacccacuucagcgacgacaucgaacaacaagcagacaacaugaucaccgaacuucuccaaaaagaauacauagaccgacaaggcaaaacaccccucggccucgucgaccucuucgucuuuuccaccuccuucuaccucaucucaaucuuccugcaccuggucaagaucccaacccaccgacacaucaucggcaaacccugccccaaaccccaccgccucaaccacaugggcaucugcuccugcggccucuacaagcaccccggcguccccguaaaauggaaacgcuaa

SEQ ID NO: 2170 - RNA, 1473 nt, Artificial Sequence
  derived and/or modified protein sequence (opt11) from LASV(LASV254-NIG-2011;Clade II)__AIT17674__GPC
augggccaaauaaucaccuucuuucaagaagucccccauguaaucgaggaagucaugaacaucguacuaaucgcucucucccugcuagccauccuaaaaggcauauacaacgucgccacaugcggacucuucggacucguaucauuccuacuccuuugcggccgcuccugcucaaccaccuacaaaggcgucuacgaacuacaaacccuugagcucgacaugacaaaccucaacaugaccaugccccuaagcugcacuaaaaacaacucccaccacuacaucauggucggcaacgaaaccggacuggaacuuacccucacaaacacauccaucaucaaccacaaauucugcaaccuauccgacgcacacaagaaaaaucuuuacaaccaugcccucauguccaucaucuccacauuccaccuauccauccccaacuucaaccaauacgaggccaugucaugugacuucaacggcggcaaaaucuccguucaauacaaccuuucccacucauacgccguagacgccgccaaccacugcggcaccaucgcuaauggaguccuccaaacauucaugagaauggccuggggcggcuccuacaucgcccuagacuccggcaaaggcaacugggauugcaucaugaccucauaccaauaccucaucauccagaacacaaccugggaggaccacugccaauucucacgccccucucccaucggauaccucggccuacuaagccaacgcacccgggacaucuacaucucacgacgccuacuaggcaccuucaccuggacccucuccgacuccgaaggaaacgaaacacccggcggcuacugccuaacacgcuggaugcucaucgaagcagaacuaaaaugcuuugggaacaccgcaguagccaaauguaacgagaaacacgacgaagaguucugcgacaugcuacgccuguucgauuucaacaaacaggccauccgacgacucaaaaccgaagcacaagccaacauacaacucaucaacaaggccguuaacgcacuuaucaacgaccaacucaucaugaaaaaccaccuucgcgacaucaugggcauccccuacugcaacuacuccaaauacugguaccuaaaccacaccgucacaggaaaaaccucccucccccgcuguuggcuugucuccaacggcucauaucucaacgaaacccacuucuccgacgacaucgaacaacaagccgacaacaugaucacagaacuacuccagaaggaauacauggaccgacaaggcaaaaccccacucggacucgucgaccuauucgucuucucaaccuccuucuaccucauuagcaucuuccuacaucucguaaaaauccccacccaccgccacgucaucggcaaacccugccccaaaccccaucgccucaaccacaugggaaucugcagcugcggccucuacaaacaccccggcguucccgucaaauggaaacgcuga

SEQ ID NO: 2171 - RNA, 1473 nt, Artificial Sequence
  derived and/or modified protein sequence (opt11) from LASV(LASV256-NIG-2010;Clade II)__AIT17678__GPC
augggacaaaucaucaccuucuuccaagaagucccacacguaaucgaagaagucaugaacaucguccuaaucacacucucccuccucgccauccucaaaggcaucuacaauaucgcaaccugcggccucuucggccucgucuccuuccugcuccuuugcggccgcagcugcuccaccaccuacaaaggcguuuaugaacuccaaacccucgaacuagacaugaccagccucaacaugaccaugccccucuccugcaccaaaaacaacucccaccacuacaucauggucggcaacgaaacaggccucgaacucacccucaccaacaccucaauaauaaaccacaaauucugcaaccucucugacgcccacaaaaagaaccuauacgaccacgcccuaaugucaauaaucaguaccuuccaccuauccauacccaacuucaaccaauacgaagccaugagcugcgacuucaacggcggcaagauauccguccaauacaaccucucccacaccuacgccguugacgccgcuaaccacugcggaaccauagcuaacgguguccuacaaaccuuuaugcgaauggccuggggcggcuccuacauagcccuagacuccggcaaaggcucuugggacuguauuaugaccagcuaccaauaccuaaucauccaaaacaccacaugggaagaccacugucaauucucccgacccucccccaucggcuaccuaggccuccucucccaacgaacccgcgacaucuacauaucacgacgucuacuaggcacuuucaccuggacucuaucagacagcgaaggcaaugaaaccccuggcggcuacugcuuaacccgcuggaugcucaucgaagcagaacucaaaugcuucggcaacaccgccgucgccaaaugcaacgaaaaacacgacgaagaguucugcgacaugcucagacucuucgacuucaacaaacaagcaauccgucgccuaaaaacugaagcccaaauguccauccagcucauaaacaaggccguaaacgcccuuaucaacgaccaacucaucaugaagaaucaccuccgagacaucaugggaauacccuacugcaacuauagcaaauacugguaccucaaucacaccguaacaggcaaaaccucacuaccacgcugcuggcucguauccaacggaucuuaccuaaacgaaacccacuucuccgacgacaucgaacaacaggcagacaacaugaucaccgaacuccuccaaaaggaauacaucgaccgacaaggcaaaacaccccucggccucgucgaccuauucgucuucuccaccucuuucuaucucauaucaauauuccuccaccucgucaaaauccccacccaccgucacaucauaggcaaacccugcccaaaaccccaccgacucaaccacaugggaaucugcuccuguggacucuacaaacaccccggaauacccguaaaauggaaacgcuaa

SEQ ID NO: 2172 - RNA, 1473 nt, Artificial Sequence
  derived and/or modified protein sequence (opt11) from LASV(LASV267-NIG-2010;Clade II)__AIT17686__GPC
auggggcaaaucauaaccuucuuccaagaaguaccccacgucaucgaagaagucaugaacaucguccucauagcucucucccuccuggccauccuaaaaggaaucuacaacgucgcuaccugcggccucuucggacuugucuccuuccucuuacucugcggccggucuugcuccaccaccuacaaaggcgucuacgagcuccaaacccucgaacuugacauggccucacuaaacaugacaaugccccucucuugcaccaaaaacaacucucaccacuacaucauggucggcaacgaaaccggccucgaacucacccugaccaacaccucuaucaucaaccacaaauucugcaaccucucagacgcucacaagaaaaaccucuacgaccacgcacucaugucaaucaucuccacuuuccaccucucaauccccaacuucaaccaauacgaggccauguccugcgauuucaacggcgguaaaaucucaguacaauacaaccuuagccacaccuacgccguagaugccgccaaccacugcggcaccaucgccaacggcguccuucagaccuucaugcgcauggccuggggcggaucuuacaucgcccucgacucccgaaaaggaucuugggacugcaucaugacuuccuaccaauaccucaucauccaaaacaccaccugggaggaccacugccaauucucccgccccucccccaucggauaccuaggucuacuaagccaacgcacccgagacauuuacaucucacgacgacuccucgguacuuucaccuggacucucuccgacagcgaaggcaacgaaaccccaggcggcuacugccucacccgcuggaugcucauagaagccgaacucaaaugcuucggcaacacugccgucgccaaaugcaacgaaaaacacgacgaagaguucugcgacaugcuacgccucuucgacuucaacaaacaagccauccgccgacugaaaacagaagcgcaaauguccauccaacucaucaacaaagccguaaaugcccucaucaacgaccaacuuauuaugaaaaaccaccuaagagacauaaugggcauucccuauugcaacuacuccaaauacugguaucucaaccacaccgucaccggaaaaaccucccucccacgcugcuggcucgucucaaacggcuccuaccugaacgaaacccacuucuccgacgacaucgaacaacaagccgacaacaugaucacugaacuacuacaaaaagaauauauggaccgccaaggcaaaacaccccucggccucgucgaccucuucguguucuccaccuccuucuaccucaucucaaucuuccuucaccucaucaaaauccccacccaccgacacgucaucggcaaacccugccccaagccccaccgacuaaaccauaugggcauaugcuccugcggacuauacaaacacccaggcguaccagucaaauggaaacgcuaa

SEQ ID NO: 2173 - RNA, 1473 nt, Artificial Sequence
  derived and/or modified protein sequence (opt11) from LASV(LASV271-NIG-2010;Clade II)__AIT17690__GPC
augggccaaaucauaaccuucuuccaagaaguaccccacgucaucgaagaagucaugaacauaguccucaucgcccucucacuacuagccauccuuaaaggaauauacaacguagcaaccugcggacucuucggccucguaucauuccuccuacucugcggccgaucaugcuccaccaccuacaaaggagucuacgaauuacaaacacuugaacucgacauggccucacucaacaugaccaugccgcuauccugcaccaaaaacaauucccaccacuacaucauggucggcaacgaaaccggccucgagcuaacucuuaccaacacuucgaucaucaaccacaaauucugcaaccucuccgaugcccacaagaaaaaccucuacgaccacgcccucaugucaauaauuuccaccuuccaccucuccauacccaacuucaaccaauacgaagccaugucuugcgauuucaacggcggaaaaaucuccguccaauacaaccucucacacgccuacgccgucgacgccgccagccacugcggcacaguagcaaacggcguucuccaaaccuucaugcgcauggccuggggcgguuccuacaucgcccucgacagcggaaaaggcucaugggacuguaucaugacauccuaccaauaccuaaucauccaaaacacgaccugggaagaccacugccaauucucccgacccucucccaucggcuaccucggucugcucagccaacgcacucgcgacaucuacaucucacgccgccuccucggcaccuuuaccuggacacucuccgauuccgaaggcaacgaaacccccggcggauacugccucacccgcuggaugcucaucgaagcagagcucaaaugcuucggaaacaccgcagucgcgaaaugcaacgaaaaacacgaugaagaguucugcgacaugcuccgccucuucgacuucaacaagcaagccauccgccgccucaaaaccgaagcucaaaugucaauccagcucaucaacaaagccgucaacgcgcuaaucaacgaucaacucauaaugaaaaaccacuuacgcgacaucauggggauccccuacugcaacuacuccaaauacugguaccuuaaccacaccgucaccggccgcacuucacucccacgcugcuggcuagucucaaacggcuccuaccucaacgaaacccacuucuccgacgacaucgaacaacaagccgacaacaugaucacagaacuccuccaaaaagaauacauggaucgccaaggcaaaacaccccugggacucgucgacuuauuuguuuucuccaccuccuuuuaccuuaucuccaucuuccuccaccucgucaagauccccacccaccgccacgucaucggaaaaccaugucccaaaccccaccgccucaaccacaugggcaucugcagcugcggcuuauacaagcacccaggcguccccgucaaauggaaacgauaa

SEQ ID NO: 2174 - RNA, 1473 nt, Artificial Sequence
  derived and/or modified protein sequence (opt11) from LASV(LASV274-NIG-2010;Clade II)__AIT17694__GPC
augggccagauaaucacauucuuccaagaaguaccccacgucaucgaagaagucaugaacaucguccuuaucgcccuuucacuucuggcgauccucaaaggcaucuauaacgucgcaaccugcggccucuucggccucgucucauuccuccuacuaugcggccgcucaugcagcaccaucuacaagggcgucuacgaacuccaaacccuugaacuagacauggccucucucaacaugaccaugccacucucaugcaccaaaaacaacucacaccacuacaucaugguuggaaaugaaaccggccuagagcucacccucaccaacacauccauuaucaaccacaaauucugcaaccucuccgacgcgcacaagaaaaaccucuacgaccacgcccuaauguccaucauuagcacuuuccaccucuccauccccaacuucaaccaauacgaggccaugucaugcgacuucaacggcggcaaaaucagcguccaauacaaccuaucccacaccuacgcagucgacgccgccaaccacugcggaaccaucgccaacgggguccuccaaacauuuaugcgcauggccuggggaggcuccuacauagcccuagacuccggcaaaggcuccugggacugcauaaugaccagcuaccaauaccucaucauccaaaacaccaccugggaagaccacugucaguucucacgacccucaccaaucggauaccucggccuccucucacaacgcacccgcgacaucuacaucucccgacgccuccucggaaccuucaccuggacccucucagacuccgaaggcaacgaaaccccaggcggcuacugccucaccagauggaugcuaauagaagcugaacucaaaugcuucggcaacaccgcaguggccaaaugcaacgaaaaacacgacgaagaguucugcgauaugcuccgacuuuucgacuucaacaaacaagccauccgcagacucaaaaccgaagcacaaauguccauccaacucaucaacaaagccgucaacgcccucaucaacgaccagcugaucaugaaaaaccaccuacgagauauaaugggcaucccuuacugcaacuacuccaaauacugguaccucaaucacaccguaaccggaaaaaccucccucccccgcugcuggcucgucucaaacggcagcuaccucaaugaaacacacuucuccgaugacaucgaacaacaagcugacaauaugauaaccgagcuccuacaaaaagaauacaucgaccgacaaggcaaaacaccccucggccucgucgaccuuuucguauucaguaccuccuucuaccucaucuccaucuuccuccaccuggucaaaauccccacccaccgacacgucgucggcaaacccugccccaaaccccaccgccuuaaccacauggguaucugcucaugcggucucuacaaacaucccggaguccccgucaaauggaaacgcuaa

SEQ ID NO: 2175 - RNA, 1473 nt, Artificial Sequence
  derived and/or modified protein sequence (opt11) from LASV(LASV719-NIG-2009;Clade II)__AIT17704__GPC
augggccaaauaaucacuuucuuccaagaaguaccucacgucaucgaagaagucaugaauaucguccucauagcacuuucccuccuugccauccucaagggcaucuacaacgucgccacaugcggccucuucggucucgucucauuccuucuucucugcggaagauccugcucaacaacauacaaaggcgucuacgaauuacaaacccuagaacucgauauggccuccuuaaacaugacaaugccccuguccugcaccaaaaacaacucacaccacuacaucauggucggcaacgaaaccggccuggaacucacacucacaaacaccuccaucaucaaccacaaauucugcaaccuauccgacgcccacaagaaaaaccuuuacgaccacgcccucaugucaauuauauccacauuucaccuauccauccccaacuucaaccaauacgaagcuauguccugcgacuucaacggagguaaaaucucaguacaauacaaucucucccacaccuacgcaguugaugcagccaaccacugcggcacuaucgccaacggaguucugcagacauucaugcgcauggcauggggcggcuccuacauagcccucgauuccggcaaaggcucuugggacugcaucaugacaucuuaccaauaccucaucauccaaaacacaaccugggaagaccacugccaguucucacgccccuccccuaucggcuaccucggacuccucucccagcgcacccgcgacaucuacaucucccgacgucuccucggcaccuucacauggacccuaagugacuccgaaggcaacgaaacccccggcggcuacugccucacccgauggaugcucaucgaagccgaacucaaaugcuuuggaaauaccgccgucgccaaaugcaacgaaaaacacgacgaagaguucugcgacaugcuacgccuuuucgacuucaacaaacaagccauccgucgacuuaaaacagaagcccagauguccauccagcucaucaacaaagccgucaacgcacucaucaacgaccaacuaaucaugaaaaaccaccucagagacaucaugggcauacccuacugcaacuauagcaaauacugguaccuaaaccacaccguaaccggcaagacuagccucccccgaugcuggcucgucuccaacggauccuaccucaacgaaacccacuucagcgacgacauagaacagcaagccgacaacaugaucaccgaacuccuucaaaaagaauacaucgaccgacaaggcaaaacaccccucggccucguagaccucuucgucuucuccaccuccuucuaccucaucucaaucuuccuccaccuagucaaaauacccacccaccgccacgucaucggcaaaccaugccccaaaccccaccgacucaaccacaugggaaucugcuccugcggccucuauaaacacccaggcguacccgucaaauggaaacgcuaa

SEQ ID NO: 2176 - RNA, 1473 nt, Artificial Sequence
  derived and/or modified protein sequence (opt11) from LASV(LASV738-NIG-2009;Clade II)__AIT17712__GPC
augggccaaaucaucaccuucuuccaagagguuccccacgucaucgaagaagucaugaauaucguacuaaucgcacucagccuucuagccaucuuaaaaggcaucuacaacgucgcuaccugcggccuauucggccucguauccuuccuccuccuuugcgggcgcucgugcuccaccaccuacaagggaguauacgaacuacaaacccucgaacucgauauggccucccuaaacaugaccaugccacucuccugcaccaaaaacaacucacaccacuacauuauggucggaaacgaaaccggccuagaauugacacuuaccaacaccuccaucaucaaccacaaauucugcaaccucucggacgcccacaagaaaaaccucuacgaccacgcccucauguccaucaucuccaccuuccaccuaagcauaccaaauuuuaaccaauaugaagccauguccugcgacuucaacggaggcaaaaucuccguacaguacaaccucucccacaccuacgccgucgacgccgccaaccacugcggcaccauagccaacggaguccuccaaaccuucaugcgcauggccuggggcggcuccuacaucgcccucgacagcggcaaaggcgccugggauugcauuaugaccuccuaccaauaccucauaauccaaaauaccacaugggaagaccacugccaauucucucgcccaucccccaucggauaucucggccuccucucccaacgaaccagagacaucuacauaucccguagacuccucggcacauucaccuggacccuuuccgacuccgaaggcaaugaaacccccggaggauacugccugacccgcuggaugcucaucgaagccgaacuaaaaugcuucggaaacacagccgucgcaaaaugcaacgaaaagcacgacgaagaguucugcgacaugcugcgccuguucgacuucaauaaacaagccaucaugcgccuaaaaaccgaagcacaaauguccauccaacuaaucaacaaagcagucaacgcacucauuaacgaccaacuuaucaugaaaaaccaccuccgcgacaucaugggcauccccuacugcaacuacucaaaauacugguaccucaaccacaccgucaccggcaaaaccagccuaccucgaugcuggcugguaucuaacggauccuaccucaacgaaacccacuucucagacgacauagaacaacaagcagacaacaugaucacugaaaugcuccaaaaggaauacaucgaccgccagggcaaaacaccccucggacucgucgaccuauucguauucuccaccagcuucuaccucaucucuaucuuccuccaccucgucaaaauccccacccaccgccacgucauuggcaaacccugccccaaaccacaccgccuaaaccacaugggcauuugcuccugcggccuauacaaacaccccggcguccccguacgauggaaacgauga

SEQ ID NO: 2177 - RNA, 1473 nt, Artificial Sequence
  derived and/or modified protein sequence (opt11) from LASV(LASV966-NIG-2009;Clade II)__AIT17718__GPC
augggccaaaucaucacauucuuccaagaagucccccacguaauagaagaaguaaugaacaucguccuaauugcccuaagccuacuagcaauacuaaagggcauuuacaacguagcaaccugcggccuauucggccucgucucauuccuccucuuaugcggacgcagcugcucaacaacauacaaaggcgucuacgaacugcaaacccucgaacuagacauggccucccucaacaugaccaugccucucuccuguaccaaaaacaacucccaccacuacauacgaguaggcaacgaaaccggccuugaacuuacccucaccaacgccucaauaaucaaccacaaauucugcaaccucucugaugcccacaagaaaaaccuuuacgaccaugcccucaugucaaucaucagcaccuuccaccucagcauccccaacuucaaccaauacgaagccaugucaugcgauuucaacggcggcaaaaucucaguacaauacaaccuuucacacgccuacgcaaucgacgcagccaaccacugcggcacagucgccaacggcguccuacaaacauucaugagaauggcguggggcggcuccuacauugcccucgacucaggucgcggaaacugggacugcaucaugaccucuuaccaauaccucaucauccaaaacacaaccugggaggaccacugccaauucucccgaccaucccccaucgguuaccuaggccuccucucgcagcgaacccgugacauauacaucucccgacgccuccucgguaccuucacauggacacucucagacucagaaggaaacgagacccccgguggcuacugccuaacccgauggaugcugaucgaagccgaacucaaaugcuucggcaacaccgcagucgccaaaugcaacgaaaaacacgacgaggaguucugcgauaugcuaagacucuucgacuuuaacaaacaagccauccgacgccucaaaaccgaagcccaaauguccauccagcucaucaacaaagccgucaaugcacuaauuaacgaucaacucauaaugaaaaaccaucuacgagauaucaugggcauccccuacugcaacuacuccaaauacugguaccuaaaccacacagucaccggcaaaaccucccucccccgaugcuggcucgucuccaacggcucauaccucaacgaaacccacuuuuccgacgacaucgaacaacaagccgacaacaugaucacugaacuccuacaaaaagaauacauggaccgccaaggcaaaacaccccucggccuugucgaccucuuuguauucuccaccuccuucuaccuaaucagcaucuuucuccaccuagucaaaauacccacccaccgccacgucaucggcaaaccaugccccaagccccaccgccucaaccacauggguaucuguuccugcggcuucuauaaacaccccggcgucccagucaaauggaaacgcuaa

SEQ ID NO: 2178 - RNA, 1473 nt, Artificial Sequence
  derived and/or modified protein sequence (opt11) from LASV(LASV969-NIG-2009;Clade II)__AIT17724__GPC
augggccaaauaauaaccuucuuccaagaagucccacacguaaucgaagaagucaugaacaucguacuuaucgcccucucccuacucgcaauccuaaaagggauauacaacgucgcuaccugcggccucuuuggccuugucuccuuccuccuacuaugcggucgcuccugcagcaccaccuacaaaggaguauacgaacuccagacccuggaacucgacauggccaaccuuaacaugacaaugccccuaagcugcaccaaaaacaacucccaccacuacaucauggucggcaacgaaaccggccuugaacuaacccucacaaacaccuccaucauaaaccacaaauucugcaaccuaucagacgcacauaagaaaaaccuauaugaccacgcgcucauguccaucauauccaccuuccaccucucaauacccaacuucaaccaguaugaagcuauguccugcgacuucaacggcggaaaaaucucaguccaauacaaccucucccacaccuacgccguagacgcagcaaaccacugcggcacaguagcgaacggaguccuccaaacauucaugagaauggcauggggcggcuccuacaucgcccucgacucaggaaaaggcuccugggacugcauaaugacaagcuaccaauaccucauaauccagaauaccaccugggaagaccauugccaauucucuagacccucacccauaggcuaccucggacuccucucccaacgcacccgagacaucuacaucagcagacgccuccucggaaccuucacauggacccucucugacagcgaaggaaacgaaaccccaggaggcuacugccucacaagauggaugcucaucgaggccgaacuaaaaugcuucggcaacaccgcggucgccaaaugcaacgaaaaacacgacgaagaguucugcgacauguuacgacuauucgacuucaacaaacaagcaauccgacgccucaaaaccgaagcccaaauguccauccagcugauaaacaaagcuguaaacgcccucauaaacgaccaacucaucaugaaaaaccaccuccgcgauauaaugggaauccccuacugcaacuacuccaaauacugguaccucaaccacacugucacgggaaagaccucacuaccacgcugcuggcuagucuccaacggcagcuaccucaacgaaacccacuucuccgacgacaucgaacagcaagccgacaacaugauaaccgaacuccuccaaaaagaauacauggaccgacaaggcaaaacaccccucggccucgucgaccuauucgucuucucaaccuccuucuaccucaucuccaucuuccuccaccucgucaaaaucccgacacaccgccauaucauggggaaaccaugccccaaaccgcaccggcuaaaccacaugggcaucugcuccugcgggcuuuacaaacacccaggcguacccgucaaauggaaacgcuaa

SEQ ID NO: 2179 - RNA, 1473 nt, Artificial Sequence
  derived and/or modified protein sequence (opt11) from LASV(LASV971-NIG-2009;Clade II)__AIT17728__GPC
augggccaaauaauaaccuucuuccaagaagucccccacgucaucgaagaagucaugaacauuguccucaucgcccucucccuccucgccauccucaaaggcaucuauaacgucgccacuugcggccucuucggacucgugucuuuccuccucuuaugcggccgaucuugcuccaccaccuacaaaggcgucuaugaacuccaaacccucgaacucgacaugggcucccucaacaugaccaugccccucuccugcaccaaaaacaacucccaccacuacaucaugguuggcaacgaaaccgggcuugaacuaacucuaaccaacaccuccaucauuaaucacaaauucugcaaccucuccgacgcccacaagaaaaaccucuacgaccacgcccuaauguccaucauaucaaccuuccaccucuccaucccaaacuucaaccaauacgaagccauguccugugacuuuaacgggggcaaaaucucuguacaauacaaccuaucacacaccuacgccgucgacgcagcaaaccacuguggcacaaucgccaacggcguccuccaaaccuucaugcgcauggcauggggcgggucauacaucgcccuugacucaggcaaaggcagcugggacugcaucaugaccuccuaccaauaccucaucauccaaaacaccaccugggaagaccacugccaguucucccgccccucccccaucggauaccuaggacuacucucccaacgcacacgagacauauacaucucacggcgccuccuaggaacauucaccuggacucucucagacucagaaggcaacgaaacaccaggaggcuauugccucacacgguggaugcucauugaagccgaacuaaagugcuucggcaauaccgccgucgcgaaaugcaacgaaaaacacgacgaagaguucugcgacaugcuccgucuguucgacuucaacaaacaagccauacgucgcuuaaaaaccgaagcccaaaugucuauacaacucaucaacaaggcagucaacgcacuaauuaacgaccaacucaucaugaagaaccaccuccgcgacauaaugggcauccccuacugcaacuacagcaaauacugguaccuaaaccacacaguaacuggaaaaaccucacuaccccgauguuggcucgucuccaacggcuccuaccuuaaugaaacccacuucuccgacgacaucgaacagcaagcagacaauaugaucaccgaacuccuccaaaaagaauacauggaccgacagggcaaaacaccacucggacuugucgaccucuucgucuucagcaccucguucuaccuaauaucuauauuccuucaccucguuaaaauccccacccaccgacacgucaucggaaaacccugccccaaaccucaccgacucaaccacaugggcauaugcucaugcggccucuacaagcaccccggcguuccagucaaauggaagcgcuaa

SEQ ID NO: 2180 - RNA, 1473 nt, Artificial Sequence
  derived and/or modified protein sequence (opt11) from LASV(LASV975-NIG-2009;Clade II)__AIT17732__GPC
augggucaaaucaucaccuucuuucaagaagucccccacgucaucgaagaaguaaugaacaucguccucaucgcccucucccuacucgcaauccuuaagggcauauacaacguugccacaugcggucuuuucgggcuuguauccuuccuccuccuaugcggacgcuccugcuccaccaccuacaaaggcgucuacgaacuucaaacccucgaacucgacauggcaucacucaacaugacaaugccucucucaugcaccaaaaacaacucacaccacuacaucauggucggcaaugaaacaggccucgaacucacacucaccaacacaucgaucauaaaccauaaguuuugcaaccuauccgacgcccacaagaaaaaccucuacgaccacgcacucauguccauaauaucaaccuuccaccuguccauccccaacuucaaucaauacgaagccauguccugcgacuucaacggcggcaaaaucuccguccaauacaaccucucacacaccuacgccgucgacgccgccaaccacugcggcacaaucgcaaauggaguccuccagacauucaugcguauggccuggggcggcuccuacauugcacuagacuccggaaaaggcuccugggacugcauuaugaccuccuaccaauaccucaucauccaaaacaccacuugggaagaccacugccaauucucccgaccauccccaauaggcuaccuaggccuccuuucccaacguacccgcgacaucuacaucucacgacgccuucucggaaccuucaccuggacacuauccgacuccgaaggcaacgaaaccccaggcggcuacugccuaacccgguggaugcucaucgaggcagaacuaaaaugcuucggcaacaccgcggucgcuaaaugcaacgaaaaacacgacgaagaguucugcgauaugcuacgacucuucgacuucaacaaacaagccauucgccgacuuaaaaccgaagcacaaaugucaauacaacuaaucaacaaagccgucaacgcucucaucaacgaccaacuaaucaugaaaaaccaccuccgcgacaucauggggauacccuacugcaacuauucaaaauacugguaucucaaccacaccgucaccggcaaaaccucacucccccgauguuggcucgucucaaacggcucuuaccucaacgaaacccacuucuccgacgacauagaacaacaagccgacaacaugaucaccgaacuccuccaaaaagaauacaucgaccggcaaggcaaaaccccacucggccuagucgaccucuucguuuucuccaccuccuucuaccucaucagcaucuuccugcaccucgucaaaauccccacccaccgacacaucgucggcaaacccugcccaaagccacaccgacucaaccacaugggcaucugcuccugcggccucuacaaacaccccggagugcccguaaaguggaaacgcuaa

SEQ ID NO: 2181 - RNA, 1473 nt, Artificial Sequence
  derived and/or modified protein sequence (opt11) from LASV(LASV976-NIG-2009;Clade II)__AIT17736__GPC
augggccaaaucgucacuuucuuucaggaagucccccacgucauagaagaaguaaugaacaucguccucaucgcucucucccuccucgccauccuuaaaggcauauacaacgucgcaaccugcggccucuucggacucgucuccuuccuccuccucugcggucgcuccugcucuaccaccuacaagggcguuuacgaacuccagacccucgaacucgacauggcaucccuaaacaugaccaugccgcuauccugcaccaaaaacaacucucaccacuacaucauggucggcaacgaaacaggccucgaacucacucuuaccaacaccuccaucaucaaccauaaauucugcaaccucuccgacgcccacaagaaagaccuauacgaccaugcccucauguccaucaucucuacauuccaccucuccauccccaacuucaaucaauacgaagcaaugucaugcgacuucaacggcgguaaaaucuccguacaauacaaucucagccacaccuacgcaguagacgccgcaaaccacugcggaacaaucgccaacggagugcuccaaaccuucaugcgaauggccuggggaggcucuuauaucgcacucgacuccggcaaaggauccugggacugcaucaugaccuccuaccaguaccucauaauacaaaacaccaccugggaagaccacugccaauucucccgaccuucccccaucggauaccuaggccuccucucccaacgcacccgcgacauauacaucucucgccgccuccuaggcaccuucacauggacccucuccgacucugaaggcaacgaaacaccaggcggcuauugccuaacaagauggaugcucauagaagccgagcucaaaugcuucggcaacaccgccgucgcaaaaugcaacgaaaaacacgacgaagaguucugcgacaugcuucgucucuucgacuucaauaaacaagccaucaugcggcuaaaaacagaagcccaaauguccauacaacucaucaacaaagccgucaacgcacucauaaacgaccaacucaucaugaaaaaccaccuccgagacauaaugggaauccccuacugcaacuacucaaaauacugguaccucaaccacaccguaaccggaaaaacgucccucccccggugcuggcucgucuccaacggcagcuaccuaaacgaaacccgauucucagacgacaucgaacaacaagccgacaacaugaucaccgaaaugcuacaaaaagaauaccucgaccgccaaggcaaaacaccccucggucucguugaccucuuugucuucagcaccagcuucuaccucaucuccaucuuccuccaccuugucaaaauacccacccaccgccauauuauaggaaaacccugccccaaaccccaucgccuaaaccacaugggcaucugcuccugcggccuguacaaacaccccggaguucccgucaaguggaaacgguag

SEQ ID NO: 2182 - RNA, 1473 nt, Artificial Sequence
  derived and/or modified protein sequence (opt11) from LASV(LASV978-NIG-2009;Clade II)__AIT17744__GPC
augggucaaaucaucaccuucuuccaagaagucccccacguaaucgaagaaguaaugaacaucguccuaaucgcgcuaucgcuacucgcaauacucaaaggaaucuacaacgucgcaaccugcggccucuucggccucaugagcuuccuacuccucugcggcaggagcugcuccaccaccuacaaaggagucuacgaacuccaaacccucgaacucgacauggccaaccuaaacaugaccaugccccuauccuguaccaaaaacaacucccaccacuacaucaugguuggaaacgaaaccggccucgaacuaacccucaccaacacauccaucaucaaucacaaguucugcaaccuauccgacgcccacaagaaaaaucucuaugaccacgcccucauguccaucauaagcaccuuccaccucucaauccccaacuucaaccaauacgaagccauguccugcgacuucaacggcggaaaaaucucuguacaguacaaccucucccaugccuacgccgucgacgccgccaaccacugcggcaccaucgcaaacgguguccuacaaaccuucaugcgcauggcauggggcggcucauacaucgcccuggacuccggcaaaggcagcugggacugcaucaugacuuccuaccaauaccucaucauccaaaacaccagcugggaagaccacugccaauucucgcgacccagcccgauaggauaccuaggccuccucagccaacgcacacgagacaucuacaucucccgccgacuacuaggcaccuuuacauggacccuaucagacucugagggcaacgaaacaccaggcggcuacugccucacccgcuggaugcucauagaagccgaacuaaaaugcuucggcaacaccgccgucgccaaaugcaacgaaaaacacgacgaagaguucugcgacaugcuccgccucuucgacuucaauaaacaagccauccgacgccucaaaacagaagcacaaaugagcauacaacugaucaauaaagccgucaacgcccuaaucaacgaccaacucaucaugaaaaaccaccuccgagauaucaugggcauacccuacugcaacuacuccaaauacugguaccuaaaccacaccgucaccggcaaaaccucacucccccgcugcuggcucgucuccaacggcuccuaccucaacgaaacccacuucagcgacgauauagaacaacaagcagacaacaugaucacagaacuccuacaaaaagaauacaucgacagacagggcaaaacuccccuaggucuugucgaccucuucgucuucuccacauccuuuuaccuaauuuccauauuccuccaccucgucaaaauccccacccaccgccacguaaucggcaaacccugccccaaaccccaccgacucaaccacauggguaucugcucaugcggccuuuacaaacacccaggcguacccgucaaauggaagcgcuaa

SEQ ID NO: 2183 - RNA, 1473 nt, Artificial Sequence
  derived and/or modified protein sequence (opt11) from LASV(LASV981-NIG-2009;Clade II)__AIT17752__GPC
augggccaaaucaucaccuucuuccacgaagucccacacgucaucgaggaaguaaugaauaucgucuuaaucgcacucagccuacucgccauccucaaaggaaucuacaacgucgcaacauguggccucuucggccuugucucuuuccuccuccuuugcgggcgaucaugcagcaccaccuacaaaggcgucuacgaacuccaaacccucgaacuagacauggccucccucaacaugaccaugccccuauccugcaccaaaaacaacucccaccacuacaucauggucggcaacgaaaccggacuagaacuuacacucaccaauaccucaaucaucaaccacaaauucugcaaccucuccgacgcucacaagaaaaaccucuacgaccacgcccucauguccaucaucucaacauuccaccucagcauccccaacuucaaccaauacgaagcaauguccugcgacuucaacggaggcaaaaucuccguccaauacaaccuaucccacacauacgcaauagacgcggccaaccacugcggaacaaucgccaacggaguccuucaaaccuucaugcgaauggccuggggcggcuccuacauagcccucgauagcggacgcggcuccugggacugcauaaugacgagcuaccaauaccucaucauccaaaacaccacuugggaagaccacugccaguucucgcgcccguccccgaucggcuaccuaggccuacuaucccaacgcacccgcgacaucuacauaagccgccgucuacucggcaccuucaccuggacacuaucagacucugaaggcaacgaaacccccgguggcuacugccuaaccagauggaugcucaucgaagccgaacuuaaaugcuucggaaacaccgcuguagcgaaaugcaacgaaaaacacgacgaagaguucugcgacaugcuccgacucuucgacuucaacaaacaagccauacgccgccugaaaacugaagcccagaugagcauccaacucaucaacaaagcagucaacgcacucauaaaugaccaacuuaucaugaagaaccaccuccgcgacaucaugggaaucccauacugcaauuacuccaaauacugguaccuaaaucacaccguaaccggaaaaacaucccucccccguugcuggcuggucucgaacggcuccuaccucaacgaaacacacuucuccgacgacauagaacaacaagcagacaacaugauuaccgaacuacuccagaaggaauacaucgaccgccaaggaaaaacaccccucggucucgucgaccucuucgucuucuccaccucauucuaccucaucucaaucuuccuccaccuagucaaaauacccacccaccgccacgucauaggaaagcccugccccaagccccaccgacucaaccacaugggcaucugcagcugcggacuauauaagcaucccggaguccccgucaaauggaaacgcuga

SEQ ID NO: 2184 - RNA, 1473 nt, Artificial Sequence
  derived and/or modified protein sequence (opt11) from LASV(LASV982-NIG-2009;Clade II)__AIT17756__GPC
augggccaaauaaucaccuucuuccaagaagucccacacgucaucgaagaagucaugaauaucguccucauagcccuaagccuacuugcaauccucaaaggcaucuauaacgucgcuaccugcggccucuucgggcucguaucauuucuacuacucugcggccgcuccugcuccaucaccuacaaaggcgucuacgaacuacaaacccuugaacucgacauggccucccucaacaugaccaugccccucucaugcacuaaaaacaacucccaccacuacauuaugguaggcaacgaaaccggccucgaacuuacucucacuaacaccagcaucaucaaccacaaauucugcaaccucuccgacgcccacaaaaagaaccuauacgaccacgcccucaugagcaucauauccaccuuccaccucucuauccccaacuucaaccaauaugaagccauguccugcgacuucaacggcggcaaaauaaguguccaauacaaccucucccacaccuacgccguagacgccgccaaccacugcggcaccaucgccaacggcgucuuacaaaccuucaugcggauggccuggggcggcuccuacaucgcccucgacucaggccgcggcuccugggacugcauaaugaccuccuaccaauaccuaaucauccaaaacaccaccugggaagaccacugccaauucucacgcccaucucccaucggcuaccucggccuacucucacagcgaaccagagacauuuacaucagccgacgccuacucggcacauucaccuggacccuuucagacuccgaaggcaacgaaaccccuggcggcuacugccugacccgcuggaugcuaaucgaggccgaacuaaaaugcuucggaaacacagcagucgcaaaaugcaacgaaaaacaugacgaagaguucugcgauaugcuccgccucuucgauuuuaacaaacaagcaauccgacgccuaaaggccgaagcccaaaugagcauccaacucaucaacaaagccgucaacgcucugaucaaugaccaacuaaucaugaaaaaccaccuccgcgacaucaugggaaucccauacugcaauuacuccaaauacugguaccuuaaucacacaguaacaggccgcaccagccucccacgaugcuggcuugucuccaacggcuccuaccucaacgaaacacacuuuuccgacgacauagaacaacaagccgacaacaugauaacagaacucuuacaaaaagaauacaucgacagacaaggcaagaccccacuaggacucguagaccucuucgucuucucaaccuccuucuaccuaaucucuaucuuucuccaccucguuaagauccccacccaccgacacaucauaggcaaacccugcccaaaaccccaccgacucaaccauaugggaaucugcucaugcggccucuacaagcaccccggcguccccguaaaauggaaacgcuag

SEQ ID NO: 2185 - RNA, 1473 nt, Artificial Sequence
  derived and/or modified protein sequence (opt11) from LASV(LASV988-NIG-2009;Clade II)__AIT17758__GPC
augggccaaaucaucaccuucuuccaagaagucccacacguaaucgaagaagucaugaacaucguccuaaucgcccucagccuccucgccauccuaaaaggcaucuacaacgucgccaccugcggccucuucggccucgucucauuccuucuacuaugcggccguuccugcucaaccaccuauaaaggcgucuaugaacuccaaacccucgaacuaaacauggccucccugaacaugaccaugccacucuccugcacaaaaaacaacucccaucacuacaucaugguaggcaacgaaaccggccucgaacucacccuuaccaacaccagcaucaucaaccacaaauucugcaaccuauccgacgcccacaagcgcaaccucuacgaccacgcccucaugaguauaauuucgaccuuccaccucagcauacccaacuucaaccaauacgaagcgaugagcugcgacuucaacggcgguaaaauaagcguccaauacaaccucucccacaccuacgcagucgacgccgccaaacacugcggcaccaucgcaaacgguguccuccaaaccuucaugagaauggccuggggcggcucauacaucgcacucgacuccggcaaaggauccugggacugcaucaugaccuccuaccaauaccuuaucauacaaaacacaaccugggaagaccacugcgaauuuucccguccuagucccauaggcuaccuaggauuacucucacaacgcacacgcgacauauacaucucccgaagacuacucggcacauucaccuggacccucuccgacuccgaaggcaacgaaacaccaggcggcuacugucucacacgcuggaugcucaucgaagccgaacuaaaauguuucggcaacaccgcagucgcaaaaugcaacgaaaaacacgaugaagaauucugcgacaugcuccgacucuucgacuucaacaaacaagccauacgccgacucaaagccgaagcccaaauguccauccaacucaucaacaaagcagucaaugcccucaucaacgaccaacucaucaugaagaaccaccuacgugacaucaugggcaucccauacugcaacuauucaaaauacugguaccucaaccacaccgucaccggcaagacgucccuaccacgcugcuggcuagucucaaacggcagcuaccuaaacgaaacucacuucuccgacgacaucgaacaacaagccgacaacaugauaaccgaauuacuccaaaaagaauacaucgaccgccaaggcaaaacuccccucggacucgucgaccucuucgucuucuccacuucauucuaccucaucuccaucuuccuccaccucgucaaaauacccacccacaggcacgucaucggcaaacccuguccaaaaccccaccgacuaaaucacaugggcaucugcuccugcggacucuacaaacaccccggaguccccgucaaauggaaaagauaa

SEQ ID NO: 2186 - RNA, 1473 nt, Artificial Sequence
  derived and/or modified protein sequence (opt11) from LASV(LASV989-NIG-2009;Clade II)__AIT17762__GPC
augggccaaaucauaaccuucuuccaagaagucccccacgucauagaggaagucaugaacaucguccucaucgcccuaucgcuacucgccauccucaagggcauauacaacgucgcaaccugcggccucuucggccuagucucauuccuccuccuuugcggacgcuccugcuccacuacauacaagggcgucuacgaacuacaaacacucgagcucgacauggccucccuaaacaugaccaugccacucuccugcaccaaaaacaacucacaccacuacauaauggucggaaacgaaaccggccuugaacucacccucaccaacaccuccaucaucucccacaaauucugcaaccuauccgacgcacacaagaaaaaccucuacgaccacgcccuaauguccaucauauccacuuuccaccuuuccauacccaauuucaaccaauaugaagcgaugagcugcgauuucaacggcggcaagaucuccguacaauacaaccucucccacaccuacgccgucgacgcagcaaaccacugcggaacaauugccaacggcguccuacaaaccuucaugcguauggcguggggcggauccuauaucgcccuugauagcggcaaaggcuccugggacuguauaaugaccucauaccaauaccucaucauccagaacacuaccugggaagaccacugccaauucucacgcccaucccccaucggcuaccucggccuccuaucacaacgaacacgcgacaucuacaucuccagacggcuccucggcaccuucacuuggacccuaucugacuccgaaggcaacgaagcacccggcggcuacugccuaacccgcuggaugcucaucgaagccgaacucaaaugcuucggcaacacggccgucgccaagugcaacgagaagcaugaugaagaguucugugacaugcuucgacucuucgacuucaacaaacaagccauccgccgccucaaaaccgaagcacaaauguccauccaacuaaucaacaaagccguuaacgcccucaucaacgaucaacuuauaaugaagaaccaccuccgcgauaucaugggcaucccguacugcaacuacuccagguacugguaccucaaccacaccgucaccggcaagaccucucucccccgcugcuggcucgucuccaacggcuccuaccuaaacgaaacacacuucuccgacgacauagaacaacaagcugauaacaugaucaccgaacuccuacaaaaagaauacauggaccgucaaggaaaaacaccccuaggccuagucgaccuauucgucuucuccaccuccuucuaccucaucuccaucuuccuacaccuugucaagauccccacccaccgccacgucaucggaaaacccugccccaaaccccaccgccuaaaccacaugggcaucugcuccuguggccucuacaaacacccaggcguccccgucaaauggaagcgcuga

SEQ ID NO: 2187 - RNA, 1473 nt, Artificial Sequence
  derived and/or modified protein sequence (opt11) from LASV(LASV991-NIG-2009;Clade II)__AIT17770__GPC
augggacaaaucgucaccuucuuccaagaagucccucaugucaucgaagaagucaugaacaucguccucauugcccuaucccuccucgccauccucaaaggcauauacaacgucgcaacaugcggccuuuucgggcuaguaucuuuccuccuccucugcggccgcagcugcuccaccacauacaagggagucuacgaacuccaagcccucgaacuggacaugagcucccuaaauaugacaaugccccuaucaugcacaaagaacaacucccaccacuacauaaugguaggcaacgaaaccggccuggaacuaacacucaccaacacgucgaucauccaccacaaguuuugcaaccucuccgacgcccacaagaaagaccuauacgaccacgcccuaaugucaaucaucucaaccuuccaccucagcauccccaacuucaaccaauacgaggccauguccugcgacuucaacggcggcaaaauaucggugcaguacaaccucucacacaccuacgccguagacgccgccaaccacugcggaacgaucgccaacggcguccuccaaacauucaugagaauggccuggggaggcuccuacauagcccucgacuccggcaaaggaggcugggacugcauaaugacuuccuaccaauuccuaaucauccaaaacaccaccugggaagaccacugccaauucagccgcccaagccccaucggauaccuuggacuccuaucccaaagaacccgggacaucuacaucucccgccgccuccuuggcaccuucacuuggacccucuccgacucagaaggcaacgaaacccccggcggcuacugccuaacccgcuggaugcuuauagaagcagaacucaaaugcuucgguaauaccgcagucgcuaaaugcaacgaaaaacacgacgaagaguucugcgacaugcuccgccuauucgacuucaauaaacaagccauaaaacgccuaaaaaccgaagcccaaaugucgauccaccucauuaacaaagccgucaacgcacuaauaaacgaccaacucaucaugaaaaaccaccuacgcgacauaaugggcaucccauacugcaacuacuccaaauacugguaccucaaucacaccgucaccggcaaaaccagccucccccgcugcuggcucgucuccaacggauccuaccucaacgaaacacacuucucagacgacaucgaacaacaagcggacaacaugaucacugaacuucuccaaaaagaauacaucgaccgccaaggcaaaacuccccucggccucgucgaccucuucgucuucucgaccuccuucuaccuuaucuccauauuccuccaccuaguaaagaucccaacccaccgccacgucaucggaaaacccugccccaaaccacaccggcucaaccacaugggaauaugcuccugcggacucuacaaacacccaggcguacccguccgcuggaaacgauaa

SEQ ID NO: 2188 - RNA, 1473 nt, Artificial Sequence
  derived and/or modified protein sequence (opt11) from LASV(LASV993-NIG-2009;Clade II)__AIT17778__GPC
augggccaaaucaucaccuucuuccaggaagucccucaugucaucgaagaagugaugaacaucguccucaucgcccucucccuacuugccauacuuaaaggcaucuacaacguagccaccuguggccuauucggacucgugucguuccuacuacucugcggccgcucaugcuccacaaccuacaaagggguauacgaacugcaaacccuagaacuugacauggccaaccucaacaugaccaugccccucuccugcaccaaaaacaacucucaccacuacauaauggucggcaacgaaacgggcuuagagcucacccucaccaacaccucaauaaucaaccacaaauucugcaaccucuccgacgcccacaagaaaaaccuauacgaccacgcccucaugucaauaaucucaacauuccaccuaucaauacccaacuucaaccaauacgaagcuauguccugcgacuucaacggcggcaaaaucucgguacaauacaaucucucacacaccuacgcacgcgacgcagccaaccacugcggcaccaucgccaacggaguccuccaaaccuucaugcguauggccuggggcggcucauacaucgcccuagacuccgguaaaggcucaugggacugcaucaugaccucauaccaauaccucaucauccaaaacaccacaugggaagaccacugccaauucucccgccccuccccuaucggcuaccuuggccugcucucucaacgcacccgcgacauauacaucucccgcagacuccucggcacuuucaccuggacccuauccgacuccgaaggcaacgaaacacccggcggcuacugccuaacacgcuggaugcucauagaagccgaacucaaaugcuucggcaacaccgccgucgcaaaaugcaacgaaaaacacgacgaagaguucugcgacaugcuccgccuauucgauuuuaacaaacaagccauccgccgccucaaaaccgaagcccaaaugaacauacaacucaucaacaaggccgucaacgcccucauaaacgaccaacuuaucaugaaaaaccaccuccgcgacaucaugggaaucccauacugcaauuacuccaaauacugguaccucaaccacaccguaaccggaaaaaccucccucccacguugcuggcuugucuccaacggaucauaccuaaacgaaacccacuuuuccgacgacaucgaacaacaagccgacaacaugaucacagaacuccuccaaaaagaauacauggaccgucaaggcaaaacaccccucgggcucgucgaccuauucgucuucuccacuagcuucuaccucaucuccaucuuccuccaccucgucaaaauccccacccaccgacacgucaucgguaaacccugccccaaaccccaccgcuuaaaccacaugggaaucugcuccugcggccuauacaaacacccaggcguacccgucaaauggaaacgcuaa

SEQ ID NO: 2189 - RNA, 1473 nt, Artificial Sequence
  derived and/or modified protein sequence (opt11) from LASV(Nig08-04;Clade II)__ADU56610__GPC
augggccaaaucgucaccuucuuccaagaagucccccacgucauagaagaagucaugaacaucguccucaucgcccucucacuccuagcaauccucaaaggcaucuacaacguagcgaccugcggccucuucggccuaaucucguuccuccuccucugcggccgcuccugcuccaccaccuacaaaggcguguacgaacuccaaacccuagaacuagacauggccaaccucaacaugacuaugccacucucuugcaccaaaaacuccucucaccauuacaucauggucggcaacgaaacaggacucgaacucacccucacuaacacaucaauaaucaaccacaaauucugcaaccucuccgacgcacacaaaaagaaccucuacgaccacgcacucauguccaucauuucaaccuuccaccuauccauccccaacuucaaccaguacgaagccaugagcugugacuucaacggaggcaagaucuccguccaauacaaccucucccacgccuacgcagucgacgccgccaaccacugcggaacgaucgccaacgggguccuccaaaccuucaugcgcauggccuggggaggcuccuacauagcccucgacuccggcaaaggcaacugggacugcaucaugaccucauaccaauaccuuaucauccaaaacaccaccugggaagaccacugccaauucucccguccaucucccaucggcuaccucggccucuuaucacagcgaacccgcgacauauauaucucccgacgccuccucggaacauucaccuggacacucuccgacuccgaaggcaacgaagcccccggcggauacugccuaacccgcuggaugcuaauagaagccgaacuaaagugcuucggaaacaccgccaucgcgaaaugcaaugaaaaacacgaugaagaauuuugcgacaugcuccgccucuucgauuucaacaaacaggcaaucaaacgccucaaagccgaagcccaaaugagcauccaacucauuaacaaagcagucaacgcccucaucaaugaccaacuaaucaugaaaaaccaccuccgagacauaaugggaauacccuacugcaacuacucuaaauacugguaccucaaucacaccgucaccggaaaaaccucccucccucgauguuggcucauauccaacggcucauaccuaaacgaaacccacuucucagacgacaucgaacaacaagcagacaacaugaucacagagcuccuccaaaaggaauacauggaccgacaaggcaaaacaccccucggucuagucgaccucuuuguauucucaaccuccuucuaccucaucuccaucuuccugcaccucguuaaaauacccacccaccgccacaucgucggccgccccugcccaaaaccccaccgacucaaccacaugggaaucugcuccugcggccucuacaaacaccccggcguccccguaaaguggaagcgauaa

SEQ ID NO: 2190 - RNA, 1473 nt, Artificial Sequence
  derived and/or modified protein sequence (opt11) from LASV(Nig08-A41;Clade II)__ADU56626__GPC
augggccaaaucaucaccuucuuccaagaagucccacacguaaucgaagaagucaugaacauaguacucaucgcccucagccuccucgccauccugaaaggcaucuacaacgucgccacaugcggccuauucggacuggucuccuuccuacuccugugcggccguagcugcuccaccacuuacaaaggcgucuacgaacuacaaacgcuagaacucaacauggccagccucaacaugaccaugccgcucuccugcaccaaaaacaacucccaccacuacaucauggucggcaacgaaaccggacucgaacucacacuaaccaacacuucaaucaucaaccacaaauucugcaaucuauccgacgcacacaaacgcaaccuauacgaccacgcacuaauguccaucaucucaaccuuccaccucucuaucccgaacuucaaccaauaugaagccauguccugugacuucaacggcgguaaaaucucuguccaauauaaccucucccacacuuacgccgucgacgccgcuaaacacugcggaaccaucgccaacggaguccuacaaacauuuaugcgcauggccuggggaggcuccuacauagcccuagacagcggcaaaggauccugggacugcauaaugaccagcuaccaauaccucauuauccaaaacaccacaugggaagaccacugucaauucagccgucccucgcccaucggauaccucggccuccucucacagcgaacacgagacaucuacaucucacgccgccuacuuggcaccuucacauggacccucuccgacucugaagggaacgaaacacccggcggcuacugucucacccgcuggaugcucaucgaagcagaacucaaaugcuucggcaauacugcagucgccaaaugcaacgagaaacacgacgaagaguucugcgacaugcuccgccucuucgacuucaacaaacaagccauccgccgccucaaagcagaagcccaaauguccauacaacuuaucaacaaggcagucaacgcccucaucaacgaccaacucauaaugaaaaaccaccuccgagacaucaugggcaucccauauugcaacuauagcaaguacugguaccuaaaccacaccgucaccggcaaaaccucacuuccaagaugcuggcuaguauccaacggcucauaccucaaugaaacccacuucuccgacgacaucgaacaacaagccgacaacaugauaaccgaacuccuccaaaaagaauacaucgaccgacaaggcaaaacaccccucggccucgucgaccucuucgucuucucuaccucuuucuaccuaaucagcaucuuccuccaccuagucaaaauccccacccaccgacacgucaucgguaaacccugucccaaaccccaccgccucaaccacauggguaucugcucaugcggccucuacaaacacccaggcguacccgucaaauggaaacgcuaa

SEQ ID NO: 2191 - RNA, 1473 nt, Artificial Sequence
  derived and/or modified protein sequence (opt11) from LASV(Nig08-A47;Clade II)__ADU56630__GPC
augggacaaaucaucaccuucuuccaagaagucccccacguaaucgaagaagucaugaacauaguccuaaucgcacucucccuccuagccauucucaaaggcaucuacaacgucgcaaccugcggccucuucggucucgucuccuuccuccuucucugcggccgcagcugcuccacaaccuacaaaggcgucuacgaacuccaaacccucgaacuugacauggccucccugaacaugaccaugccccuaucaugcaccaaaaacaacucccaccacuauaucauggucggcaacgaaaccggccucgaacucacccucaccaacaccagcauaaucaaccacaaauucugcaaccuaagcgacgcacacaaaaagaaccuuuacgaccacgcccuaaugucaaucaucagcacauuccaccucuccauccccaacuucaaucaguacgaagccauguccugcgacuuuaacggcggcaaaaucuccguucaauacaaccuaagccacgccuacgccguugacgcagcaaaccacugcggcaccaucgcaaacggaguacuccaaacauucaugcgcauggccuggggcggcuccuacauagcccucgacuccggcaaaggauccugggacugcaucaugaccuccuaccaauaccuaaucauccaaaacaccacaugggaagaccacugccaguuuucccgccccucccccauuggcuaccucggccuccuaucacaaagaacgcgcgacaucuacaucucacgacgccuacucggcacauucaccuggacacucuccgacuccgaaggcaacgaaacccccggcggcuacugccuuacccgcuggaugcucauugaagccgaacucaaaugcuucggaaacaccgcgguagccaaaugcaacgaaaaacacgacgaagaguucugcgacaugcuccgccucuucgacuucaacaaacaagccauccgccgucuaaaaaccgaagcccaaaugagcauccaacucaucaacaaagccgucaaugcccucauuaacgaccaacucaucaugaaaaaucaccuccgggacauaaugggaauccccuacugcaauuacucaaaauacugguaccuaaaccacacugucacaggcaaaacaucacuaccccgaugcuggcucgucuccaacggauccuaccucaacgaaacccacuucuccgacgacauagaacaacaggccgacaacaugaucacagaacuccuacaaaaagaauacauggaccgacaaggcaaaacaccccucggauuggucgaccucuucgucuucucaaccuccuucuaccucauaucuaucuuccuacaccucguccgaauccccacccaccgccacguaauagguaaaccaugcccaaaaccccaccgccucaaucacaugggcauuugcuccugcggacucuacaaacacccuggcgucccaguaaaguggaaacguuaa

SEQ ID NO: 2192 - RNA, 1473 nt, Artificial Sequence
  derived and/or modified protein sequence (opt11) from LASV(CSF;Clade III)__AAL13212__GPC
augggacaaauaguaaccuucuuccaagaggucccacacgucauagaagaaaucaugaacauaguccucauaacccuaucccuccucgcaauccucaaaggcguauacaaucuagcaaccugcggacuaaucggacucaucaccuuccucuuccucugcggccgcucaugcagcaugaccuacaaaggcucauaccagcucgaaacccuagaacuaaacauggaaacccuuaacaugaccaugccccucuccugcaccaaaaacaccucacaccacuauauacgagucggcaacgaaaccggccucgaacuaacccuaacuaacaccuccaucauaaaccacaaauucugcaaccuaucugacgcccacaagaaaaaccucuacgaccacagccuaaugucaaucauauccaccuuccaccucagcauccccaacuucaaccaauacgaagcaauguccugcgacuuuaacggcggcaaaaucucuauacaauacaaccuuagccacaccuacgccggagacgcagcuaagcacugcggaacccuggccaacggaauccuccaaacauucaugcgcauggcauggggaggcucguacauagcccucgacagcggccgcggcaacugggacugcauaaugaccucauaucaauaccuaaucauccagaacaccaccugggaagaccacugccaauucucccgccccucaccaaucggcuaccucggccuacucucccaacgcacccgcgaaauauacaucucccgccgccuccucggcaccuucacauggacccucagcgauuccgagggcaacgaaaaccccggcggcuacugccucaccagauggaugcucaucgaggccgaacucaagugcuucggaaacacagccgucgcaaagugcaacgaaaaacacgacgaagaguucugcgacaugcuccgacucuucgacuuuaauaaacaggccauucaacgccuaaaagcggaagcccaaauguccauacaacucauaaacaaagccgucaacgcccuaaucaacgaccaacucaucaugaaaaaccaccuucgcgacauaaugggaaucccguacuguaacuacuccaaauacugguaccucaaccacacaacuaccggccgcaccucccuaccccgcugcuggcucguauccaacggaucauaccuaaacgaaacccgcuucagcgacgacaucgaacaacaagccgacaacaugaucaccgaaaugcuccaaaaagaauacauugaccgccaaggcaaaacaccccucggucucgucgaucuguucgucuucuccacaucauucuaccucaucuccaucuuccuccaccucaucaagauacccacacaccgacacauagucggcggcccaugccccaaaccccaccgccucaaccauaaaggcaucugcucaugcggccucuauaaacgccccggaguaucaguacgcuggaaacgcuaa

SEQ ID NO: 2193 - RNA, 1473 nt, Artificial Sequence
  derived and/or modified protein sequence (opt11) from LASV(ISTH2121-NIG-2012;Clade III)__AIT17540__GPC
augggccaaaucgucaccuucuuucaagaggucccccauguaauugaagaaaucaugaacaucguccugauaacccucucccuccuagccauccuaaaaggcaucuacaacuucgcuaccugcggacuaaucggucuaaucaccuuccucuuccuaugcggccgcuccugcucaaccaucuacaaaggcuccuaccagcuccaaacauuagaacucaacauggaaacccuuaacaugacuaugccccuuuccugcacgaaaaacaacucucaccacuacauccgagucgggaacgaaaccggccucgaacuuacacucaccaacacaucaauaaucaaucacaaauucugcaaccucagcgaagcacacaagaaaaaccucuacgaccacgcccucauguccauaaucuccaccuuccaccuauccaucccaaacuucaaccaauacgaagcuaugucgugcgacuucaacggcggcaaaaucuccguccaguacaaccuuucacacucauacgccgucgacgccgccaaccacugcggcaccguagccaacggcguccuucagacauucaugcgcauggccuggggcggcucauacaucgcccucgacuccggacgcggaaacugggauugcaucaugaccucauaccaauaccucauaauccaaaacaccaccugggaagaccacugccaauucucccgccccuccccaauaggauaucucggacuucuaucccaacgcacacgcgacaucuacaucucccgccgccuccucggcaccuucaccuggacccucucugacuccgaaggcaaagaaacccccggcggcuacugucuaacccgcuggaugcuaauugaagccgaacuuaaaugcuucggcaacacugcagucgccaaaugcaacgaaaaacaugacgaagaguucugcgacaugcuccgccucuucgacuucaacaaacaagccauccaacgacuaaaaaccgaagcccaaauguccauacaacucauaaacaaagcugucaacgcacuaaucaacgaccaacucaucaugaaaaaccaccuccgcgacaucauggguauacccuacugcaacuacuccaaguacugguaccucaaucacaccagcacagggcgcacuucccuacccaaguguuggcucgucuccaacggauccuaccucaacgaaacccacuucagugacgacaucgaacaacaagccgacaacaugauaaccgaaaugcuacaaaaagaguacaucgacagacaaggaaaaacuccccuaggccucgucgaccucuucgucuucuccacauccuucuaccucaucuccaucuuucuucaccucgucaaaauccccacccaucgccacauuguaggaaaaucgugccccaaaccucaccgacucaaccacaugggaauaugcucauguggacucuacaaacaaccaggcguccccgugaaauggaaacguuaa

SEQ ID NO: 2194 - RNA, 1473 nt, Artificial Sequence
  derived and/or modified protein sequence (opt11) from LASV(Nig08-A19;Clade III)__ADU56618__GPC
augggccaaaucgugaccuucuuccaagaaguaccucacgucaucgaagaaguaaugaacauaguccucaucgcccucaguauccucgccauccuaaaaggccuauacaacaucgcuaccugcggccucaucggccucguuaccuuccuccuccugagcgggcgcucaugcuccaugaccuacaaaggcgucuacgaacuccaaacccucgaacuaaacaugaacacacuaaacaugaccaugccccucucgugcaccaagaacaacucccaccacuacauaauggucggaaacgaaacaggccuagaacugacccuuaccaacacaucccuccuccaccacaaauucuguaaccucucagacgcccacaagaaaaaccucuacgaccauacacugaugucaaucauauccaccuuccaccucagcauacccaacuucaaccaauacgaagccaugucaugcgacuucaacggcggcaaaauaaccguccaauacaaccucucacacucauacgccauagacgccgccaaccacugugggaccguagcuaacggaguccuccaaacauucaugcgcauggccuggggaggcucauacauagcccuagacucuggccgcggaaaaugggacugcauaaugacaucauaccaauaccucaucauccaaaacaccaccugggaagaccacugccaauucucacgacccucacccaucggcuaccucggacuccuaucccagcgcaccagagacaucuacauaucccgccgacuccuaggcacauucaccuggacacuaucagacuccgaaggcaacgaaacccccggcggguacugccuaacccgcuggaugcuaaucgaagcagaacucaaaugcuucggcaacaccgccguggccaaaugcaacgaaaaacacgacgaagaguucugcgacaugcuccgacucuucgacuucaacaaacaagcaauccgccgacucaaagccgaagcccaaaugucaauacaacuaaucaacaaagccgucaacgcacuaaucaacgaccaacucaucaugaaaaaccaccuccgugacaucaugggaauccccuacugcaacuauucaaaauauugguaccuaaaccacaccuccaccggacgcaccuccuuaccccgcugcuggcuagucucaaaugguucauaccucaacgaaacccacuucuccgaugacaucgaacaacaagccgacaacaugaucaccgaaaugcugcaaaaagaauaccuugaccgacaaggcaaaacaccccucggacucgucgaccucuucgucuuuucaaccuccuuuuaccucaucucgaucuuucuacaccucgucaaaauccccacccacagacacaucgucggcaagcccugccccaaaccccaccggcuuaaucacaugggaaucugcuccugcggccuuuacaagcaaccaggaguccccguaagauggaaacgauaa

SEQ ID NO: 2195 - RNA, 1473 nt, Artificial Sequence
  derived and/or modified protein sequence (opt11) from LASV(ONM-299;Clade III)__ANH09734__GPC
augggccaaaucgucaccuucuuccaagaaguaccucacguuaucgaagaaaucaugaacaucguccucaucacccucagccuucucgccauccucaaaggccuauacaacuucgcaaccugcggccucaucggccucaucaccuuccuguuccucugcggccgcuccugcucaaugaucuacaaaggaagcuaccaacucgaaacccuagaacuaaacauggaaacccucaacaugaccaugccacuaucgugcaccaaaaacaacucacaccauuacauccgcgucggaaacgaaaccggccuagaacucacgcucaccaacacaucgaucauaggccacaaauucugcaaccuauccgacgcccacaagaaaaaccucuacgaccacucccucaugagcaucaucuccaccuuccacuuaucuaucccuaacuucaaucaauacgaagccauguccugcgacuucaacggcggcaaaaucucuauccaauacaaccuaagccacacuuacgccggcgacgccgcuaaacacugcggaacuguagcuaacggcguacuucaaaccuucaugcgaauggccuggggcggauccuauauagcccucgacuccggccgcgguaacugggacugcaucaugaccuccuaccaauaccucaucauccaaaacacaacaugggaggaccacugccaauucagccgccccucccccaucggcuaccuaggccuacucucccagcgcacccgcgacaucuacaucucccgacgccuacucgguaccuucaccuggacccucuccgacuccgaaggcaaagaaacacccggaggauacugccuaacccgauggaugcuaaucgaagcagaacucaaaugcuucggaaacaccgccgucgcaaaaugcaacgagaaacacgacgaagaguucugugacaugcuacgacucuucgacuucaacaaacaagccauacaacgccucaaaacagaagcccaaauguccauccagcucauuaacaaagccguuaacgcccuaaucaacgaccaauuaaucaugaagaaccaccuccgugacaucaugggcauccccuacuguaacuacuccaaauacugguaccuuaaccacaccuccaccggacgcaccagccucccaaaaugcuggcucgucuccaacggcuccuaccucaacgaaacccacuucuccgacgauaucgaacaacaagccgacaacaugauaacugaaaugcuacaaaaagaauacaucgaccgccaaggaaaaacaccccucggccucgucgacgucuucguuuucagcaccucauucuaucuaaucuccaucuuccuacaccucgucaaaauccccacccaccgccacauagucggcaaaucaugccccaaaccccaccgucuaaaccacaugggcaucugcuccugugggcucuauaaacaacccggcguacccguacgauggaaacgcuaa

SEQ ID NO: 2196 - RNA, 1473 nt, Artificial Sequence
  derived and/or modified protein sequence (opt11) from LASV(ONM-700;Clade III)__ANH09738__GPC
augggccaaaucguaaccuucuuccaagaaguuccccacgucaucgaagaaaucaugaacaucguacuaauaacccuuucccuucucgccauucuuaaaggacucuacaacuucgccacaugcggccuuauaggccuaauaaccuuccuauuccucugcggccgcuccugcucaaugaucuacaaagguuccuaccaacucgaaacccucgaacucaacauggaaacacucaacaugaccaugccucuauccugcaccaaaaacaacucacaucacuacauccgcguaggcaacgaaacaggccuagaacucacccuaaccaauaccucaaucaucaaccacaaauucugcaaucuuucugacgcccacaaacgcaaccuauacgaccacuccuuaaugagcaucauaagcaccuuccaccucuccauacccaacuucaaccaauacgaagccauguccugcgacuuuaacggcggcaaaauuucaauccaauacaaccuaucccacacuuacgcuggggacgccgccaaacacugcggaaccgucgccaacggcgugcuccagacauucaugcguauggccuggggcggaucuuacaucgcacucgacuccggccgcggcaacugggacugcaucaugaccuccuaucaauaccucaucauccagaacacaaccugggaagaccacugccaauucucccgacccucacccaucgguuaccucggacuccuaucccaacgaacccgcgacauuuacaucucccgcagacuccucggaaccuucaccuggacacucucagacuccgaaggaaaagaaacccccggcggcuacugccucacccgcuggaugcucauagaagccgaacucaaaugcuucggcaacacagccguugccaaaugcaacgagaaacacgacgaagaguucugcgacaugcuccgccuuuucgacuucaacaaacaagccauccaacgccucaaaacagaagcccaaaugucaauucaacuaaucaacaaagcaguaaacgcccucaucaacgaccaauuaaucaugaagaaucaccuccgcgacaucaugggcauccccuacugcaacuacucuaaauacugguaccuaaaccacaccuccaccggccguaccucccuccccaaaugcuggcucgucuccaacggcuccuaccucaacgaaacccauuucuccgacgacauagaacaacaagccgacaacaugaucaccgaaaugcuccaaaaggaauacauagaccgccaagguaagacaccgcucggccuaguugacguauucauguucucuaccuccuucuaccuuauauccaucuuccuccaucuaguaaagauaccaacccaccgccacauagucggcaaaagcugccccaaaccacaccgacuaaaccacaugggcauaugcagcugcggccucuacaaacaacccggcgucccuguacguuggaaacgcuga

SEQ ID NO: 2197 - RNA, 1473 nt, Artificial Sequence
  derived and/or modified protein sequence (opt11) from LASV(Weller;Clade III)__AAT49010__GPC
augggacaaauagucaccuucuuccaagaagucccccacgugauagaggaagucaugaacaucguccucauagcccuaagcguccucgccauccucaaaggccucuacaacuucgcaaccugcggacucaucggccucgucaccuuccuccuacucucuggacguucuugcuccaugaucuacaagggcgucuaugaauuacaaacccucgaacuaaacauggaaacccuaaacaugaccaugccccuguccugcaccaaaaauacaucccaccacuacauccgcguaggaaacgacaccggccuggaacucacccuaaccaaugaaacccuacuacaccacaaguucugcaaccuuuccgacgcccacaaacgcaaucuauacgaccacgcccuaaugagcaucaucuccacuuuucaccuuucaauacccaacuucaaccaauacgaagccaugucaugcgacuucaacgguggaaaaaucaccguccaauauaaccucucccacuccuaugccgucgacgccgcaaaacacugcggcaccgucgccaauggaguccuucagaccuucaugcgcauggcuuggggcggcuccuacaucgcccucgacucccgccacggcaacugggacugcaucaugaccuccuaccaauaccucaucauccaaaacaccaccugggaagaccacugccaauuuucuagacccucccccauaggcuaccucggccuccucucacaacgaacccgcgacauauacaucuccagacgacuccucggcaccuucacauggacccucuccgacucagaaggaaaugaaacccccggcggauacugccucacccgcuggaugcuaaucgaagcagaacuaaaauguuuuggaaacacagccguagcuaaaugcaacgagaaacacgacgaagaguucugcgacaugcugcgcuuauuugacuucaacaaacaagcaauacggcgccucaaaaccgaagcacaaauguccauccaacucaucaauaaagcagucaacgcccucauaaacgaucaacuaaucaugaaaaaccaccuacgcgauaucaugggcauccccuacugcaacuauucgaaauacugguacuugaaccacacuuccaccggcaaaacuucgcucccccguuguuggcucguauccaacggcucauaccucaacgaaacccacuucucagacgacauagaacaacaagcugacaacaugauaacagagaugcuccaaaaggaauaccucgaucgccaggguaaaacaccccucggccucgucgaccucuucguguucuccaccagcuucuaccuuaucagcauuuuccuccaccucaucaaaauacccacccaccgccacaucgucggcaaaccaugccccaaaccccaccgccuuaaccacaugggcauaugcuccugcggccucuacaaacaacccggcgucccaguccgcuggaaacgauaa

SEQ ID NO: 2198 - RNA, 1476 nt, Artificial Sequence
  derived and/or modified protein sequence (opt11) from LASV(BA366;Clade IV)__ADI39451__GPC
augggccaaaucgucacauucuuccaagaagucccccacgucaucgaagaaguaaugaacaucguccuaaucgcccuuucuguacucgccguccucaaaggauuauacaacguagcaaccugcggacucaucggccucaucgcauuucuccuccucugcggccgcuccuguaccaccacacucuacaaaggcgucuacgaacugcaagcccuagaacucaacauggaaacccucaacaugaccaugccccucuccugcaccaaaaacaacagccaccacuauaucauggucggcaaugaaaccggccucgaacuaacccucaccaacacaucaauaaucaaccacaaauucugcaaccucuccgacgcacacaagaaaaaccucuacgaccaugcacuaaugucaaucaucuccaccuuccaccuauccauccccaacuucaaucaauacgaagccaugucaugcgacuucaacggcggcaaaauauccguccaauacaaccucucccacacauacgccguagacgcagccaaccacugcggcacagucgcuaacggcguccuccaaacuuucaugcgcauggccuggggcggcucauacaucgcccucgacucaggucgaggcuccugggacugcaucaugacguccuaccaauaccucaucauacaaaacaccacaugggaagaccacugccaauucucccgccccagccccaucgguuaccucggucuccucucacaacgaacccgcgauaucuacaucucccgccgccuccuaggcaccuucacauggacccuauccgacagcgagggcaaagacacacccggcggauacugcuuaacccgcuggaugcucaucgaggccgaacucaaauguuucggcaacaccgccguagccaaaugcaacgaaaaacaugacgaagaguucugcgacaugcuucgacucuucgacuucaacaaacaagcaauacaacgccuaaaagccgaagcacaaaugucuauacaacucauaaacaaagcagucaacgcacucaucaacgaccagcuuaucaugaaaaaccaccuacgagacaucaugggcauaccuuacugcaacuacucuaaauacugguaccucaaccacaccaucaccggccgcaccucgcuccccaaauguuggcucguaucaaacggauccuaccucaacgaaacccauuuuucagacgacaucgaacaacaagccgacaacaugaucacagaaaugcuccagaaagaauacauagaacgacaaggaaaaacaccccuaggccucguagaucucuucgucuucuccaccuccuucuaccuaauauccauuuucuuacaccucaucaaaauccccacccaccgacacaucguaaacaaacccugcccaaaaccacaccggcuaaaccacaugggaguaugcuccugcggccucuauaaacagccaggaguccccguccgcuggaaacgcuaa

SEQ ID NO: 2199 - RNA, 1476 nt, Artificial Sequence
  derived and/or modified protein sequence (opt11) from LASV(G1180-SLE-2010;Clade IV)__AIT17168__GPC
augggccaaaucguaaccuucuuccaagaagucccccacgucauagaggaggucaugaacaucguccucauagcccucuccauccucgcaguucucaaaggacucuacaacuucgcaaccugcggccuagucggacuccucaccuuucuucuccucugcggccgcuccugcaccgccucccgcuacaaaggugucuacgaacuccaaacacucgaacucaacauggaaacacuaaacaugaccaugccccuauccugcaccaaaaacaauucccaccacuacaucauggugggcaacgaaaccggccucgagcucacgcuaacaaacaccuccaucaucaaccauaaauucugcaaccucuccgacgcucacaagaaaaaccucuacgaccaugcccucaugucaaucaucuccaccuuccaucuauccauccccaacuucaaccaauaugaagccauguccugcgacuucaacggaggcaaaaucuccguacaauacaaccucucccacuccuacgccggagacgccgccaaucacugcggcaccgucgccaacggcguccugcaaacauucaugcguauggccuggggcggcucauacaucgcccucgacuccggccacggcuccugggacugcauaaugacaagcuaccaauaccucaucauacaaaacacaaccugggaagaccacugccaauucagccgaccaucaccaaucgguuaccucggccugcuaucccaacgaacacgcgacaucuacauaucccgacgacugcucggaaccuucaccuggacccugagcgacucugaaggcaaagacacacccggcggcuacugccuaacccgcuggaugcuaaucgaagccgaacucaaaugcuucggaaacacagccguagccaaaugcaacgaaaaacacgacgaagaguucugcgacaugcuccgccuauucgacuucaacaaacaagccauucaacgacuaaaagccgaagcacaaauguccauacaacuaauaaacaaagccgucaacgcccuuaucaacgaccaacucaucaugaaaaaccaccuaagagacauaaugggcauccccuacugcaacuacagcaaauacugguaccucaaccacacgacaacaggaaaaaccucuuuacccaagugcuggcuaguaagcaacgguucauaccucaacgaaacccacuucuccgacgacaucgaacaacaagccgacaacaugaucaccgagaugcuacaaaaagaauacauggaacgacaaggcaaaacaccccucggacucgucgaccucuucgucuucuccaccuccuucuaccuaaucucaaucuuccuacaccuagucaaaauacccacccaccgccacaucgucggaaaauccugcccaaaaccccaucgacucaaccacaugggcaucugcuccuguggccuauacaaacagcccggagucccagucaaguggaaacgauaa

SEQ ID NO: 2200 - RNA, 1476 nt, Artificial Sequence
  derived and/or modified protein sequence (opt11) from LASV(G1190-SLE-2010;Clade IV)__AIT17172__GPC
augggccaaaucgucaccuucuuccaggaagucccccacguaaucgaagaagucaugaacauaguccuaauagcacucuccauacucgccguccucaaaggacuguacaacuucgccacaugcggacucgucggacucgucaccuuccuccuccuaugcggccgcucaugcacgaccucccuauacaaaggcguauacgaacuacagacacucgaacuaaacauggaaacccuaaacaugacuaugccacugucaugcaccaaaaacaacucccaccacuacauaaugguaggcaacgaaaccggccucgaacucacccucaccaacaccuccaucaucaaccacaaguucugcaaccuauccgaugcccacaagaaaaaccucuacgaccacgcacucauguccaucaucuccaccuuccaccucagcauacccaacuucaaccaauacgaagcaaugucaugcgacuucaacggcgguaaaauauccguccaauacaaccucagccacucauacgccggcgacgcagccaaccacuguggaacagucgcaaacggcgugcuacaaacauucaugcgcauggccuggggcggaagcuacauagcacucgacucuggccggggacgcugggacugcauaaugaccuccuaccaauaccuaaucauccagaacaccacaugggaagaucacugccaauucucccgccccaguccuaucggcuaccucggacuacucucccaacgaacccgagacauauacauaucccgccgacuccucggcaccuucacauggacccuauccgacucagaaggcaaagacacccccggcggcuacugccuaacccguuggaugcuaaucgaggccgaacucaaauguuucggcaacaccgcuguagcaaaaugcaacgaaaaacacgacgaagaguucugcgacaugcuacgacucuucgacuucaacaaacaagcuauccaacgccucaaggccgaagcccaaauguccauacagcucauaaacaaagccgucaacgcccugaucaacgaccaacucaucaugaaaaaccaccucagggacaucaugggaauccccuacugcaacuacagcaaauacugguaccucaaccacaccacaaccgggaaaaccucccuccccaaaugcuggcucguaucaaacgguuccuaccucaacgaaacccacuucuccgacgacaucgaacaacaagccgacaacaugaucaccgaaaugcuacaaaaagaauacauggaacggcaaggcaaaacaccacucggccucgucgaucucuucguauucucaaccuccuucuaccucauuucgaucuucuuacaccucgucaaaauccccacacaucggcacaucgucggcaaacccuguccccgcccacaccgccuaaaccacaugggcaucugcuccugcggccuuuacaagcaacccggaguccccgucaaauggaaacgcuaa

SEQ ID NO: 2201 - RNA, 1476 nt, Artificial Sequence
  derived and/or modified protein sequence (opt11) from LASV(G1200-LIB-2010;Clade IV)__AIT17176__GPC
augggccaaaucgucaccuucuuccaagaagucccccacgucaucgaagaaguaaugaacauuguccuaauagcccucucccuccucgcuguacucaaaggucucuauaacgucgccacaugcggccuuaucggccucaucaccuucuuacuccucugcggccgaucaugcaccaccaaccucuacaaaggcgucuacgaacuccaagcacucgaacucaacauggaaacccucaacaugaccaugccacucuccugcaccaaaaacaacucacaccacuacaucaugguaggcaacgaaacaggccuagaacucacccucaccaacacaucaauaauuaaccacaaauucugcaaccuaagcgacgcacacaagaaaaaucucuacgaccacgcccucauguccauaaucuccaccuuccaccucuccaucccuaacuucaaccaauacgaagcaauguccugcgacuucaacggcggucgcaucuccguccaauacaacuuaucccacuccuacgccggagaugccgcaucccauugcggcaccaucgccaacggaguccuacaaaccuucaugcgcauggcauggggcggauccuacauugcccuggacucaggccacggcggcugggacugcaucaugacauccuaccaauaccucauaauacaaaacaccacuugggaagaccacugccaauucagccgcccaucccccaucggguaccuuggccuccucucgcaaaggacccgcgacauauacauaucccgacgacuccuagggacauucacauggacccuauccgauucggaaggaaaagacacccccggcggauacugccuaacccgcuggaugcucaucgaagccgaacucaaaugcuucggaaacacagccgucgccaaaugcaacgaaaaacacgacgaagaguucugcgacaugcuccgccucuucgacuuuaacaaacaagccauccaacgccucaaagccgaagcccaaauguccauccaacucaucaacaaagccguuaacgcccugaucaacgaccaacuaauaaugaaaaaccaccuacgcgacauaaugggcauccccuacugcaacuacuccaaauacugguaccucaaucacaccgugaccggaaaaacgucccuccccaaauguuggcucgucuccaacggcuccuaccuaaacgaaacccacuucagcgacgacauagaacaacaagccgacaacaugaucacagaaaugcuucaaaaagaauacauggaacgacagggcaaaacaccccucggccuagucgaccucuuugucuucucaaccuccuucuaccucauauccaucuuccuccaccucgucaaaauuccuacccaccgccacgucguaggcaaaccaugcccaaaaccucaccgucucaaccacaugggaaucugcuccuguggccuauacaaacagccuggcguccccguccgcuggaaacgauag

SEQ ID NO: 2202 - RNA, 1476 nt, Artificial Sequence
  derived and/or modified protein sequence (opt11) from LASV(G1442-SLE-2011;Clade IV)__AIT17180__GPC
augggccaaauugucaccuucuuccaagagguaccccacgucaucgaagagguaaugaacaucguccucaucgcccuauccauccucgcuguccuuaaaggccucuacaacguagcaacuugcggccuaauaggucuggucaccuuccuccuccucugcggccgcucuugcacaaccacccucuacaaaggagucuacgagcuccaaacgcuagaacuaaacauggaaacccucaacaugaccaugccacuauccugcaccaaaaauaacucacaccacuacauccgcguaggaaacgaaacuggacucgagcugacacucaccaacaccagcaucauuaaccacaaauucugcaaccucuccgacgcccacaagaaaaaccucuacgaccacgccuuaauguccaucaucuccaccuuccacuuauccauaccaaacuucaaccaguacgaagcaaugucaugcgacuucaacggcggcaaaauauccguccaauacaaccuaucccacuccuacgccggcgacgccgccaaccacugcgguaccgucgccaacggcgugcuccaaacauucaugcggauggcauggggcggcucguacaucgcacucgacuccggacgaggcaacugggacugcaucaugaccuccuaccaauaccuaauaauacaaaacaccaccugggacgaccacugccaauucucacgcccauccccaaucggcuaccuaggacuacucucccaacgcacccgcgacguauacauaucccgccgccuccuggggaccuucaccuggacacucagcgacuccgaaggcaaagauacccccggcggauacugccucacccgcuggaugcucaucgaagccgaacuaaaauguuucggcaacaccgccgucgcaaaauguaacgaaaaacacgacgaagaguucugcgacaugcuccgccuauucgacuucaacaaacaagccauccaacgccuuaaagcagaagcccagauguccauccaacucaucaacaaagcaguaaacgcccuaaucaacgaccaacucaucaugaaaaaccaccuccgugacaucaugggcauaccuuacuguaauuacuccaaguacugguaccucaacaacacagccaccggcaaaaccucccucccaaaaugcuggcucaucuccaacggcucuuaccucaacgaaacccacuucuccgacgacaucgaacaagaagccgacaacaugauaaccgaaaugcuacaaaaagaguacauggaaagacaaggcaaaacaccccuaggccuagucgaccucuucgucuucucuaccucauucuaccucauauccaucuuccuccacuuagucaaaaucccgacccaucgccauauagucggcaaauccugccccaaaccacaccgccuuaaccacaugggcauaugcagcugcggacucuacaaacagcccggcguccccguccgauggaaacgauaa

SEQ ID NO: 2203 - RNA, 1476 nt, Artificial Sequence
  derived and/or modified protein sequence (opt11) from LASV(G1529-SLE-2011;Clade IV)__AIT17184__GPC
augggccaaaucgucacauucuuccaagaggucccacacgucaucgaggaaguaaugaacauuguccucaucgcccuauccauacucgcaguacucaaaggccucuacaacgucgcgaccugcggccugaucggccucgucacuuuccugcugcucugcggccgcucgugcaccaccacccucuauaaaggagucuacgaacuacaagcccucgaacucaacauggaaacccuaaacaugacgaugccccuaucuugcaccaaaaacaacucccaccacuacauccgggucgggaacgaaaccggccucgaacugacccucaccaacacauccaucaucgaccacaaauucugcaaccuaagcgacgcccacaagaaaaaccucuacgaccacgcacucauguccaucaucagcacauuccaccucuccaucccaaacuucaaccaauacgaagccaugagcugcgacuucaacggaggcaaaaucuccguccaauacaaccucucacacucauacgcaggagacgcggcuaaucacugcggcaccgucgccaacggcguccuccaaaccuucaugcguauggcuuggggcggcuccuacaucgcccuagauuccggccguaacggaugggacugcaucaugaccucuuaucaauaccucaucauccagaacaccaccugggaugaccacugccaauucucccgccccucccccauaggcuaccuaggccugcuaucacaacguacccgggacauauacaucucccgacgccuacucggcaccuucaccuggacccucucagacuccgaaggcaaagacacccccgggggauacugccucacccgauggaugcucaucgaagcagaacuaaaaugcuucggcaacacugccgucgcaaaaugcaacgaaaagcacgacgaagaguucugcgacaugcuccgccuuuucgacuucaacaaacaagccauccgucgccucaaagccgaagcccaaauguccauacaacucaucaacaaagccguaaaugcacucaucaacgaccaguuaaucaugaaaaaccaucuccgugacaucaugggaauaccauacugcaacuacuccaaguauugguaccucaacaauaccgccaccggcaaaaccuccuuaccccgcugcuggcucgucucaaacggcuccuaccucaacgaaacccacuucucagacgacauagaacaacaagccgacaacaugaucacugaaaugcuccaacgcgaguacauggaacgccaaggcaaaacuccacuuggccuagucgaccuauucguuuucuccaccuccuucuaccucaucuccaucuuccuccaccucgucaaaaucccaacccaccgccacaucguuggcaaacccugccccaaaccccaccgccuaaaccacaugggcaucugcagcugcggacucuacaaacaacccggaguacccgucaaauggaaacgcuaa

SEQ ID NO: 2204 - RNA, 1476 nt, Artificial Sequence
  derived and/or modified protein sequence (opt11) from LASV(G1618-SLE-2011;Clade IV)__AIT17188__GPC
auggggcaaaucgucaccuucuuccaagaagucccccacguaaucgaagaaguaaugaauauaguccucauagcccuuagcauacuugccguccuaaaagggcuauacaacuucgccacaugcggcuucgucggccuuguaucauuccuccuccucugcggccguucaugcaccaccucacucuacaaaggcguauacgaacuucaaacccucgagcucaacauggaaacucucaacaugaccaugccacucuccuguaccaagaacaacagccaccacuacaucaugguuggcaaugaaaccggucucgaacuaacccucacuaacaccuccaucaucaaccacaaauucugcaaccucuccgaugcccacaagaaaaaucuguacgaccacgcccucauguccauaaucuccaccuuccaccuauccauucccaacuucaaccaauacgaagccauguccugcgacuucaacggaggcaaaaucagcguccaauacaaccucucacacuccuacgccgucgacgcagccaaccacugcggcaccgucgcaaacgggguccuccaaaccuucaugcguauggccuggggcggcagcuacaucgcccucgacuccggacacggcucgugggauugcaucaugaccuccuaccaauaccuuaucauccaaaacaccacaugggaagaccacugccaauucucacgaccaucccccaucggauaccuuggacuccucucccaacgcacccgggacauauacauaucccgccgccuacuaggcaccuucaccuggacccuauccgacuccgaaggcaaagacacccccggcggcuacugccucacccgcuggaugcucaucgaagccgaacucaaaugcuucggcaacacagccgucgcaaaaugcaacgaaaaacacgacgaagaguucugcgacaugcuacgccucuuugacuucaacaaacaagccauccaacgccuccgagccgaagcccaaauguccauacaacugaucaacaaagccgucaacgcccucaucaacgaccaacucauaaugaaaaaucaccuccgagacauaaugggcauacccuacugcaacuacuccaaauacugguaccucaaccauaccaccaccggccgaacgagccuccccaaaugcuggcuagucucaaacgguuccuaccucaacgaaacccauuucuccgacgacauugaacaacaggccgacaacaugaucacagaaaugcuccaaaaagaauacauggaacgacaaggcaaaaccccacuaggccuggucgaccucuucgucuucuccaccuccuucuaccuaaucucaaucuuccuacaccuggucaaaauccccacccacagacacaucgucggcaaauccugccccaaaccccaccgccucaaccacaugggcauaugcuccugcggccucuacggccaaccaggagucccagucaaauggaaacgcuaa

SEQ ID NO: 2205 - RNA, 1476 nt, Artificial Sequence
  derived and/or modified protein sequence (opt11) from LASV(G1646-SLE-2011;Clade IV)__AIT17192__GPC
augggccaaaucgucacuuucuuccaagaagucccccacgucaucgaagaagucaugaacaucguccucauugcacucucaauccuagccguccuaaaaggccucuacaacuucgcaaccugcggauucauaggccucgucuccuuucuucuccucugcggccgcucaugcaccacuucccucuacaagggcguuuacgaacuacaaacccucgaacucaacauggaaacccucaacaugacgaugccccucucaugcaccaaaaauaacagccaccacuacaucauggucgggaacgaaaccggacucgagcucacccuuaccaacacauccaucaucaaccacaaauucugcaaucucuccgacgcccacaagaaaaaccucuacgaccacgcccuaauguccaucaucuccacauuccaccucucaauacccaacuucaaccaauucgaagccauguccugcgacuucaacggaggaaaaaucuccguacaauacaacuuaagccacuccuacgccguagacgccgccaaccacugcggcaccgucgccaacggcguccugcaaaccuucaugcgcauggcauggggcggauccuacaucgcccucgacuccggccacgguuccugggacuguaucaugaccucauaccaauaccuaaucauccagaacaccaccugggaagaccauugccaauucucccgaccgucacccaucggauaccugggccuccucucacaacgaaccagagauauuuacaucucccgccgguuacucggcaccuucacuuggacuuuaagcgacucagaaggcaaagacacccccggcggauacugccucaccagauggaugcuaauagaggccgagcucaaaugcuucggaaacaccgccguagccaaaugcaacgaaaaacacgacgaagaguucugcgacaugcuccgccucuucgacuucaacaaacaagccauccaacgucucaaagcugaagcccaaauguccauacaacugauuaauaaagcugucaacgcccuuauuaacgaccaacucaucaugaaaaaccaccuacgagacauaaugggaauccccuacugcaacuauuccaaauauugguaccucaaccacacaacuaccggccgcaccucccuacccaaaugcuggcucgucaguaacggcucuuaccucaaugaaacccacuucuccgacgacauugaacagcaggccgacaacaugauaacagaaaugcuucaaaaagaauacauggaacgccaaggcaaaacaccccucggccucgucgaccucuucgucuucucaaccagcuucuaccucaucuccauauuccuccaucucgucaaaauucccacccaccgacacaucguaggcaaaucaugcccuaaaccccaccgccucaaccauauggguaucugcucaugcggccucuauggccaacccggcguccccguaaaauggaaacgauaa

SEQ ID NO: 2206 - RNA, 1476 nt, Artificial Sequence
  derived and/or modified protein sequence (opt11) from LASV(G1647-SLE-2011;Clade IV)__AIT17196__GPC
augggccagaucguaaccuucuuccaagaagucccccaugucauagaggaagucaugaacaucguacucaucgcccuaagcauccucgccguccuaaaaggccuuuacaaccucgcgaccugcggacucgucggccuggucaccuuccuucuccuaugcggccgcucaugcacaaccucacucuacaaaggcgucuacgaacuccagacccucgaguugaacauggaaacccuaaacaugaccaugccccucuccugcacuaaaaacaacagccaccacuacaucauggucggcaacgaaaccggccucgaacucacccuuacaaacacuucaaucauaaaccacaaauucugcaaccucucagacgcccacaagaaaaaccucuaugaccacgcccucauguccaucaucuccaccuuccaccucuccauccccaacuucaaccaauacgaagccaugagcugcgacuuuaauggcggcaaaaucucuguacaauacaaccuaucucacucauacgccggagacgccgccaaccacugcggaaccgucgccaacggcguccuccagacauucaugcgcauggccuggggcggcuccuacaucgcccucgacuccggccgaggccgcugggacugcaucaugacauccuaccaauaccugauuauacaaaacaccaccugggaagaccacugccaauucucccgccccuccccaaucggauaccucggccuccucucacaacgaacccgagacauauacaucucccgacgacugcucggaaccuucaccuggacccucucggacuccgaaggcaaagauacaccaggaggcuacugccucacccgcuggaugcucaucgaagccgaacuaaaaugcuucggcaacaccgcagucgccaaaugcaacgaaaaacacgacgaggaguucugugacaugcuccgccucuucgacuucaacaaacaggcaauccagcgccucaaagccgaagcccaaaugaacauccaacucauaaacaaagccguaaacgcacuuaucaacgaccaacucauaaugaaaaaccaucuccgagacaucaugggcaucccguacugcaacuacuccaaauacugguaucuuaaccacaccacaaccggaaagacuucccuaccccgauguuggcuagucagcaacggcuccuaccugaacgaaacccacuucucagacgacaucgaacaacaagccgacaacaugaucaccgaaaugcuccaaaaggaauauauggaacgccaaggcaaaacaccccuaggccucguugaccucuucgucuucucuaccuccuucuaccucauauccauauuccuccaccucguaaaaauacccacccaccgacauauagucggaaaaccaugccccaaaccccaccgacugaaccacaugggaaucugcucaugcggcuucuacaagcagcccggagucccugucaaauggaaaagauaa

SEQ ID NO: 2207 - RNA, 1476 nt, Artificial Sequence
  derived and/or modified protein sequence (opt11) from LASV(G1774-SLE-2011;Clade IV)__AIT17204__GPC
augggccaaaucguaacauucuuccaagaggucccacacgucaucgaagaaguaaugaacauaguacucaucgcacucuccauccucgccguccuaaaaggacucuacaaucucgccaccuguggccucgucggacuggucaccuuccucuuacucugcggccgcucaugcaccagcucccucuacaaaggcgucuacgaacuccaaacccucgaacuaaauauggaaacccucaacaugaccaugccccuauccugcaccaaaaacagcucccaccacuacauccgcgucggcaacgaaaccgggcucgaacucacccuaaccaacacaucgauuauaaaccacaaauucugcaaucucuccgacgcccacaagaaaaaccucuacgaccacgcccucaugucaauaauaucaacauuccaccucuccauacccaacuucaaccaauacgaggcaauguccugcgacuucaacggcggaaaaaucagcguccaauacaaccuaucccacucuuacgccggcgacgccgccaaccacugcgggaccgucgcaaacggcguccuacaaacauucaugcgcauggccuggggaggcuccuacaucgcccuugacucaggacacgaccguugggacugcauuaugacauccuaccaauaccuuaucauccagaacaccaccugggaggaccacugccaauucucgcgccccucuccaauaggcuaccucggacuacuaucccagcgcaccagagacaucuacaucucucgacgccuccucggcaccuucaccuggacacucucagacuccgaaggcaaagacacccccggcggcuacugccucacccgcuggaugcucaucgaagcagaacucaaaugcuucggcaacaccgccgucgccaaaugcaaugaaaaacaugacgaggaguucugcgacaugcuucggcuauucgacuucaacaaacaagcaauccaaagauugaaagcagaagcccaaauguccauccaacucaucaacaaagcaguaaacgcucucaucaacgaccaacucaucaugaaaaaccaucuccgcgacaucaugggcaucccauacugcaacuacuccaaauacugguaccucaaccacaccaucaccggaaaaaccucccuccccaaaugcuggcuaguauccaacgguuccuaccuaaacaaaacccacuucuccgacgacauagaacaacaagcagacaauaugaucacagaaaugcuacagaaagaauacauggaacgccaggggaagacaccccuaggccuagucgaccucuucgucuucuccaccuccuucuaccuaaucucaaucuucuuacaccucaucaaaauccccacacaccgccacauagucggcaaaccaugcccuaaaccgcaccgccucaaccacauggguaucugcucuugcggccucuacaaacagcccggcguaccagucaaguggaaacguuaa

SEQ ID NO: 2208 - RNA, 1476 nt, Artificial Sequence
  derived and/or modified protein sequence (opt11) from LASV(G1792-SLE-2011;Clade IV)__AIT17208__GPC
augggccaaaucgucacauucuuccaagaagucccacacguaauagaagaaguaaugaacaucguccugaucgcccucuccauacucgccguccucaaaggucucuacaacuucgcaaccugcggccucauaggccucguaaccuuccuccuccuaugcggccgcuccugcacaaccucccucuacaaaggagucuacgaacuacaaacccuagaacuuaacauggaaacccucaacaugaccaugccccuaucgugcaccaaaaacaacucacaccacuacaucauggucggcaacgaaacaggucucgaacucacccuuaccaacaccuccauaaucaaccacaaauucugcaaccucuccgacgcccacaagaaaaaccucuaugaucacgcacucaugucaauaauauccacuuuccaccuaucaauccccaacuucaaccaauacgaagccauguccugcgacuucaacggaggaaaaaucuccguccaauacaaccuaucccacucuuacgccggcgaugcagccaaccacugcggcaccgucgcaaacggcguccuccaaaccuucaugcgcauggccuggggcggcuccuacauagcccucgacucaggccgcggccaaugggacuguaucaugaccucauaccaauaccuaaucauacaaaacacaaccugggaagaccacugccaauucucccgccccucucccaucggcuaccucggccuccuaucccaacgcacccgagauaucuacaucucccggcgucuccuuggaaccuucaccuggacgcuauccgacucagaggguaaagacacucccggaggcuacugccucacccgcuggaugcuaaucgaagccgagcucaaaugcuucggcaacacagccgucgcgaaaugcaacgaaaaacacgacgaagaguucugcgacaugcuccgccucuucgacuucaacaaacaagcuauccaacgccucaaagccgaagcacaaaugagcauacaacucauaaacaaagcagucaacgcacucaucaacgaccaacucauaaugaagaaccaccuacgcgacauuauggggaucccauacugcaacuacagcaaauacugguaccuaaaucacaccaccaccggaaaaaccucccuuccaaaaugcuggcuaguaagcaacggcuccuaccuaaacgaaacccacuucucggacgacauagaacaacaagccgacaacaugaucacagaaaugcuccaaaaagaauacauggagcgccagggcaagacgccccuaggccucguagaccuguucguauucucaaccuccuucuaccucaucuccaucuuccuccaccucguaaaaauucccacccaccgccacaucgucggcaaaucaugccccaaaccccaccgccucaaccacaugggaaucugcagcugcggccucuacaaacaacccggcguacccgucaaauggaaacgcuaa

SEQ ID NO: 2209 - RNA, 1476 nt, Artificial Sequence
  derived and/or modified protein sequence (opt11) from LASV(G1897-SLE-2011;Clade IV)__AIT17210__GPC
auggggcaaaucgucaccuucuuccaagaaguaccccacgucauugaagaagucaugaacaucguacucaucgcccucucuauccucgccguacuaaaaggccucuacaaccucgccacaugcggccucgucggucucgucacuuuccuccuccucugcggccgcucaugcaccaccucccucuacaaaggcguauacgaacuccaaacccucgaacucaacauggaaacccucaacaugaccaugccgcucuccugcaccaaaaacaacucccaccacuacaucauggucggcaacgaaacuggccuagaacucacccucaccaacaccuccaucaucaaccacaaguucugcaaccuauccgacgcccacaaaaagaaccuauacgaccacgcccuaaugagcaucaucuccaccuuccaccuaucaauaccuaacuucaaccaauacgaagccauguccugcgacuucaacggcgggaaaaucucuguccaguacaaccucucacacucauaugcaggagacgccgccaaccacugcgguacugucgccaacggcguccuacaaacauuuaugcgcauggccuggggcggauccuacauagcacucgacucaggacgcgaccgcugggacugcaucaugaccuccuaccaauaccucaucauacagaacaccaccugggaggaccacugccaauucucacgccccuccccuaucggcuaccucggccuccucucccaacguaccagggacauauacaucucccgacgacugcugggcaccuucaccuggacccuaucugacuccgaaggaaaagacacccccggagguuacugccugacccgauggaugcuaauagaagccgagcuaaaaugcuucgggaauaccgccgucgccaaaugcaacgaaaaacacgacgaagaguucugcgacaugcuaaggcuguucgacuucaacaaacaagcaauccagcgacugaaagccgaagcacaaauguccauacaacucaucaauaaagcugucaacgcccucaucaacgaucagcuaauaaugaaaaaccaccuccgugacaucaugggcauccccuacugcaacuauucaaaauacugguaccucaaccacacuaccaccggcaaaaccucacuacccaagugcuggcuaguuaguaacggcucauaccuaaacgaaacccacuucucagacgacaucgaacagcaagccgacaacaugaucacagaaaugcuccaaaaagaauacauggaaagacaaggaaaaaccccacuaggccuggucgaccucuuugucuuuuccaccuccuuuuaccucaucagcaucuuccuccgacucguaaaaauccccacccaccgccacaucgucggcaaacccugcccaaaaccccaccgacuaaaccacauggguaucugcuccugcggacucuacaaacagccaggcguccccguaaaguggaaacgcuaa

SEQ ID NO: 2210 - RNA, 1476 nt, Artificial Sequence
  derived and/or modified protein sequence (opt11) from LASV(G1932-SLE-2011;Clade IV)__AIT17212__GPC
augggccaaaucguaacauucuuucaagaaguaccacauguaauagaagaagucaugaacauaguccucaucgcccucuccauccuugccguccucaaaggccucuacaaccuagcuaccugcggacucgucggccucguaaccuuccuacuccuuugcggccgcuccugcaccacaagccuauacaaaggcgucuacgaacuccagacacuagaacucaacauggaaacacuaaacaugaccaugccccuaucuugcaccaaaaacaacucccaccacuacaucauggucggaaacgaaaccggacucgaacuaacacucaccaacaccuccaucaucaaccacaaguucugcaaccucuccgacgcccaccgcaaaaaccucuacgaccacgcccuaaugucuaucauaagcacauuccaccuaucuauccccaacuucaaccaauacgaggccauguccugcgacuucaacggaggcaagaucucuguacaauacaaccucagccacucauacgccggagacgcagcaaaucacugcggcaccguugcaaacggcguccuccaaacuuucaugcgcauggcauggggaggcuccuacaucgcccucgacuccggacgcgggaagugggacugcaucaugaccucauaccaauaccuaauaauacaaaauacuaccugggaagaccacugccaauucucuagaccaucacccaucggcuaccucggacuccucucucaacgcacacgcgacauauacaucucccgacgccuacuaggcaccuucaccuggacacuaucagacuccgaaggcaaagacacacccggcggauacugccucacccgcuggaugcucaucgaagccgaacuuaaaugcuucggcaacaccgcagucgcaaaaugcaacgaaaaacacgacgaagaguucugcgacaugcuccgccuauucgacuucaacaaacaggccauacagcgccucaaagcagaagcccaaaugucaauccaacucaucaacaaagcggucaacgcccucaucaacgaccaacucaucaugaaaaaccacuuacgcgacaucaugggcauccccuacugcaacuauuccaaauacugguaccuuaaccacaccaccaccggcaaaaccucccuaccccgcugcuggcucguauccaacggcuccuaccucaacgaaacacacuucuccgacgauaucgaacaacaagccgacaacaugaucacugaaaugcuccaaaaagaauacauggaacgccaaggcaaaacaccccuaggccuaguagaccucuucgucuucuccaccucuuucuaccucauauccauauuccuccaccucguuaaaauccccacccacagacacaucgucggcaagccuugcccaaaaccccaccgccucaaucacauggguaucuguucuugcggccuauacaaacaacccggcguuccagucaaauggaaacgcuaa

SEQ ID NO: 2211 - RNA, 1476 nt, Artificial Sequence
  derived and/or modified protein sequence (opt11) from LASV(G1959-SLE-2011;Clade IV)__AIT17216__GPC
augggccaaaucguaaccuucuuccaagaagucccccacgugaucgaagaaguaaugaacaucguccucaucgcacucaguauccuagcaguccuaaaaggccuauacaacuucgcaaccugcggacucgucggccuagucaccuuccuucuacucugcgggcgcuccugcacaaccucccucuacaaaggcguauacgaacuccagacccucgaacuaaacauggaaacccuaaacaugaccaugccacuauccugcaccaaaaacaacucccaccacuacauaauggucggcaacgaaaccggccuugaacuaacacucaccaacacauccaucaucaaccacaaauucugcaaccucagcgacgcccacaagaaaaaccucuacgaccacgcccuaauguccaucauauccaccuuccaccucucaauccccaacuucaaccaguacgaagcgauguccugcgacuuuaacggcggcaaaaucuccguccaauacaaccucucccacuccuacgcaggcgacgccgcaaaccacuguggaacuguagccaacggaguccuccaaacauucaugcgcauggccuggggaggcuccuacauagcacuagacagcggacacggacgaugggacugcaucaugaccuccuaccaauaccucauaauccaaaauacaacaugggaagaccacugccaauucucccgaccaagccccaucgguuaccucggccuucucucccaacggacccgcgauaucuacauaucacgucgacuccucggaaccuucaccuggacacucuccgacuccgagggcaaagacacacccggcggcuacugccucacucgcuggaugcuaauagaagccgaacucaaaugcuucggaaacaccgccguagccaaaugcaacgaaaaacacgacgaagaauuuugcgauaugcuccgccucuucgacuucaacaaacaagccauccaacgccucaaagccgaagcccagauguccauacagcuaaucaacaaagccgucaacgcacucaucaacgaccagcucaucaugaaaaaucaccuccgcgacauuaugggcaucccauacuguaacuacucaaaauacugguaucucaaccacaccaccaccggcaaaaccucccucccaaaaugcuggcucgucuccaacggcuccuaccucaaugaaacccacuucagcgacgacaucgaacagcaagccgacaacaugaucaccgaaaugcuacaaaaagaauacauggaacggcaaggcaaaacaccccucggccucguugaccuguucguauucucuaccagcuucuacuuaaucuccaucuuccuccaccuuguaaagauucccacucaccgccauaucgucggcaaacccugccccaaaccucaccgacucaacuacaugggaaucugcuccugcggccucuacaaacaaccaggcguacccguccgauggaaacgcuaa

SEQ ID NO: 2212 - RNA, 1476 nt, Artificial Sequence
  derived and/or modified protein sequence (opt11) from LASV(G2141-SLE-2011;Clade IV)__AIT17224__GPC
augggccaaauagucacauucuuccaagaagucccccacguaauagaagaagucaugaacauaguacucaucgcccuauccauccuugccguccucaaaggucuauacaacgucgcaacaugcggccuaauaggccucgucaccuuccuccuacucugcggccgauccuguaccacaacccucuacaaaggagucuacgagcuacaagcccucgaacucaacauggaaacacucaacaugaccaugccucucuccugcaccaaaaacaacagccaccacuacauccgcgucgguaacgacacaggacucgaacuaacccucaccaacaccuccaucauccaacacaaguucugcaaucuauccgacgcccacaaaaagaaccuuuaugaccacacccucauguccaucaucuccaccuuccaccucucaauacccaauuucaaccaguacgaagccauguccugcgacuucaacggcggcaagaucuccguccaguacaaccucucacacuccuaugcaggagacgccgccucacacugcggcaccgucgccaacggaguccuccagaccuucaugcgcauggccuggggaggcuccuacaucgcccucgacuccggacgcggaaacugggacugcaucaugaccuccuaccaauaccucaucauccaaaacacuaccugggaggaucacugucaauucucccgccccuccccaauuggcuaccuuggccuccucucacaacgcacccgcgacauauacauaucccgucgccuccucggaaccuucacauggacccuauccgauuccgaaggccgcgacacaccaggcggcuacugccucacccgauggaugcucaucgaagccgaacugaaaugcuucggcaacaccgcagucgccaaguguaacgaaaaacacgacgaagaguucugcgacaugcucagacuauucgauuuuaacaaacaagccauccaacgccucaagaccgaagcacaaauguccauccaacucaucaacaaagcagucaacgcacuaaucaacgaccagcucauaaugaaaaaccaccuccgugacaucaugggcauccccuacugcaacuacuccaaguacugguaccuaaauaacacgaucaccggcaaauccucccuccccaaaugcuggcucguauccaacggcuccuaucuuaacgaaacacacuucuccgaugauaucgaacaagaagccgacaacaugaucaccgaaaugcuucaaaaagaauacauggaacgacaaggcaaaacaccccucggccucguagaccucuuuguuuucuccaccucauucuaccuaaucuccaucuuccuccaccuugucaagaucccaacccaccgccauaucguaggcaaaccaugccccaaaccacaccgccucaaccacaugggcgucugcuccugcggacucuacaaacaacccggagucccaguccgcuggaagcgauaa

SEQ ID NO: 2213 - RNA, 1476 nt, Artificial Sequence
  derived and/or modified protein sequence (opt11) from LASV(G2147-SLE-2011;Clade IV)__AIT17228__GPC
augggccaaauaguaaccuucuuccaagaagucccacacgucaucgaagaagugaugaacauuguccuaaucgcacucuccauccucgccguccucaagggacucuacaacuucgcaaccuguggccucguuggccuacucaccuuccuccugcucugcggccgaagcugcacaaccucucuauacaaaggcguauaugaacuccaaacacucgaacuaaacauggaaacccucaacaugacuaugccccuauccugcaccaaaaacaacagccaccacuacaucauggucggcaacgaaacaggccuagaacuaacccucacuaacacaagcaucaucgaccacaaauucugcaaccuguccgaugcccacaagaaaaaccucuacgaccacgcccucaugucaauaauaagcaccuuccaccucagcaucccuaacuucaaccaauacgaagccauguccugcgacuucaacggcggcaaaaucucaguccaauacaaccucucccacucguacgccggagacgccgccaaccacugcggcaccgucgccaacggcguacuccaaacauucaugcgaauggccuggggcggcaguuacauagcacucgacuccggccgcggcgggugggacugcauaaugaccuccuaccaauaccuaauuauccaaaacacuaccugggaagaccacugccaauuuucccgcccuucccccaucggcuaccucggccuacuuucacaacgcacccgcgacaucuacaucucccgacgacuccucggaacauucaccuggacccucucggacucagaaggcaaagacacaccaggcggcuacugucuaacgcgcuggaugcucauagaagcagaauuaaaaugcuucggaaacacagccgucgccaaaugcaacgaaaaacacgacgaagaguucugcgacaugcuccgccuauucgacuucaacaaacaagcaauucaacgacucaaagcagaagcccaaauguccauacaacucaucaacaaagccgucaacgcacucaucaacgaccaacucaucaugaaaaaccaccuccgagacaucaugggcauacccuacugcaacuacucgaaauacugguaucucaaccacaccaccaccgguaaaaccucccuccccaaaugcuggcucguuuccaauggauccuaccuaaaugaaacccacuucagcgaugacaucgaacaacaagcggacaacaugaucaccgaaaugcuccaaaaagaauacauggaacgccaaggcaaaacgccccucggccucgucgaccucuucgucuuuucgaccuccuucuaccucaucuccaucuuccuacaccugguaaaaauccccacccaccgacacaucgucgguaaauccugcccaaaaccccaccgucucaaccacaugggaaucuguuccugcggccucuacaagcaaccaggcguccccgucaaguggaaacgcuaa

SEQ ID NO: 2214 - RNA, 1476 nt, Artificial Sequence
  derived and/or modified protein sequence (opt11) from LASV(G2165-SLE-2011;Clade IV)__AIT17232__GPC
augggccaaaucgucaccuucuuccaagaagucccacacgugaucgaagaagucaugaacauaguccucaucgcccucagcauacucgcaguccucaaagggcuauacaacuucgcgaccugcggccucgucggccuagucaccuuccuccuacuaugcggacgcucgugcaccacaucucuauacaaaggcguauacgaacuccaaacccucgaacuaaacauggaaacccucaacaugacaaugccccuauccugcaccaaaaacaacucucaccacuacauccgagucggaaacgaaacuggacucgaacucacacucacaaacaccuccaucaucaaccacaaauuuugcaaucugucagacgcacacaagaaaaaccuuuacgaccacgcccucaugagcaucaucuccaccuuccaccucuccauccccaauuucaaccaguaugaagccauguccugcgacuucaacgaaggaaaaaucagcguccaauacaaccuaucacacuccuacgcaggagaugccgccaaccacugcggcaccgucgccaacggcguccuucagacuuucaugcgcauggccuggggcggcucauacaucgcgcuagacuccggccgaggaaaaugggacuguaucaugaccuccuaccaauaccuaaucauacaaaacaccaccugggaagaccacugccaauucucacgccccucccccaucggcuaccuaggacuacugucacaacgcacacgcgacaucuauaucucccgccgccuacuaggcaccuucaccuggacacucuccgacuccgaaggcaaagacacaccuggcggcuacugccucacccgauggaugcuaauagaagccgagcuuaaauguuucggaaacacggccguagcaaaaugcaacgaaaagcacgacgaagaguucugcgacaugcuccgacucuucgacuucaacaaacaggccaucgaaaggcucaaagcagaagcccaaaugucaauacaacuaaucaacaaagcagucaacgcgcuuaucaacgaccaacucaucaugaaaaaccaccuccgcgacaucaugggcaucccauacugcaacuacucaaaauacugguaccuuaaccacaccaccaccggaaaaaccucccucccuaaaugcuggcucguuagcaacggcuccuaccuaaacgaaacccacuucuccgacgacaucgaacaacaagcagacaacaugaucaccgaaaugcuacagaaagaauacauggaacgccaaggcaaaacaccccuaggacugguagaccucuucgucuucuccaccuccuucuaccucauauccaucuuccuccacuuagucaaaauccccacccaccgacacauagucggaaaaucuugcccaaaaccacaccgccucaaccacaugggcaucugcucuugcggucuuuacaaacagcccggcguccccgucaaauggaaacgcuga

SEQ ID NO: 2215 - RNA, 1476 nt, Artificial Sequence
  derived and/or modified protein sequence (opt11) from LASV(G2184-SLE-2011;Clade IV)__AIT17236__GPC
augggccaaaucgucaccuucuuccaagaagucccccacgucaucgaagaagucaugaacaucguccuaaucgcccuuucuauccucgcuguucucaaaggacucuacaacuucgccacaugcggccucgucggccuagucacauuccuccuccuaugcggacgauccugcacaaccucucucuauaaaggagucuacgaacuccagacacucgaacugaauauggaaacccucaacaugaccaugccacuauccugcaccaaaaacaacucacaccauuacaucauggucggaaacgagaccggccucgaacucacccucacaaacaccucgauaaucaaccacaaauucugcaaccucuccgacgcccacaagaaaaaccucuacgaccaugcccucaugucuauaaucuccacauuccaccuuuccauccccaacuucaaccaauacgaagcaauguccugcgacuucaacggcggccgcaucuccguccaauacaaccuaucccacuccuacgcuggagaagccgccaaccacugcggcacgguagccaacggaguccuacaaaccuucaugcgcauggcauggggcggcaguuacaucgcucucgacuccggccgaggcaaaugggacugcaucaugaccucguaccaguaccucaucauucaaaacacuaccugggaagaccacugccaguucucccgacccagcccaauuggauaccuaggccuacucucccaacgcacccgagacauauacaucucucgccgccuccucggcaccuucaccuggacccucuccgacuccgagggcaaggacacacccggcgguuacugccuaacccgauggaugcucauagaagccgaacucaaaugcuucggaaauacggcagucgccaaaugcaacgaaaaacacgacgaagaguucugugacaugcuacgccucuucgauuucaacaaacaggcaauccaacgccucaaagcagaagcacaaauguccauucaacuaaucaacaaagccgucaacgcacugaucaacgaccaacucaucaugaaaaaccaccuacgcgacauaaugggcauucccuacugcaacuacucucgcuacugguaccucaaccacaccacuaccggaaagaccucgcuucccaaaugcuggcucguguccaauggauccuaccucaacgaaacacacuucuccgaugacaucgaacaacaagccgacaacaugauaaccgaaaugcuacaaaaagaauacauggaacgccagggcaaaacaccccuaggacuggucgaucucuucgucuucucuaccucauucuaccuaauuucuaucuuccuccaccucguaaaaaucccaacucaccgacacauagucggaaaguccugccccaaaccccaccgacucaaccacaugggcauaugcuccugcggccuauacaaacagccaggaguccccgucaaauggaaacgcuaa

SEQ ID NO: 2216 - RNA, 1476 nt, Artificial Sequence
  derived and/or modified protein sequence (opt11) from LASV(G2197-SLE-2011;Clade IV)__AIT17240__GPC
augggccagaucgucaccuucuuccaagaagucccccaugucaucgaagaaguaaugaacauaguacucaucgcccucuccauucucgccguccucaaaggccucuacaaccucgcaaccugcggccuagucggccucgucaccuuucuccuccuaugcggccgcucaugcaccaccagccucuacaaaggcuucuaugagcuccaaacccuugaacucaacauggaaacccucaacaugaccaugccccucagcugcaccaaaaacaacucccaccacuacauccgcgucggcaacgaaacuggccucgaacucacccuaaccaacacauccauaaucgaccacaaauucugcaaccucagcgacgcccacaagaaaaacuuauacgaccacgcccuaauguccaucauuagcaccuuccaccucuccauacccaacuucaaccaauaugaagcuauguccugcgacuuuaacggcggcaaaaucuccguccaguacaaccucagucacagcuacgccggagaugcugcaaaccacugcggcaccgucgccaauggcguccuccaaaccuucaugcgcauggccuggggcggcuccuacaucgcccuagacuccggcagaggacgaugggacugcaucaugacaucauaccaauaccucaucauccaaaacacaaccugggaagaucacugucaauucucccgcccuucccccaucggcuaucucggccuccuaucccagaaaacccgugacaucuacaucucccgacgacuacucggcacauucaccuggacccucuccgacucugaaggaaaagacacccccggcggcuacugccuaacacgcuggaugcucaucgaggccgaacuaaaaugcuucggaaacacagcaguagcaaaaugcaacgagaaacacgacgaagaguucugcgacaugcuccgccuauucgacuucaacaaacaagccauccaacgccuaaaagcagaagcacaaauguccauacaacucaucaacaaagccguaaaugcccucauuaaugaccaacucaucaugaaaaaccaccuccgagacaucaugggcauuccauacugcaacuacucuaaauacugguaccucaaccacaccaccaccggcaaaaccucacuccccaaaugcuggcuagucucaaacggaucauacuuaaacgaaacccacuucucagaugacaucgaacaacaggccgacaacaugaucacagagaugcuacagaaagaauacauggaacgccaaggcaaaacaccccuagggcucguagaccucuucgucuucuccaccuccuucuaccuaaucucaaucuuccuacaccuaguuaaaaucccgacccaccgacacauugucgguaaaucaugccccaaaccccaccgacucaaccacaugggcaucugcuccugcggccuauacaaacagcccggcguccccgucaaauggaaacgcuga

SEQ ID NO: 2217 - RNA, 1476 nt, Artificial Sequence
  derived and/or modified protein sequence (opt11) from LASV(G2222-SLE-2011;Clade IV)__AIT17244__GPC
augggccaaauugucaccuucuuucaagaagucccccacgucauugaagaaguaaugaacauaguacucaucgcccuuuccauccuagccguacuaaaaggccucuacaaccuggccacaugcggccucgucggccucgucaccuucuuacuacucugcggccgauccugcacuacuaaccucuacaagggaguuuacgaauuacagacccuagaacucaacauggagacgcucaacaugaccaugccccucuccugcaccaagaacuccucacaccacuacauccgggucggcaacgagacaggacucgaacuaacccucacaaacaccuccaucaucgaccacaaauucugcaaccucuccgaugcccacaagaaaaaccucuacgaccacgcccucaugucaauaaucuccaccuuccaccuauccauccccaacuucaaccaauacgaagcaauguccugcgacuucaacggcggaaaaauaaguguccaauacaaccucucucacuccuacgucggagacgcugcggaccacugcggcaccgucgccaacggcguccuccaaaccuucaugcgcauggcauggggcggcuccuacauagcacuagacucaggccgcggcaaaugggacugcaucaucaccucauaccaauaccucaucauccaaaacaccaccugggaagaccacugccaauucucccgcccaucccccauaggcuaccucggccugcucucccaacgaacacgcgacauauacauauccagacgccuauuaggcacuuucaccuggacccucuccgacuccgaaggcaaagacaccccagggggcuacugccuaacccgcuggaugcuaauugaagccgaacuaaaaugcuuugguaacacagcaguagccaaaugcaacgagaaacacgacgaagaguucugcgacaugcuacgacuuuucgacuucaacaaacaagccauacaacgccucaaagcggaagcccaaauguccauccaacuaaucaacaaagccgucaacgcacuuaucaacgaccaacucauaaugaaaaaccaucuccgcgacaucaugggcauuccauacugcaacuacucaaaauacugguaccuuaaccacaccaucacuggcaaaaccucccucccccgaugcuggcucgucuccaacggcucauaccuaaacgaaacccgcuucuccgacgacaucgaacaacaagccgacaacaugaucaccgaaaugcuccaaaaagaauacauggaacgccaaggcaaaacuccccuuggccucguggaccuauucgucuucuccaccagcuucuaccucaucucaaucuuccuccaccucgucaaaauaccuacccaccgccacaucgucgggaaacccugccccaaaccacaccgacucaaccacaugggcaucugcagcugcggacuauacaaacaacccggggucccagucaaguggaaacgauaa

SEQ ID NO: 2218 - RNA, 1476 nt, Artificial Sequence
  derived and/or modified protein sequence (opt11) from LASV(G2230-SLE-2012;Clade IV)__AIT17246__GPC
augggacaaauugucaccuucuuccaagaagucccccacgucaucgaagagguaaugaacaucguccuaaucgcacuaucacuacucgccgugcucaaagggcucuacaacgucgccaccuguggacucaucggacuaauaacauucuuacuccucugcggccgcuccugcaccaccaaccucuacaaaggcguauacgaacugcaaacacucgaacucaacauggaaacccucaacaugaccaugccccucuccugcaccaaaaacuccucccaccacuacauaauggucggaaacgagacagggcucgaacucacucucacgaacaccuccauaaucaaccacaaauucugcaaccucuccgacgcccacaagaaaaacuuauacgaccacacccuaauguccaucauaucaaccuuccaccucucaauaccaaacuucaaccaauacgaggcaauguccugcgacuucaacgguggaaaaaucuccguacaauacaaccucucccacucuuacgccgucgacgccgccaaccacugcggcaccgucgcuaacggcauccuccaaaccuucaugcgcauggccuggggcggguccuacaucgcccucgacuccggacgcggcaacugggacugcaucaugaccuccuaccaguaccugaucauccaaaacaccaccugggaagaccacugccaguucucccgacccucacccauuggcuaucuaggccuacucucccaacgaacccgcgacaucuacaucucccggcgccuccucgggaccuucaccuggacacucagcgacagugaaggaaacgacacccccggaggcuacugccucacccgauggaugcuuaucgaagcugagcucaaaugcuucggcaauacagccguagccaaaugcaacgaaaaacacgacgaagaguucugcgacaugcuccgccucuuugacuucaauaaacaagccauccaacgccucaaagccgaagcccaaaugagcauacaacuaaucaauaaagccgucaacgcccuaaucaacgaccaacucaucaugaaaaaccaucuccgcgacauaaugggcauaccuuacugcaacuacuccaaauacugguaccucaaccauaccaccacgggaaaaacaucccuaccaaaaugcuggcucgucuccaacggcuccuaccuaaacgagacccacuucucagacgacaucgaacaacaggccgacaacaugaucaccgaaaugcuacaaaaagaauacauggaaagacaagguaaaacaccccucggccuaguugaucucuucguauucagcaccuccuucuaccuaauauccaucuuucuucaccucgucaaaauacccacacaccgacacaucgucggaaaaccaugccccaaaccucacaggcucaaccacaugggaaucugcucuugcggacucuacaaacagcccggcgucccaguccgcuggaaacguuaa

SEQ ID NO: 2219 - RNA, 1476 nt, Artificial Sequence
  derived and/or modified protein sequence (opt11) from LASV(G2259-SLE-2012;Clade IV)__AIT17250__GPC
augggccaaaucgucacauucuuccaggaagucccucacguaauagaagaagucaugaacaucguccuaaucgcucucucccuccucgccguccucaaaggccucuacaacgucgcaacaugcggccucaucggccuugucaccuuccuccuccucugcggacgaucaugcaccaccaaccucuacaaaggagucuaugaacuccaaacacucgaauuaaacauggaaacccuaaacaugaccaugccccucuccugcacuaaaaacaacucccaccacuauauaaugguagguaaugaaacaggccucgagcucacccucacaaacacguccauaauaaaccacaaauucugcaaccuauccgaugcccacaagaaaaaccuuuacgaccacacacucaugucuaucauauccaccuuccaccucagcauccccaacuucaaccaauacgaagcaaugucaugcgacuucaacggcgguaaaauauccguacaauacaaccucagccacuccuacgccguagacgcagccaaccacugcggcacggucgcuaacggaguccuccaaaccuucaugcgcauggccuggggcggaagcuacauagcccucgacucuggacgcggaaacugggacuguaucaugaccuccuaccaauaccugaucauccaaaacaccaccugggaagaccacugccaauucucacgccccagccccauuggcuaccucggccuccucucacaacgaacccgagacaucuacaucucccgccgccuacucggaaccuucaccuggacccuauccgacuccgagggcaacgacacacccggcggauauugccucacccgcuggaugcucauugaagccgaacucaaauguuucgguaacacagccgucgccaaaugcaacgaaaaacacgacgaagaguucugcgacaugcuccgccucuucgacuucaacaaacaagccauccaaagacucaaagcagaagcccaaaugagcauccaacuaaucaacaaagccgucaacgccuuaaucaacgaccaacucaucaugaaaaaccaucuccgcgacauaaugggcaucccauacugcaacuacuccaaguacugguaccuaaaccacacaacaaccggaaaaacaucccuaccaaaaugcuggcuagucuccaacggcucauaccucaacgaaacccacuucucugacgacauagaacagcaagccgacaacaugaucacagaaaugcuacagaaagaauacauggaacgacaaggcaaaacaccacuaggccucgucgaccucuucgucuucaguacauccuucuaccuaaucucgaucuuccuccaccucgucaaaauccccacccaccgccacauaguuggcaaaccaugcccaaaaccucaccgccucaaccacaugggcaucugcuccugcggacucuacaaacagcccggcguccccguccgcuggaaacgcuaa

SEQ ID NO: 2220 - RNA, 1476 nt, Artificial Sequence
  derived and/or modified protein sequence (opt11) from LASV(G2263-SLE-2012;Clade IV)__AIT17254__GPC
augggccaaauagucaccuucuuccaagaggucccccacgucauagaagaagucaugaacauaguacucaucgcccucuccauccuagcaguacuaaaaggccucuacaacuucgcuaccugcggcaucgucggacucgucacauuccuacuacugugcggacgaagcugcaccaccagccucuacaaaggaguauacgaacuccaaacccucgaacucaacauggagacacucaacaugacaaugcccuuaucaugcaccaaaaacaacucccaccacuacaucauggucggcaacgaaaccggccuugaacucacccucaccaauaccucuaucaucaaccacaaauucugcaaccucucagacgcacacaagaaaaaccuuuacgaccaugcccuaauguccaucaucuccaccuuccaccucuccauacccaacuucaaccaauacgaggccauguccugcgacuucaacggaggaaaaauaucuguccaauacaaccucucccacuccuacgcaggcgacgccgcaaaccacuguggcacagucgccaacggcguccuccaaaccuucaugcgcauggccuggggcggcucauacaucgcccucgacuccggccgagaccgcugggacugcauuaugaccuccuaucaauaccucaucauacaaaacaccaccugggaagaccacugccaauucucccgacccucccccaucggcuaccucggacuacucucccaacguacccgcgacaucuauaucucucgacgccuccuagggacauucaccuggacccuuucagacuccgaaggcaaaaacacccccggcggauacugccuaacccgcuggaugcucaucgaagccgaacucaaaugcuucggcaacacagcaguagccaaauguaacgaaaaacacgacgaagaguucugcgacaugcuccgccucuucgacuucaacaaacaggccauacaacgccucaaagccgaagcacaaauguccauuuccuuaauuaacaaagccgucaacgcccucauaaaugaccaacuaauaaugaaaaaccaccucagagacaucaugggcauccccuacuguaacuauuccaaauacugguaccucaaccacacuaccaccggcaaaacuucccucccacgaugcuggcucgucuccaacgguucauaccucaacgaaacccacuucucagacgacaucgaacaacaagccgacaacaugaucacagaaaugcuccaaaaagaauacauggaccgccaaggcaaaacuccacucggucucgucgaccuauucguauucagcaccucuuucuaccucauuuccaucuuccuccaccuugucaaaauccccacacaccgccauaucgucggcaaaaccugcccuaaaccgcaccgccuaaaccacaugggaaucugcagcugcggccucuacaaacaacccggcgucccagucaaauggaaacgauaa

SEQ ID NO: 2221 - RNA, 1476 nt, Artificial Sequence
  derived and/or modified protein sequence (opt11) from LASV(G2280-SLE-2012;Clade IV)__AIT17258__GPC
augggacaaaucgucacuuucuuccaggaagucccccacgucaucgaagaagucaugaacaucguccucaucgcccuauccauccuagccguccuaaaaggccucuacaacaucgcaaccugcggacucguuggacuggucacauuccuacuacuauguggccgauccugcacaaccucccucuacaaaggugucuacgaacuccaaacccuagaacucaacauggaaacccugaauaugaccaugccccucuccugcaccaaaaacaacucucaccacuacaucauggucggcaacgaaaccggccucgaacucacacucaccaauaccucuaucaucaaccacaaauucugcaaccugucagacgcccacaagaaaaaucucuacgaccacgcccucaugagcaucgucucuaccuuccaccuaagcaucccaaacuucaaccaauacgaagccaugucaugcgacuucaacggcggcaaaaucagcguacaauacaaucucagccacuccuacgccgucgacgccgccaaccacugcgguaccgucgccaacggcguccuacaaacguucaugcgcauggccuggggcggcucauauaucgcccucgacuccggacgaggcggcugggacugcaucaugaccucauaccaauaccucaucauacaaaacgucaccugggaagaccacugccaauucucucgccccucccccaucggcuaccuuggccuacucucacaacguacacgagacgucuauauaucccgacggcuccugggaacauucaccuggacccucuccgacucagaaggcaacgacaccccaggaggauacugcuuaacccgcuggaugcucaucgaggccgaacuaaaaugcuucggcaacaccgccgucgccaaaugcaacgagaaacacgacgaagaguucugcgacaugcuccgucucuucgacuucaacaaacaagcgauacaacgacucaaagcagaagcccagauguccauacaacucaucaacaaagccguaaacgcccucaucaacgaccaacuaauaaugaaaaaccaccuacgagacaucaugggcauccccuacugcaacuacuccaaauacugguaccucaaccauaccaccacaggcaaaacaucccuccccaaaugcuggcucgucagcaacggcuccuaccucaacgaaacccacuuuagcgacgacaucgaacaacaagccgauaacaugauaaccgaaaugcuacaaaaagaauacauggaacgccaaggaaaaacaccccuaggccucgucgaccuauucguauucuccaccuccuucuaccucaucuccaucuuccuacaccucgucaaaauacccacccaccgacacauaguaggcaaaccaugccccaaaccccaccgacucaaucacaugggcaucugcagcugcggacuauacaaacagccaggcguaccugucaaauggaaaagauaa

SEQ ID NO: 2222 - RNA, 1476 nt, Artificial Sequence
  derived and/or modified protein sequence (opt11) from LASV(G2295-SLE-2012;Clade IV)__AIT17262__GPC
augggccaaaucgucaccuucuuccaagaagucccucacgucauugaagaaguaaugaacaucguccucaucgcucucucaauccucgcuguccuaaaaggacucuacaaccucgccacuugcggucucgucggccuaguaaccuuucuccuccucugcggccguucaugcacgaccucccucuacaaaggugucuacgaacuacaaacacuagagcucaacauggaaacccucaacaugaccaugccccuaucuuguaccaaaaacaacucucaccacuacaucauggucggcaacgaaacuggccucgaacucacgcucaccaacaccagcaucaucaaccacaaauucugcaaccucuccgacgcucacaagaaaaaccucuacgaucacgcccucaugucuaucaucagcaccuuccaccucuccauccccaacuucaaccaauacgaagcaaugucaugcgacuucaacggugguaaaaucuccguucaauacaaccucagccacagcuacgccggcgacgcagccacccacugcggcaccgucgcaaacggcguccuccaaaccuucaugcgaauggcuuggggaggcuccuacaucgcccucgacuccggccgcggcaaaugggacugcauaaugaccucguaccaauaccuaaucauccagaacaccacaugggaagaccacugccaauucucacgccccucacccaucggcuaccuaggccuacucucacaacgaacccgagacauauacauaucccgccgacuacucgggacauucacuuggacccucucagacuccgaaggcaaggacaccccuggcggcuacugccuaacccgcuggaugcucaucgaagcagaacucaaaugcuucggaaacaccgccgucgccaaaugcaacgagaaacacgacgaagaguuuugcgacaugcuccgccucuucgacuucaacaaacaagcaauccagagacuaaaaaccgaagcacaaaugucaauucaacuuaucaacaaagccgucaacgcacuuauaaacgaccaacucauaaugaaaaaccaucuccgcgacaucauggggauaccauacugcaacuacuccaaauacugguaccucaaccacacaaccacaggcaaaaccucccucccacgcugcuggcuaguaucgaacggcucguacuuaaacgaaacccauuucuccgacgauaucgaacaacaagccgacaacaugaucaccgaaaugcuucaaaaagaauacauggaacgccaaggcaaaacaccccucggccuagucgacuuauucguauucuccacuuccuucuaccucaucucaaucuuccuccaccucgucaaaauccccacacaccgccacauagucggcaaacccugccccaaaccccaccgacuuaaccacaugggcauuugcuccugcggccucuacaaacaaccaggcguccccgucaaauggaaacgcuaa

SEQ ID NO: 2223 - RNA, 1476 nt, Artificial Sequence
  derived and/or modified protein sequence (opt11) from LASV(G2315-SLE-2012;Clade IV)__AIT17266__GPC
auggggcaaaucgucaccuuuuuccaagaagucccccacguaauagaagaaguaaugaacauaguacucaucgcacucuccauccucgcaguacucaaaggccucuacaaccucgcaacaugcggccucgucggccucgucacuuuccuccuccucuguggacgaucgugcacaaccucacucuacaaaggagucuacgaacuacaaacacucgaacuaaacauggaaacccuaaacaugaccaugccccucuccugcaccaaaaacaacucccaucacuacaucauggucggcaacgaaaccggccucgaacucacacucaccaacacaucccucauuaaccacaaauucugcaaccuauccgacgcccauaagaaaaaccucuacgaccaugcacucaugagcaucaucuccaccuuccaccucuccauccccaacuucaaccaauacgaagccauguccugcgacuucaacggaggcaaaauauccguccaauacaaccuaucccacucauacgccgucgacgccgccaaccacugcggaacagucgccaacggcguccuacaaacauucaugcgcauggccuggggcggcuccuacaucgcccuugauagcggacgaggcggcugggacugcauaaugacuagcuaucaauaccuaaucauccaaaacaccaccugggaagaccacugucaguucucccggcccuccccuauaggcuaccucggccuacucucccaacgcacccgagacauauacaucucacgccgccuucucggcacguucaccuggacccugucagacuccgaaggcaaagacacccccggcggcuacugccucacaagauggaugcucaucgaagccgaacucaaaugcuucggaaacaccgccgucgccaagugcaacgagaaacacgacgaagaguucugcgacaugcuacgacuauucgacuucaacaagcaggccauccaacgccucaaagccgaagcacaaauguccauccaacucauaaacaaagccgucaaugcccucaucaacgaccaacucauaaugaaaaaccaccuccgcgacaucaugggcaucccuuacugcaacuacucaaaauacugguaccugaaccacaccacuacaggacgaaccucucuuccccgcuguuggcucgucuccaacggcucuuaccuaaacgaaacccacuucucugacgacauugaacaacaagcagacaacaugauaacagaaaugcuccaaaaagaauacauggaacgacaggggaagacaccccucggccuagucgaccucuucguauucuccaccuccuucuaccuaauauccauuuuccuacaccucguaaaaauccccacccaccgacacaucgucggaaaaucuugccccaaaccccaccgccuaaaccacaugggcaucugcucgugcggacucuacaagcaacccggcgucccugucaaguggaaacgauaa

SEQ ID NO: 2224 - RNA, 1476 nt, Artificial Sequence
  derived and/or modified protein sequence (opt11) from LASV(G2318-SLE-2012;Clade IV)__AIT17270__GPC
augggccaaauagucaccuucuuccaggaaguaccccacgucaucgaagaagucaugaacauagugcuaaucgcccucuccguccucgcaguccucaaaggccucuacaacuucgcaaccugcggacucguagggcuagucaccuuccuccuucuaugcggccgcuccugcuccacauccgucuacaaaggcguauacgaacuccaaacccuggaacuaaauauggaaacacugaacaugaccaugccccucuccugcaccaaaaacaacucccaccacuacaucauggucgguaacgaaaccggacucgaacuuacacucacaaacacauccaucaucaaccacaaauucugcaaccucagcgacgcccacaagaaaaaucuauacgaccacgcccucauguccaucaucuccaccuuccaccuauccauccccaauuucaaccaauacgaagccauguccugcgacuuuaacggcgguaaaaucucuguacaauacaaccuaucccacagcuacgccgucgacgccgccaaccacugcggcacgguagccaacggaguccuucaaaccuucaugcgcauggcauggggagggucuuacaucgcccucgacucuggacauggaggcugggacugcauuaugaccaacuaccaauaccuaaucauccaaaacaccaccugggaagaccacugccaauucagccgcccauccccaaucgguuaccucggccuccucagccaacgcacccgcgacauauacaucucacgccgccuucucggcaccuucacauggacccucuccgacuccgaaggcaaagacacgcccggaggcuacugccucacccgauggaugcuaaucgaagccgagcuuaaaugcuucggcaacaccgccgucgcaaaaugcaacgaaaagcacgacgaagaguucugcgacaugcugcgacuguucgacuucaacaaacaagccauccagcgccuaaaagccgaagcacaaauguccauccaacucaucaacaaagccgucaacgccuuaaucaacgaccaacucaucaugaaaaaccaccuccgcgacaucaugggcaucccguacugcaacuacagcaaauauugguaccucaaccacacaacaaccggacgcacaagucucccuaaaugcuggcuugucucaaacggaucuuaccuaaacgaaacccacuucuccgacgacaucgaacaacaagccgacaacaugauaaccgaaaugcuccaacgagaauacauggaacgccaagguaagaccccacucgggcuuguagaccucuucgucuucuccacuuccuucuacuuaaucuccaucuuccuacaccuagucaaaauacccacacaccgccacaucguagguaaauccugccccaaaccccaccgccucaaccacaugggcauaugcucaugcggccucuacaaacagcccggcgucccugucaaauggaaacgcuag

SEQ ID NO: 2225 - RNA, 1476 nt, Artificial Sequence
  derived and/or modified protein sequence (opt11) from LASV(G2363-SLE-2012;Clade IV)__AIT17274__GPC
augggacagaucgucacauucuuccaagaagucccacacgucaucgaagaagucaugaacaucguccucauagcccuauccauccuagccguccugaaaggccuauacaacgucgcuacgugcggccuuaccggccuggucgcauuccuacuccucugcgggcgcuccugcacuaccacacuauacaaaggagucuaugaacugcaagcgcuagaacucaacauggaaacccucaacaugaccaugccccucucaugcaccaaaaacaacagccaccacuacauaagagucggcaacgaaaccggacucgaacuuacgcuaacaaacaccagcauaaucgaacaccgauucuguaaccucuccgacgcccacaagaaaaaccuauacgaucacgcccuaauguccaucaucucaaccuuccaucucagcauccccaacuucaaccaguacgaggccaugucuugcgacuucaauggcgguaaaaucuccguccaauacaaccugucccauucauacgccgucgacgcagcaaaccacugcggcaccgucgccaacggcguacuccaaaccuucaugagaauggcuugggguggaucauacaucgcccuggacuccggaagaaacggaugggacugcaucaugaccuccuaccaauaccuaauaauccaaaacaccacaugggaagaccacugccaauucucacgacccagccccaucgguuaccucggccuccuaucccaacgaacacgcgacaucuacaucucgcgcagacugcuaggcaccuucacauggacacuaagcgacuccgagggaaaagacacacccggcggcuauugccucacacgcuggaugcucaucgaagcggaacucaaaugcuucgguaacacagccguagccaaaugcaacgaaaaacacgacgaagaguucugcgacaugcucagacucuucgacuucaacaagcaagccauacaaagauuaaaagccgaagcccaaaugagcauccaacuaaucaacaaagcagucaacgcucucaucaacgaccagcucaucaugaaaaaccaccuccgcgacauaaugggaauacccuacugcaacuacuccaaauacugguaccucaacaacaccgcgaccggcaaaaccagccuuccccgcugcuggcucgucagcaacggcucauaccucaacgaaacgcacuucuccgacgauaucgaacaacaagcagacaacaugaucaccgaaaugcuccaaaaagaauacauggaacgacaaggaaaaacaccccucggccucgucgaccucuucgucuucuccaccucauucuaccucaucuccaucuuccuccaccucgucaaaauaccaacacaccgccacaucgucggcaaacccugccccaaaccccacagacuaaaccacaugggcauaugcuccugcggacucuacaaacaacccggcgcaccaguccgauggaaacgcuaa

SEQ ID NO: 2226 - RNA, 1476 nt, Artificial Sequence
  derived and/or modified protein sequence (opt11) from LASV(G2384-SLE-2012;Clade IV)__AIT17276__GPC
augggacaaaucgucacauucuuccaagaagucccccacgucaucgaagaaguaaugaacaucguacuuaucgcccucagcauacucgccguccuaaaaggacucuacaacuucgcaaccugcggccuagucggccuugucaccuuucuccuccuaugcggccgcuccugcaccaccucccuauacaaaggcgucuacgaacuccaaacccucgaacucaacauggaaacccucaacaugaccaugccacucucaugcaccaaaaacaacagccaccacuacaucaugguuggaaacgaaacaggucucgaacuaacccucaccaacaccuccauuaucaaccacaaauucugcaaccucucggacgcccacaagaaaaaccucuacgaccacgcccucauguccauaaucuccaccuuucaccucuccauucccaacuucaaccaguacgaagccaugucaugcgacuucaacggaggcaaaaucuccguccaauacaaucucagccauucauacgccggggacgccgccaaccacugcggcaccgucgccaacggaguucuccaaaccuucaugcgcauggccuggggcggcucauacauagcccucgacuccggccacggaaaaugggacugcaucaugacuucauaccaauaccuaauuauacagaacaccaccugggaagaccacugccaauucucuagacccucccccaucggauaccuaggacuacuaucacaacgcacacgcgacaucuacaucucccgccgccucuuaggcacuuucaccuggacccucucagacucagaaggcaaagacacccccggaggcuauugccucacacgauggaugcucauagaggccgaacucaaaugcuucggcaacaccgcugucgccaaaugcaacgaaaagcacgacgaggaguucugcgacaugcuccgccuuuucgacuucaacaaacaagccauccaacgccucaaagcagaagcccagaugucaauccaacucaucaacaaagccgucaaugcccucaucaacgaccaacuaaucaugaaaaaccaccuccgagacaucaugggcauccccuacugcaacuacuccaaauacugguaccucaaccacaccaccaccggcaaaacaucacuuccaaaaugcuggcucguauccaacggcucauaucugaacgaaacacacuucuccgaugacaucgaacaacaagccgacaacaugaucaccgaaaugcuccaaaaagaauacauggaacgacaaggcaaaacaccccucggucuaguagaccuauucgucuucaguacauccuucuaccuaauaucuaucuuccuccaccuuguaaaaaucccaacccaccgccacauagucggcaaauccugcccaaaaccacaccggcucaaccacaugggaaucugcucgugcggccucuacaaacaaccgggcguccccguccgcuggaaaagauaa

SEQ ID NO: 2227 - RNA, 1473 nt, Artificial Sequence
  derived and/or modified protein sequence (opt11) from LASV(G2392-SLE-2012;Clade IV)__AIT17280__GPC
augggacaaaucguaaccuucuuccaagaaguaccccacgucaucgaagaagucaugaauaucguccuuauugcucucuccauccuagccguccucaaaggccucuauaacuucgcuaccugcggccucgucggacucguuacuuuccuccuccuaugcggccgaucaugcacaacaucgcucuacaagggcgucuacgaacuucaaacccucgaacucaacauggagacccucaacaugaccaugccccucucaugcaccaagaacaacucccaccacuacauccgaguugguaacgaaaccggacucgaacucacccucaccaacacuucaaucauugaccacaaguucuguaaccucagcgacgcccacaagaaaaaccuauacgaccacgcccucauguccaucaucucuaccuuccaccucagcaucccaaacuucaaccaauacgaagccauguccugcgacuuuaacggaggcaaaauauccguccaauacaaccucucccacagcuacgccggagacgccgcaaaccacugcggcacaguagcuaacgguguacuacaaaccuucaugcgaauggccuggggcggcuccuacaucgcacucgauagcggccaugaaugggacugcaucaugaccuccuaccaauaccucauaauccaaaacaccacaugggacaaccacugccaauucagccgccccucaccaaucggauaucucggccuccucucccaacgcacacgcgacaucuacaucucccgccgccuacuugguaccuucacauggacacucucugacucugaaggcaaagacacacccggcggcuacugccucacccgcuggaugcuaaucgaagcagaacuaaaaugcuucggcaacaccgcagucgcuaaaugcaacgaaaaacacgacgaagaguucugcgacaugcuaagacucuucgauuucaacaagcaagcaauccaacgccuaaaaguagaagcacaaauguccauccaacucaucaacaaagccgucaacgcauugaucaacgaccaauuaauaaugaagaaccaucuccgcgacaucaugggcaucccuuacugcaacuacuccaaauacugguaccucaaccacaccaccacaggcaaaaccucccuccccaagugcuggcucgucuccaacggcagcuaccuaaacgaaacccacuucucagacgacaucgaacaacaagccgacaacaugauaaccgaaaugcuucaaaaagaauacauggaacgccaaggcaaaacgccccucggcuuagucgaccuuuucgucuucagcaccuccuuuuaccucaucuccaucuuccuacaccucgucaaaauccccacccaccgccacaucguuggcaagagcugccccaaaccacaccgccuaaaccacaugggaauaugcagcugcggcuucuacaaacaacccggcguccccguaaaauggaaacgcuaa

SEQ ID NO: 2228 - RNA, 1476 nt, Artificial Sequence
  derived and/or modified protein sequence (opt11) from LASV(G2405-SLE-2012;Clade IV)__AIT17284__GPC
augggacaaauagucaccuucuuccaagaagucccccacguaaucgaagaagucaugaacaucguccucaucgcccucuccguccuggcaguacugaaaggccucuauaacuucgccaccuguggaaucgucggccucgucaccuuucuccuccucugcggccgcucauguacgaccucccucuacaaaggcguauacgaauuacaaacacucgaacucaacauggaaacacuaaacaugaccaugccgcuauccugcaccaaaaacaacucccaccacuacaucauggucggaaacgacaccggucuagaacucacccucacaaacaccucaaucaucaaccacaaauucugcaaccuuucagacgcccacaagaaaaaccuuuacgaccacgcgcucauguccaucauaucaaccuuccaccuuucaauccccaacuucaaccaauacgaagccaugagcugcgauuucaacggcggcaaaaucuccguacaauauaaccucucacacuccuacgcuggcgacgcugccgaccacugcgggacagucgcaaacggaguccuacaaacauucaugcguauggccugggguggcucauacaucgcccucgacagcggccgcggccgaugggacugcauaaugaccagcuaccaguaccuaaucauccaaaacaccaccugggaagaccacugccaguucucccgcccaucccccauaggcuaccucggccuacucucccaacgcacccgcgacaucuacauaucacgacgccuccucggcaccuucaccuggacacuaucagacagcgaaggcaaagacacaccaggcggcuacugccucacaagauggaugcucaucgaggcugaacucaaaugcuuuggaaacaccgccgucgccaaaugcaaugaaaaacacgacgaagaguucugcgauaugcuacgccuauucgacuuuaacaaacaagccauccagcgccucaaagccgaagcccaaaugaguauccaacucaucaacaaagccgugaacgcacuuaucaacgaccaauuaaucaugaaaaaccaucuccgcgauauuaugggaauacccuacugcaacuacucgaaauauugguaccuuaaccacaccaccacaggcaaaacaucacuucccaaaugcuggcuagucagcaacggcuccuaccuaaacgaaacacacuucucagacgacaucgaacaacaagccgacaacaugaucaccgagaugcuccaaaaagaauacauggaacgccaagggaaaacaccauuaggccuagucgaccucuucgucuucucuacauccuucuaccuaaucucaaucuuccuacaccucgucaaaauacccacucaccggcacauagucggaaagcccugccccaaaccgcaccgacucaaccacaugggcauuugcuccugcggacuuuacaagcaacccggcguccccguaaaguggaaacgcuga

SEQ ID NO: 2229 - RNA, 1476 nt, Artificial Sequence
  derived and/or modified protein sequence (opt11) from LASV(G2427-SLE-2012;Clade IV)__AIT17288__GPC
augggccaaaucgucaccuucuuccaagaagucccacacguaauagaagaagucaugaacaucguccucaucgcccucucaauacucgcagugcucaagggacucuacaacuucgcaaccugcggucucgucggccuggucacauuccuccuacuguguggccgcagcugcaccaccucacucuacaaaggagucuaugaacuccaaaccuuagaacuaaacauggagacccuaaacaugacaaugccccucuccugcaccaaaaacaacucacaccacuacaucauggucggcaacgaaacgggacuagagcucacacucaccaacacauccaucaucaaccacaaauucugcaaccuaagcgacgcccauaagaaaaaccucuacgaccacgcccuaauguccaucaucuccaccuuccaccuaucaaucccuaacuucaaccaauacgaagcaaugagcugcgacuuuaacgguggaaaaaucuccguacaauacaaccucucacauuccuacgccgucgacgcagccaaccacugcggcacugucgccaacggcguccuccaaaccuucaugcgcauggcaugggguggcggcuacaucgcccucgacagcggccgcgggaauugggacugcaucaugacaucauaccaauacuuaaucauccagaacaccacaugggaagaccacugucaauucucacggcccuccccaaucggcuaccuaggccugcuaucacagcguacacgcgacaucuacauaucacgccgccuacugggcacauucaccuggacacuguccgacucagaaggcaaagacacacccgguggcuauugccucacccgcuggaugcugaucgaagcagagcucaaaugcuucggcaacaccgccgucgcgaaaugcaacgaaaaacacgacgaagaguucugcgacaugcugcgacuuuucgacuucaacaagcaagcaauccaacgccucaaagcugaagcccaaaugagcauccaacucaucaacaaagccgucaacgcccucaucaacgaccagcuaauuaugaaaaaccaccuacgagauaucaugggaauaccauacugcaacuacucuaaguacugguaccuaaaccacaccgucaccggcaaaaccucucuccccaaaugcuggcucgucagcaacgguucauaccuaaacgaaacucacuucagcgacgacauagaacaacaagcagacaacaugaucaccgaaaugcugcaaaaagaauacauggaacgucagggaaaaacaccccuaggccucgucgaccucuucgucuucucaaccucauucuaccuaaucucaauauuccuacaccucgucaaaauccccacacaucgccacaucgucggcaaaucuugcccaaaaccccaccgacucaaccacaugggcaucugcuccugcggccucuacaaacaacccgggguccccguucgcuggaaacgguaa

SEQ ID NO: 2230 - RNA, 1476 nt, Artificial Sequence
  derived and/or modified protein sequence (opt11) from LASV(G2431-SLE-2012;Clade IV)__AIT17292__GPC
augggccaaauagucaccuucuuccaggaaguaccccacgucaucgaagaaguaaugaacauaguccuuaucgcacuauccaucauggccguacucaaaggccuuuacaacaucgccacaugcggccucgucggccuagucaccuuccuccuccuaugcggacgcuccugcaccaccacccuauacaagggcguuuacgaacuccaaacccuggaauuaaacauggaaacacuuaacaugaccaugccccuauccugcaccaaaaauaacagccaccacuacaucauggucggcaacgaaaccggacuagaacuaacccucaccaacacauccauuauuaaccacaaauucugcaaccuauccgacgcccacaaaaagaacuuauacgaccacgcgcucauguccaucaucuccaccuuccaccuaagcauccccaacuucaaccaauaugaagcaaugucaugcgacuucaacgguggcaaaauauccguccaauacaaccucucccacagcuacgccggcgacgccgcgaaccacugcggaaccguagccaacggaguccuccaaaccuucaugcguauggccuggggcgguuccuacauugcgcucgacuccggccacggaggcugggacugcaucaugaccuccuaccaauaccucauaauccaaaauaccacuugggaagaccacugccaauucacccgccccucccccaucggcuaccucggccuccuuucgcaacgaacucgcgacaucuauauaucccgacggcuccucggcaccuucaccuggacacuauccgacucagaaggcaacgacaccccaggcggcuacugccugacacgauggaugcucaucgaggccgaacucaaaugcuucggcaacacagccgucgccaagugcaacgaaaaacacgacgaagaguucugcgacaugcuccgccuauuugacuucaacaagcaagccauccaacgccuucgcgccgaggcgcaaauguccauccagcucauaaacaaagcugucaacgcccuaaucaacgaccaacucaucaugaaaaaccaccuccgcgacaucaugggaaucccauauugcaacuacuccaaauacugguaccuaaaccacaccaccacaggccgaaccucccuaccccggugcuggcuagucuccaacggcuccuaccucaacgaaacccacuucuccgacgacauugaacaacaggccgacaacaugaucacagaaaugcugcaaaaggaauacauggaacgccaaggcaaaacuccccucggacucgucgaccuauucgucuucagcaccagcuuuuaccucauuuccaucuuccuccaccucaucaagauacccacccaccgccacauagucggcaaaccgugccccaaaccccaccgccucaaccacaugggagucugcuccugcggccucuacaaacaaccuggagucccaguacguuggaagcgcuaa

SEQ ID NO: 2231 - RNA, 1476 nt, Artificial Sequence
  derived and/or modified protein sequence (opt11) from LASV(G2511-SLE-2012;Clade IV)__AIT17294__GPC
augggccaaaucgucaccuucuuccaagaagugccccacgucauagaagaagucaugaacaucguacucaucgcccugucaauccucgcaguccuaaaaggccuauacaaccucgcgaccugcggucucguaggacucgucaccuuccuucuccucugcggccgcuccugcacaaccagccuauacaaaggcgucuacgaacuccaaacccucgaacuaaacauggaaacacucaacaugacaaugccccucuccugcaccaaaaauaacagccaccacuacaucauggucggcaacgaaaccgggcuagaacuaacacucaccaacaccuccauaauagaccacaaauucugcaaccuuuccgacgcccacaagaaaaaccuguacgaccacgcccucaugagcaucaucucgaccuuccaccucucuauaccuaauuucaaccaauacgaagcaauguccugcgacuucaacgguggcaaaauauccguacaauacaaccuaucccacuccuacgccggcgacgccgccaaccacugcggcaccguagcaaacggaguucuccaaaccuucaugagaauggcauggggaggauccuacaucgcccuugacuccggacgcggcggaugggacugcaucaugacuuccuaccaauaccucaucauucaaaacacaaccugggaagaccacugccaauucucccgcccaucacccguaggcuaccucggccuccuaagccaacgcacccgcgacauauacaucucucgcagacuccuagggaccuucaccuggacacucagcgacuccgaaggcaaagacacccccggcggcuacugccuuacacgauggaugcucaucgaagccgaacucaaaugcuucggcaacaccgcaguagcaaaaugcaacgaaaaacacgacgaagaguucugcgacaugcuccgccuauucgacuucaacaaacaagccauacagcgacucaaaaccgaagcucaaauguccauccaacugaucaacaaagccgucaacgcacucaucaacgaccaacucaucaugaagaaccaucuacgcgacaucauggguauccccuacugcaacuauagcaaauacugguaccucaaccacaccaccaccggcaaaaccucccuaccaagaugcuggcucguauccaacggcuccuaccuuaacgaaacacacuucucggacgacauagaacagcaagccgacaacaugaucaccgaaaugcuccaaaaagaauauauggaaagacaaggcaaaacuccccucggccugguagaccucuucgucuuuuccacuuccuuuuaccuaaucucaaucuuccuacaccucgucaaaauccccacccaccgacacauaguaggcaaacccugccccaaaccccaccggcuaaaccacaugggcaucugcagcugcggccuuuacaaacaacccggcguucccgucaaauggaaacgcuga

SEQ ID NO: 2232 - RNA, 1476 nt, Artificial Sequence
  derived and/or modified protein sequence (opt11) from LASV(G2554-SLE-2012;Clade IV)__AIT17298__GPC
augggacaaaucgucacauucuuccaagaagucccccacguaaucgaagaagucaugaacaucguccuuaucgcccuaucgauccucgccguccucaaaggacuuuacaacaucgcaaccugcggccuucugggccuaguaugcuuccugcuccucugcggccgaucaugcaccaccucccucuacaaaggcgucuacgaacuccaaacccuagaacucaacauggaaacccuaaacaugaccaugccccuuucgugcaccaaaaacaacucccaucacuauaucauggucggcaacgaaacuggucuagagcucacccuaaccaacaccuccaucauuaaccacaaauucugcaaccucuccgacgcccacaagaaaaaccuuuacgaccacgcccucaugucaaucaucucaacauuccaccucagcauccccaacuuuaaccaauacgaagccauguccugcgacuucaacggcggaaaaaucuccguacaauacaaccugucccacagcuacgccguagacgccgccucucacuguggcacaaucgccaacggcguccuacaaacauucaugcgcauggcauggggaggcuccuacaucgcacucgacuccggccauggcggcugggacugcaucaugaccuccuaccaauaccucaucauccaaaacaccacuugggaagaccacugccaauucucccgacccucccccaucggcuaccucggccuccuuucccaacgcacacgcgacaucuacauaucccgacgccuccucggcacauucaccuggacacucuccgacucagaaggcaaagacacccccggaggcuacugccucacacgcuggaugcuaaucgaagccgaacugaaaugcuucggcaacaccgcugucgcaaaaugcaacgagaaacacgacgaagaguucugcgacaugcuccgucucuucgacuucaauaaacaagcaauacaacgacuuaaagccgaagcccaaauguccauccagcucaucaacaaagccgucaacgcccuaaucaacgaccaacugaucaugaaaaaccaccuccgcgacauuauggguauccccuacugcaacuacucuaaauacugguaccucaaccacaccaccacagguaagacaagccuccccaaaugcuggcuugucuccaacggcagcuaccuaaacgaaacacacuucuccgacgacaucgaacaacaagccgacaacaugaucacagaaaugcuccagaaggaauacauggaacgccagggcaaaacaccccucggccuggucgaccuauucguuuucuccaccagcuucuaccucaucagcaucuuccuccaccucgucaaaauacccacacaccgccacguagucggcaaaccuugucccaaaccgcaccgccucaaccacaugggcaucugcuccugcggccucuacggccagcccgggguccccguaaaguggaaacgcuaa

SEQ ID NO: 2233 - RNA, 1476 nt, Artificial Sequence
  derived and/or modified protein sequence (opt11) from LASV(G2557-SLE-2012;Clade IV)__AIT17302__GPC
augggccaaaucguaacguucuuccaagaagucccccaugucauugaagaaguaaugaacaucguccugauagcacuaucacuccuugccguccuuaaaggccucuacaacguagccacaugcggccucaucggccucguuaccuuccuccuccuguguggccgcuccugcaccaccaaccucuacaaaggcguguacgaacuucaaacacuggaacuaaacauggaaacccuaaacaugaccaugccccuaucaugcaccaaaaacaacucccaccacuacauaauggucggaaacgaaacuggacucgagcuuacccucaccaauacuucaaucaucagccacaaauucugcaaucucucagacgcccacaagaaaaaccucuacgaccacacccucaugucuauaaucucaaccuuccaccuuuccauucccaacuuuaaccaauacgaagccauguccugcgacuucaacgguggcaaaaucucaguccaauacaaccuuucacauuccuacgccguagacgccgccaaccauugcggcaccguagccaacggcguacuccaaaccuucaugcgcauggccugggguggauccuacaucgcccucgacucuggcagaggcaacugggauugcauuaugaccucuuaccaguaucucauaauccaaaacaccacaugggaagaccacugccaauuuucccgccccucccccaucggcuaccuaggccuccucucacaacgcacacgcgacaucuacauuucacgccgacuacuaggaaccuucaccuggacacucuccgacuccgaaggcaacgacacccccggaggcuacugccucacccgcuggaugcucauagaagcagaacucaaaugcuucggcaacaccgccgucgccaaaugcaacgaaaaacacgacgaagaguucugcgacaugcuccggcucuuugacuucaacaagcaagccauccaaagacuuaaggcagaggcccagauguccauccaacucaucaacaaagcaguaaacgcccuaaucaacgaccaacucauaaugaaaaaccaccuacgcgacaucaugggcauacccuacugcaacuacuccaaauacugguaccucaaccacaccaccacuggcaaaaccucucuuccuaaaugcuggcucgucuccaacggaucauaccuaaacgaaacccacuucagcgacgacaucgaacaacaagccgacaacaugaucaccgaaaugcugcaaaaagaguacauggaacggcaaggaaaaaccccacuaggccucguagaccucuucguguucuccaccuccuucuaccucaucuccaucuuccuccaucucgucaaaauaccaacccaccgccacaucgucggcaaacccugcccaaaaccccaccgccucaaccacauggguauuugcucaugcggccuguacaaacaacccggcguccccguccgauggaaacgcuag

SEQ ID NO: 2234 - RNA, 1476 nt, Artificial Sequence
  derived and/or modified protein sequence (opt11) from LASV(G2587-SLE-2012;Clade IV)__AIT17310__GPC
augggacaaaucgucacauucuuucaagaagucccccacguaauagaagaagucaugaacaucguccucauagcccucuccauccuagcaguccucaaaggucucuacaaccuagccacaugcgggcucgucggccucgucaccuuccuccuucuaugcggccgcuccugcaccacuucccucuacaaaggcguauacgaacuccaaacccucgaacuaaacauggaaacacucaacaugaccaugccccucuccugcaccaaaaacaacucacaccacuacaucauggucggaaacgagacaggacuagaacucacacucaccaacacaucaaucauaaaccacaaauucugcaaccuuuccgacgcucauaaaaagaaccucuaugaccacgcccuaauguccaucaucuccaccuuucaccucuccauccccaacuucaaccaauacgaagccaugucaugcgacuucaacggaggaaagaucucuguacaauacaaccucagccacucauacgcaggcgacgccgcaacccacugcggcacagucgcgaacggcguccuccaaacuuucaugagaauggccuggggugggucauacauagcacuagacagcggacgcggaaaaugggacugcaucaugaccucauaccaauaccucaucauucaaaacaccaccugggaagaccacugccaauucucccgccccucaccaaucggauaccucggcuuacuuucccaacgaacccgagacauauacaucagcagacgacuacucggcaccuucaccuggacccucuccgacagugaaggaaaagacacucccggaggcuacugccucacccgcuggaugcuuaucgaggccgaacucaaaugcuucggcaacacugccgucgccaaaugcaacgaaaaacacgacgaagaguucugcgacaugcuacgacucuucgacuucaacaaacaagccauccaacgacucaagaccgaagcacaaauguccauccaacucaucaacaaagccgucaacgcccucaucaaugaucagcucaucaugaaaaaccaucuccgcgacaucaugggcauaccuuacugcaacuacaguaaguacugguaccuaaaccacacaaccaccggcaaaaccucccugccccgcugcuggcucgucagcaacggaucauaccuaaacgaaacccacuucucugacgacaucgaacaacaagccgacaacaugauaaccgaaaugcuccaaaaagaauauauggaacgccaaggcaaaacaccuuuaggacucgucgaccucuucgucuucuccaccagcuucuaccucauauccaucuuccuccaucucgucaaaauacccacccaccgacacaucgucgguaaacccugcccaaaaccccaccgccucaacuauaugggcaucugcuccuguggacucuacaaacaacccggcguccccgucaaauggaaacgcuaa

SEQ ID NO: 2235 - RNA, 1476 nt, Artificial Sequence
  derived and/or modified protein sequence (opt11) from LASV(G2612-SLE-2012;Clade IV)__AIT17314__GPC
augggccaaaucgucaccuucuuccaagaagucccacacguaauagaagaaguaaugaacaucguccucaucacccucucaauccuagcgguccuaaaagggcuuuacaacgucgcaaccugcggucuaguaggccuagucacuuuccuacuccucugcggccgcuccugcacaaccucccucuacaaaggagucuaugagcuccaaacccucgaacuuaacauggaaacccuaaacaugaccaugccacucucaugcacuaaaaacaacagccaccacuacaucauggucggcaacgaaaccggccuugaacucacccucaccaacaccagcaucaucaaccacaaauucugcaaccuaagcgacgcccacaagaaagaccucuaugaccacgcccuaaugucaaucaucuccacguuccaccuauccauacccaacuucaaccaauacgaagccauguccugcgacuucaacgguggcaaaaucuccguccaauacaaccuaucacauuccuacgcagucgacgccgcaaaccacugcggcacagucgccaacgggguccuccagacauucaugcguauggcauggggcggcuccuacauugcccucgacuccggccgaggaggcugggacugcaucaugaccagcuaccaauacuuaauuauacaaaacacaaccugggaagaccacugccaauucucacgaccaucucccauaggcuaccucggccugcugucacagcgcacacgagacaucuacaucucgcgucgacuccucggaaccuucaccuggacucuaucagacuccgagggcaacgacacccccggcggauacugccuaacccgcuggaugcugauagaagcagaacuaaaaugcuucggcaauacagccguagccaaaugcaacgaaaaacacgacgaagaguucugcgacaugcuccgccucuucgacuucaacaaacaagcaauccaacgccugaaagccgaagcccaaaugucaauccaacucaucaacaaggccgucaacgcacucaucaacgaccaacuuaucaugaaaaaccaucugcgagacaucauggguauccccuacuguaacuacuccaaauacugguaccucaaccacaccaccaccggcaaaaccagccuaccaaaaugcuggcucguauccaacgguuccuaccucaacgaaacccacuucuccgacgacaucgaacagcaagcagacaacaugaucaccgaaaugcuccaaaaagaauauauggaacgccaagguaaaacaccccucggccucguugaccucuucgucuucuccaccucauucuaccuuaucucaaucuuccuucaccucgucaaaaucccaacacaccgccacauagucggcaaaccauguccaaaaccgcaccgccucaaccacaugggcaucugcucuugcggccuuuacaaacaaccuggagucccaguuaaauggaaacgcuaa

SEQ ID NO: 2236 - RNA, 1476 nt, Artificial Sequence
  derived and/or modified protein sequence (opt11) from LASV(G2615-SLE-2012;Clade IV)__AIT17318__GPC
augggacaaaucgucaccuucuuccaagaggucccucacgucauagaagaagucaugaacaucguccucauagcccucucacuccucgcaguccucaaaggccuauacaacgucgcaacgugcggccuuaucggccucgucaccuuccugcugcucugcggacgcuccugcacaacaaaccucuacaaaggggucuacgaacuccagacgcucgaacucaacauggaaacccucaacaugaccaugccacucucuugcaccaaaaacaacucucaccacuacaucauggucggcaacgagaccggccucgaacucacuuuaaccaacaccuccaucaucaaccacaaauucugcaaucucucagacgcccacaagaaaaaccucuacgaccacgcccuaaugucuaucaucucuacauuccaucucuccaucccaaacuucaaccaauacgaagccauguccugcgauuucaacggaggcaaaauauccguacaauacaaccucucccacucguacgccgucgacgccgccaaccacugcggcacaguagcaaacggcguacuucaaaccuucaugcgcauggccuggggcggcuccuacauagcccuugacucgggccgaggcaacugggacugcaucaugacauccuaccaauaccucaucauccaaaauaucacgugggaagaccauugccaguucucacgucccucacccaucggcuaccucggacuccuaucucaacgcacucgcgacauauacaucucacgccgccugcucggcaccuucaccuggacccucuccgacucugaaggcaacgacacaccuggcggcuacugccucacccgcuggaugcucaucgaagcugaacugaaaugcuucggaaacacagccgucgccaaaugcaaugagaaacacgacgaagaguucugcgacaugcuccgccucuucgacuuuaacaaacaagccauccaacgccuaaaagccgaagcacaaaugucaauccaacucaucaacaaagccgucaacgcccucaucaacgaccaacucaucaugaaaaaccaccuccgcgauaucaugggcaucccauacugcaacuacuccaaauacugguaccuaaaccacaccacaacaggcaaaacaagccuccccaaaugcuggcucguaucuaacggaucauaccucaacgaaacacacuucuccgacgacaucgaacaacaagcagacaacaugaucaccgaaaugcuucaaaaagaauacauggaacgccaaggcaaaacgccccucggccucgucgaccuauucgucuucuccaccuccuucuaccucaucuccauuuuccuccaccucgucaaaaucccaacacaccgccacaucguaggcaagcccugccccaaaccccaccgccucaaccacaugggaaucugcagcugcggccuauacaaacaaccaggcguucccguccgcuggaaacgcuaa

SEQ ID NO: 2237 - RNA, 1476 nt, Artificial Sequence
  derived and/or modified protein sequence (opt11) from LASV(G2723-SLE-2012;Clade IV)__AIT17322__GPC
augggacagaucgucaccuucuuccaagaagucccacaugucaucgaagaagucaugaauaucguauuaaucgcccucagccuccuagccguccucaagggccucuauaacguagccacaugcggccucauaggccuggucaccuuccuccuccuaugcggccgcuccugcacaaccaaccucuacaaaggcgcuuacgagcuccaaacccucgaacucaacauggaaaccuuaaacaugaccaugccccucuccugcaccaaaaacaacucccaccacuacaucaugguaggcaacgagaccggccucgaacucacacucacaaacaccucaaucaucaaccacaaauucugcaaccuauccgacgcccacaagaaaaaccucuacgaccacacccucauguccaucaucucaaccuuccaccucuccaucccuaacuucaaccaauacgaagcaauguccugcgacuuuaacggcggcaaaaucuccguacaauauaaccucagccauagcuacgccguugacgccgccaaccacugcggcacagucgccaacggaguucuacaaacuuucaugcguauggccuggggcggauccuauauagcacuagacucuggccgcggcaacugggacuguaucaugaccagcuaccaauaccuaaucauucaaaauacaaccugggaagaccacugccaauucucccgcccuucccccaucgguuaccucggacuccucucacaacgcacccgagacaucuacauuucccgccgccuccucggaaccuucaccuggacccucuccgacuccgaaggcaacgacacccccggcggcuacugccuaacccgauggaugcucaucgaagccgaacucaaaugcuucggcaacacggccgucgcaaaaugcaacgaaaaacacgacgaggaguucugcgacaugcucagacuauucgauuucaacaaacaagccauccaacgccuuaaagccgaagcacaaaugucaauacaacucaucaauaaagccgucaaugcccucauaaacgaccaacucaucaugaaaaaccaccuccgcgacauuaugggcauccccuacugcaacuacuccaaauacugguaccuaaaccacacaacgacaggcaaaacaucucuaccaaaaugcuggcucgucucaaacggcuccuaccucaacgaaacccacuucagcgacgacaucgaacaacaagccgacaacaugaucaccgaaaugcuccaaaaagaauacauggaacgccaaggcaaaacaccccucggccuggucgaccucuucgucuucuccaccuccuucuaccucaucuccaucuuccuccaccucgucaaaauccccacacaccgccauaucgucggcaagcccugcccaaaaccccaccgccuuaaccauaugggcaucugcucuugcggccucuacaagcaaccaggcguacccguccguuggaagcgcuaa

SEQ ID NO: 2238 - RNA, 1476 nt, Artificial Sequence
  derived and/or modified protein sequence (opt11) from LASV(G2868-SLE-2012;Clade IV)__AIT17328__GPC
augggccaaaucguaaccuucuuccaagaagucccccacgucaucgaagagguuaugaauaucguccucaucacccuauccauccuagcaguacucaaagggcucuacaacauagcaaccugcggccucgucggacuuguaaccuuccuucuccucugcggcaaauccugcaccaccucacucuacaaaggagucuacgaacuacaaacacuagaacugaacauggaaacccucaacaugacaaugccccuauccugcaccaaaaacaacucacaccacuacauccgcguuggcaacgaaaccggccuggaacucacccuaacaaacacauccaucaucaaccacaaauucugcaaccucuccgacgcccacaagaaaaaccucuacgaccacgcccuaauguccauaaucucaaccuuccaccucuccauuccaaacuucaaccaauacgaagccaugagcugcgacuucaacggaggaaaaaucuccguccaauauaaccucagccacuccuacgccgucgacgccgccaaucacugcggcaccgucgccaacgggguccuccaaaccuucaugcguauggcuuggggcggcucauauauagcucuugacuccggacacggcaacugggacuguaucaugaccagcuaccaauaucucaucauccaaaacaccaccugggaagaccacugccaauucucccgaccgucaccgaucggcuaccuuggccuacucucccaacgcacaagagacaucuacaucagccgacgccuccucggcaccuucaccuggacccuaagcgacucagaaggcaacgaugccccuggcggcuacugccucacacgcuggaugcucauagaagccgaacucaaauguuucggcaacaccgccguugccaaaugcaacgaaaaacacgacgaagaguucugcgacaugcuacgacucuucgacuucaauaaacaagcaauccaacgacuaaaagcagaagcccaaaugagcauacaacucaucaacaaagccguaaacgcccucaucaacgaccaacucaucaugaaaaaccaccuccgcgacaucauggggaucccauacugcaacuacuccaaauacugguaccucaaccacaccaccaccggcaaaaccucccuccccaaaugcuggcucgucucaaacggcuccuaccuaaacgaaacacacuucuccgacgacaucgaacaacaggcagacaacaugauaaccgaaaugcuacaaaaagaguacauggaacgacaaggaaaaacaccccucggccucgucgaccuauucguauucucaaccuccuucuacuuaauaucuaucuuccuccaccucgucaaaauacccacccaccgccacgucgucgguaaauccugccccaaaccccaccgccuaaaccacaugggcaucuguuccugcggacucuacaaacaaccaggcguacccgugaaauggaaacgcuaa

SEQ ID NO: 2239 - RNA, 1476 nt, Artificial Sequence
  derived and/or modified protein sequence (opt11) from LASV(G2903-SLE-2012;Clade IV)__AIT17332__GPC
augggccaaaucgucacauucuuccaagaaguuccucacgucaucgaagaggucaugaacauaguccugaucgcccucuccauccuagccguccuuaaaggccuauacaaucuagcuaccugcggccucgucggccuagucacauuccuacuccucugcggacgcuccugcaccaccucccuauauaaaggcguuuacgaacuacaaacccuagaacucaacauggaaacccucaacaugaccaugccccucuccuguaccaaaaacaacucucaccacuacauccgcgucgggaacgaaaccggccucgaacucacauuaacgaacaccucgaucaucaaccauaaauucugcaaucuaucagacgcccacaagaaaaaccucuacgaccacgcccuaauguccauaaucuccaccuuccaccucagcauccccaacuucaaccaauacgaggccauguccugcgacuucaacgguggcaaaaucuccguccaauacaaccucucacacuccuacgccgucgacgcagccaaucacuguggcaccgucgccaacggcguccuacaaacuuucaugagaauggccuggggcggcuccuacaucgcacuugacuccggccacggccgaugggacugcaucaugaccuccuaccaauaccucaucauccagaacaccaccugggaagaucacugccucuuuucacgacccuccccgauuggcuaccucggccuucuaagccaacgcacaagagacaucuacaucucacgccgccuucugggaaccuucaccuggacccucucagauuccgaaggccgugauacccccggcggcuacugccucacgcgcuggauguuaaucgaagcagagcucaaaugcuucggaaacaccgccguagcaaaauguaacgaaaaacacgacgaagaauuuugcgacaugcuccgccuauucgacuucaacaaacaagccauccaacgccucaaagccgaagcccagauguccauccaacucaucaacaaagccguuaacgcacucaucaacgaccaacucaucaugaaaaaccaccuccgcgacaucaugggcauuccuuacugcaacuacuccaaauacugguaccuaaaccacacaaccaccggccgcaccucccuaccccgaugcuggcucgucucaaacggcuccuaccucaacgaaacccacuucagcgacgacaucgaacagcaagccgacaacaugaucaccgagaugcuacaaaaggaauacauggaacgacaaggcaaaacuccccucggacucgucgaccucuucguauucuccaccuccuucuaccuaaucucaauauuccuccaccucgucaaaauacccacacaccgccacauagucggcaaguccugcccaaaaccacaccggcucaaccacauggguaucugcuccugcggccucuacaaacaaccuggcgucccagucaaauggaaacgauaa

SEQ ID NO: 2240 - RNA, 1476 nt, Artificial Sequence
  derived and/or modified protein sequence (opt11) from LASV(G2944-SLE-2012;Clade IV)__AIT17340__GPC
augggucaaaucgucaccuucuuccaagaagucccucacgucaucgaagaagucaugaacaucguccuaaucgcccuuuccauacuugccguccuaaaaggacucuacaacuuugccacaugcggacuugucggccucgucaccuuccuacuacugugcggucgauccugcacaaccucacucuacaaaggcgucuacgaacugcaaacacucgaacucaacauggaaacccugaacaugaccaugccccuauccugcaccaaaaacaacucacaccacuacauaauggucggcaacgaaacaggccucgaacucacucucaccaauauauccaucaucaaccacaaauucugcaaccucuccgacgcccacaagaaaaaccucuacgaccacgcacucauguccaucaucuccaccuuccaccucuccauucccaacuucaaccaauacgaagccaugagcugcgacuucaauggcggaaaaaucuccguccaauacaaccucagccacucuuacgcaggcgacgcagccaaccacugcggcacaguagccaacggaguacugcaaaccuucaugcguauggccuggggcggcuccuacaucgcucucgacuccggacgcggagaaugggacugcaucaugaccucauaucaguaucucauaauccaaaacaccaccugggaagaccacugccaauucucucgcccaagccccauuggauaccucggccuccucagccaacgcacccgcgauaucuacaucagccgccgccuacucggaaccuuuaccuggacccucuccgacuccgaaggcaaagacacccccggaggauacugccucaccagauggaugcucauagaagcggaauuaaaaugcuucggcaacaccgccgucgccaaaugcaacgaaaagcacgacgaagaguucugcgacaugcuccgccuauucgacuucaacaaacaagccauccaacgacucaaagccgaagcccaaauguccauccagcucaucaacaaagcggucaacgcccucaucaacgaccaacuaaucaugaaaaaccaccuccgggacauaaugggcauaccuuacugcaacuacuccaaguacugguaccuuaaccacaccacaaccggcaaaaccagccuaccaaaaugcuggcuaguaagcaacggcucauaccucaacgaaacucacuucuccgacgacaucgaacaacaagccgacaacaugaucaccgaaaugcuccaaaaagaauacauggaacgccaaggaaaaacaccccuaggccucgucgaccucuucgucuucucaaccucauucuaccucaucucgaucuuccuccaccuaguaaaaauccccacccaccgucacaucguaggcaaaccaugcccccgcccacaccgccucaaccacaugggcaucugcucaugcggacucuacaaacaacccggcguucccgucaaguggaaacguuag

SEQ ID NO: 2241 - RNA, 1476 nt, Artificial Sequence
  derived and/or modified protein sequence (opt11) from LASV(G3010-SLE-2013;Clade IV)__AIT17344__GPC
augggccaaaucguaaccuuuuuccaagaagucccccauguaaucgaagaagucaugaauaucguccugaucgcccuaucaauccucgccguccucaagggccucuacaacuucgcaaccugcggccucguagggcuaguaaccuuccuccuccucugcggccgcucaugcaccaccucacucuacaaaggcgucuacgaacuacaaacccuagagcuuaacauggaaacccucaacaugaccaugccccuaagcugcaccaaaaacaacucacaccacuacaucauggucggcaacgaaaccggccucgaacucacacucaccaacacaucuaucaucaaccacaaauucugcaaccucuccgacgcacacaaaaagaaccucuacaaccacgcacuaauguccauaaucucaaccuuucaccucuccauccccaacuucaaccaauacgaagcaauguccugugacuuuaacggcggaaagaucucaguacaauacaaccucucccacagcuacgccggcgacgccgccucacacugcggcacgguagccaacggcguccugcaaacguucaugcgcauggccuggggcgguagcuacaucgcccucgacuccggcuacggaaaaugggacugcaucaugaccuccuaccaauaccucaucauccaaaacaccaccugggaagaccacugccaauucucccgccccucccccaucggcuaccucgggcuccuuucccaaagaacccgcgacaucuacaucucccgccgacuccuaggcaccuucacauggacccuaucugacuccgaaggaaaggacaccccagggggauacugccucacccgcuggaugcucauagaagcagaacucaaauguuucggcaacaccgccgucgcaaaaugcaacgaaaaacacgacgaagaguucugcgacaugcucagacucuucgacuucaacaaacaagccauacaacgccucaaaacagaagcccaaauguccauacagcucauuaacaaagccgucaacgcacucaucaacgaucaacuaaucaugaaaaaccaccuccgcgacauuaugggcauccccuacugcaacuacuccaaauacugguaccucaaccacaccacaacgggcaaaacuucacucccaaagugcuggcuuguauccaacggcuccuaccucaacgaaacccacuucagcgacgacaucgaacaacaggccgacaacaugaucacagagaugcugcagaaagaguacauggaacgccaaggcaaaacaccccucggccuggucgaccuuuucguauucagcaccuccuucuauuuaaucuccaucuuccuccaccucgucaaaaucccaacccacagacacaucgucggaaaaucaugccccaaaccccaccgacucaaccacaugggcaucugcuccugcggccucuacaagcaaccgggaguccccguacgauggaaaagauga

SEQ ID NO: 2242 - RNA, 1476 nt, Artificial Sequence
  derived and/or modified protein sequence (opt11) from LASV(G3016-SLE-2013;Clade IV)__AIT17348__GPC
augggccaaaucguaaccuuuuuccaagaagucccccacgucaucgaagaaguaaugaacaucguucucauagcccucuccauacucgccguacucaagggucuauacaacaucgccacaugcggccuuaucggccucgucacauuccuucuccuaugcggccgcucaugcacaaccucccucuacaaaggagucuacgaacuccaaacacucgaacucaauauggaaacccucaacaugaccaugccccuauccugcaccaaaaauaacucccaccacuacaucauggucggcaacgaaacuggacucgagcuaacacucaccaacaccagcaucaucaaccacaaauucugcaaccucucagacgcucacaagaaaaaccucuacgaccacgcccuuauguccaucaucuccaccuuccaccuauccauccccaacuucaaccaauacgaagcaauguccugcgacuucaacggcggcaaaauauccguacaauacaaccucucacacuccuacgccggugacgccgccaaccacugcggcacagucgccaacggcguccuacaaacauucaugcgcauggccuggggaggaucauacauagcccuugacagcggccgcggccgcugggacugcaucaugacauccuaccaauaccuaaucauccaaaacaccacuugggaagaccacugccaauucucucguccauccccaauuggcuaucucggccuccuaucucaacgaacccgcgacauauacauaagccgccgccuccucgguacauucacauggacccuauccgacagcgaaggcaaugacaccccuggcggauacugccucacccgcuggaugcucaucgaagcugagcucaaaugcuucggcaacaccgccguagcuaaauguaacgagaaacacgaugaagaauuuugugacaugcuccgccucuucgacuucaacaaacaagccauccaacgccuaaaagccgaagcgcaaauguccauccaacuuaucaacaaagcugucaaugcacucauaaacgaccagcucauuaugaaaaaccaccuccgagacauaaugggaaucccauacugcaacuacagcaaauacugguaccucaaccacaccaccaccggcaagacaucccuccccaaauguuggcucgucuccaacggcuccuaccuaaacgagacccacuucucagacgacaucgaacaacaagccgacaauaugaucacugaaaugcuacaaaaagaguacauggaaagacaaggcaaaacaccccuaggucucgucgaccucuucgucuucuccaccuccuucuaccuaaucucaaucuuccuccaccucguaaaaauaccaacccaccgccacaucguaggaaaaccaugccccaaaccccaccgacucaaccacaugggaaucugcucuugcggccucuauaaacaaccaggcgucccagucaaauggaaacgcuaa

SEQ ID NO: 2243 - RNA, 1476 nt, Artificial Sequence
  derived and/or modified protein sequence (opt11) from LASV(G3034-SLE-2013;Clade IV)__AIT17350__GPC
augggccaaauagucacauucuuucaagaggucccccacgucauagaagaagucaugaacaucguacucauagcccucagcauccucgccguccucaaaggccucuacaacgucgcgaccugcggucucaucggccucgucacauuccuccuacucugcggccgauccugcaccaccacccuuuacaaaggcguuuacgaauuacaagcccuugaacucaacauggaaacccugaacaugacaaugccacucuccugcaccaaaaacaacucccaccacuauauuaugguugguaaugaaacaggacucgaacucacccucaccaacacaucaaucaucgaccacaaauucugcaaccucuccgacgcacacaagaaaaaccucuacgaccacgcccucauguccauaaucucaaccuuccaccucuccaucccgaacuucaaccaauacgaagcaauguccugcgacuucaacggaggcaaaaucucaguccaauacaaccucucgcacucauacgccggcgacgcagccaaacacugcggaaccgucgccaacggaguccuacaaacauucaugcgaauggcauggggcggcuccuacaucgcacuugacuccggacgcaacggcugggacugcgucaugacauccuaccaguaccuaaucauccaaaacacaacaugggaagaccacugccaauucucacgcccaucacccaucggcuacuuaggccuacucucccaacgaacccgcgacaucuauaucucacgccggcuccuaggcaccuucaccuggacacuaucagacuccgaaggaaaagacacacccggaggcuacugcuuaacacgauggaugcucaucgaagccgaacucaaaugcuucggcaacacagccgucgcaaaaugcaacgaaaaacacgacgaagaguucugcgacaugcuccgacucuucgacuucaacaaacaagccauccaacgacucaaaaccgaagcccagauguccauacagcuaaucaauaaagcaguaaacgcccucaucaacgaccaauuaauaaugaaaaaucaccuccgcgacauaaugggcauacccuacugcaacuacuccaaauacugguaccucaaccacaccgucaccggaaaaaccucucucccccgcugcuggcucgucucuaacggcucauaccucaacgaaacccacuuuuccgacgacaucgagcaacaagccgauaacaugaucaccgaaaugcuacaaaaagaguacaucgaacgccaaggcaaaacaccccucggccuaguggaccucuucgucuucuccaccuccuucuaccucaucucgaucuuccuccaccucgucaagaucccaacccaccgccacaucaucgggaaacccugcccuaaaccccaccgccucaaccacaugggcauaugcucaugcggacuauacaaacaacccggcguccccgugcgcuggaaacgcuaa

SEQ ID NO: 2244 - RNA, 1476 nt, Artificial Sequence
  derived and/or modified protein sequence (opt11) from LASV(G3101-SLE-2013;Clade IV)__AIT17354__GPC
augggacaaaucgucaccuucuuccaagaagucccccacguaauugaagaaguaaugaacauaguccucaucgcccucuccauccucgcaguccucaaaggacucuauaacuucgccacaugcggccucgucggccucgucaccuuccuccuucuaugcggucgcucaugcaccacaucccucuacaaaggcguauacgaacuacaaacccucgaauugaacauggaaacacucaacaugaccaugccccucagcugcaccaaaaacaacagccaccacuacauaauggucggcaacgaaaccggccuugaacucacacucaccaacaucucaauaaucaaccacaaguucugcaaccuuuccgacgcccacaagaaaaaccucuacgaccacgcucuaauguccaucauauccaccuuccaccucuccauaccaaacuucaaccaauacgaagccaugucuugcgacuucaacggcggcaaaaucucaguccaguacaaccuuucacacuccuacgccggagacgccgccaaccacugcggcacagucgcuaauggaguccuccaaaccuucaugcgcauggccuggggcggcagcuacauugcccuagacucaggacacggaggaugggacugcaucaugaccuccuaccaauaccuaaucauacaaaacaccaccugggaagaccacugccaauuuucccgcccauccccaaucggcuaccuaggacuacuaucgcaacgcacccgcgacaucuacauuucucgacgccuccuaggaaccuucacauggacccuuuccgacuccgaaggcaaagacacacccggcggcuacugccuaacucgcuggaugcuaaucgaagccgagcugaaaugcuucggaaacaccgccguagcaaaaugcaacgaaaaacacgacgaagaguucugcgacaugcuacgacuuuucgacuucaauaaacaagccauccaacgccucaaagcggaagcccaaaugagcauccaacucaucaacaaagcaguaaacgcccucaucaacgaccaacucauaaugaaaaaccaccuacgcgacauaaugggcauccccuacugcaacuacuccaaauacugguaccucaaccacaccacaacaggcaaaacaucacuccccaaaugcuggcucgucagcaacggcuccuaccucaacgaaacucacuucuccgacgacaucgaacaacaggcagacaacaugaucacagaaaugcugcaaaaagaauacauggaacgccaaggaaaaaccccacucggccucgucgacuuauucgucuucuccacauccuucuaccucaucucuaucuuccuccaccucguuaagauacccacacaccgccacauugugggaaaaccauguccccguccccaccgccucaaccacaugggcaucugcuccugcggccucuacaaacaacccggaguucccguaaaauggaaacgguaa

SEQ ID NO: 2245 - RNA, 1476 nt, Artificial Sequence
  derived and/or modified protein sequence (opt11) from LASV(G3110-SLE-2013;Clade IV)__AIT17360__GPC
augggacaaauugucacauucuuccaagaaguaccacacgucaucgaggaagucaugaauaucguucuaaucgcccucuccauccucgccguacucaaaggccuuuacaacuucgcaaccugcggccucgucggacucguaaccuuccuacuccucugcggucgcucaugcaccacuucccucuacaaaggugucuacgagcuccagacacuagaauuaaacauggaaacacucaacaugaccaugccccucuccugcaccaaaaacaacucucaccacuacauccgcgucggcaacgaaacaggccucgagcucacccucaccaacaccuccaucaucaaccaccgcuucugcaaccucuccgacgcccacaagaaaaaccucuacgaccacgcccuuauguccaucauaagcaccuuccaccucuccauacccaacuucaaccaauacgaagccauguccugugacuucaacggaggaaaaaucuccguucaauacaaccucucccacuccuacgccggcgacgccgcaaaccacugcggcaccguagccaacggaguucuccaaacuuucaugagaauggccuggggcggcuccuacauugcccucgacuccggccacggaaaaugggacugcaucaugaccuccuaccaauaccuaaucauacaaaacacaaccugggacgaccacugccaauucucgcgccccagccccaucgguuaccucggccuccucucgcaacgcacccgcgacaucuacaucucccgccgacuccucggcacauuuacuuggacccucuccgacucagagggaaaagacaccccaggcgguuacugccucacccgauggaugcucaucgaagccgaacucaaaugcuuuggcaacaccgcaguagccaaaugcaaugaaaaacacgacgaagaguucugcgacaugcuucgccuauucgacuucaacaaacaagcaauacgccgccucaaagccgaagcccaaaugucaauccaacucaucaacaaagcagucaacgcccucaucaacgaccaacucaucaugaaaaaccaccuccgcgacaucaugggaauccccuacugcaacuacuccaaauacugguaccucaaccacaccaccaccggcaaaaccuccuuaccacgaugcuggcucguauccaacggcucauaccuuaacgaaacccacuuuucagacgacaucgaacaacaagccgacaacaugaucacagaaaugcuucagaaagaauacauggaacgccaaggcaaaacaccccucggccuugucgaccucuucgucuucucaaccucauucuaccuaaucuccaucuuccuacaccucgucaaaauaccaacacaccgacacauagucggaaaaucaugcccaaaaccccaccgccucaaccacauggguauaugcuccugcggcuucuacaagcaacccggaguccccguaaaauggaagcguuaa

SEQ ID NO: 2246 - RNA, 1476 nt, Artificial Sequence
  derived and/or modified protein sequence (opt11) from LASV(G3148-SLE-2013;Clade IV)__AIT17364__GPC
augggccaaaucgucaccuucuuccaagaaguaccccacgucaucgaagaagugaugaacaucguccucaucgcccuuuccauccucgccguccuaaaaggccucuacaacuucgccacaugcggacucgucggacucgucacauuccuccuccucugcggccgcuccugcacgaccucccuauacaaaggagucuaugaauuacaaacccucgaacuaaacauggagacccuaaacaugaccaugccacuaagcugcaccaagaacaacucacaccacuacaucaugguaggaaacgaaacaggacuagaacucacccucaccaacacuuccaucaucaaccacaaauucugcaaccucucugacgcccacaagaaaaaccuauacgaccacgcacucauguccaucaucuccaccuuccaccuuucaauccccaacuucaaccaauacgaagccaugucaugcgacuucaacggcggaaaaauaagcguccaauauaaccuuucacacuccuacgccggcgacgccgcaaaccacugcggcaccgucgcaaacggcguccuccaaaccuucaugcgaauggcauggggcgguuccuacaucgcucuggacucuggccgagaccgaugggacugcauaaugacuuccuaccaguaccuaaucauccaaaacaccacaugggaagaccacugccaauucucucgccccucccccaucggauaccugggucuacucucccagcgaaccagagacaucuacaucucccgucgccuccucggcacuuucacauggacccucucggacuccgaaggcaaagacacccccggaggcuacugccucacacgauggaugcucaucgaagccgaacucaaaugcuucggaaacaccgccguagccaaaugcaacgaaaaacacgacgaagaguucugcgacaugcuacgccucuucgacuucaacaaacaagcgauucaaaggcuaaaagcagaagcccaaaugagcauccaacuuauaaacaaagccgucaacgcccuaaucaacgaccaacucaucaugaaaaaccaucuccgggacaucaugggcauuccauacuguaacuacagcaaauacugguaucucaaccacacuaccaccggcaaaaccucccuaccaaaaugcuggcucguguccaacggcagcuaccucaacgaaacccacuucuccgacgacaucgaacaacaagccgacaacaugaucacagaaaugcuccaaaaagaauacauagaacgacaaggcaaaacccccuuaggccucgucgaccuauucgucuucagcaccuccuucuaccuaauaagcauauuccuucaccuagucaaaaucccgacgcaccgacacauaguaggaaaaccaugcccaaagccacacaggcucaaccacaugggcauaugcuccugcggacuauacaaacaacccggcgucagcgucaaauggaagcgcuaa

SEQ ID NO: 2247 - RNA, 1476 nt, Artificial Sequence
  derived and/or modified protein sequence (opt11) from LASV(G3151-SLE-2013;Clade IV)__AIT17368__GPC
augggccaaaucguaaccuucuuccaagaaguaccacacgucaucgaagaagucaugaauauaguacucaucgcucucuccauccucgcaguccucaaaggacucuacaacuucgcgaccugcggacucgucggccucgucacauuccuucuacucugcggccguuccugcaccaccucccucuacaaaggagucuacgaacuucaaacacuagaacucaacauggaaacccuuaauaugaccaugccgcucuccugcaccaaaaacaacucccaccacuacaucaugguaggaaaugagaccggccucgaacucacccuuaccaacaccuccauaaucaaccacaaauucugcaaccucagcgaugcccacaagaaaaaccucuacgaccacgcccucaugucuaucaucuccaccuuucaucucuccauacccaacuucaaccaauucgaagccaugucaugcgacuucaacggcggaaaaaucuccguccaauacaaccucucccacuccuacgccggcgacgccgccaaccacugcggcaccguagcaaacggagugcuacaaaccuucaugcgcauggccuggggcggauccuacaucgcccucgacucaggccacuccaaaugggacuguauuaugacuucauaccaauaccucaucauccaaaacaccacgugggacgaccacugccaguucucccgccccucccccauaggcuaccuuggccuccucagccaacgcacacgcgacauauacaucucccgccgccuccucggaaccuucaccuggacccuauccgacucggaaggaaaagauacgcccggcggcuacugucuaacaagauggaugcucaucgaagcugaacucaaaugcuuuggcaacacagccgucgccaaaugcaaugaaaaacacgacgaggaauuuugugacaugcuccgccuuuucgacuucaacaaacaagccauccaacgccucaaagcagaagcccaaauguccauacaacuaaucaacaaagccguuaacgcccucauaaacgaccaacucaucaugaaaaaccaccuacgcgacaucaugggcauccccuacugcaacuacagcaaauacugguaccuaaaccacaccaccaccggaaaaaccucccuccccaaauguuggcucgucuccaacggcuccuaccucaacgaaacccacuucuccgacgacaucgaacaacaagccgacaacaugaucacugaaaugcuccaaaaagaauacauggaacgccaaggcaaaacuccccucggccucgucgaccuauucgucuucucaaccagcuucuaccucaucuccauauuccuccaccucgucaaaaucccaacacaccgacacaucgucggaaaaucaugccccaagccacacagacucaacuacauggguaucugcucgugcggcuucuacaagcaacccggcguccccgucaaauggaaacgcuaa

SEQ ID NO: 2248 - RNA, 1476 nt, Artificial Sequence
  derived and/or modified protein sequence (opt11) from LASV(G3157-SLE-2013;Clade IV)__AIT17370__GPC
augggccaaauugucaccuucuuccaagaagucccccacguaaucgaggaaguaaugaacaucguccucaucgcacucuccauccucgccguacucaagggccucuacaacuucgccacuugcggcuuagucggccuagucacauuucuccuccucugcggacgcuccugcacaaccucgcucuauaagggcguauacgaacuccagacccucgaacuaaacauggaaacccuaaacaugaccaugccccucagcugcaccaaaaacaacucccaccacuauauaauggucggaaacgaaacagggcucgagcuaacccuaaccaauaccuccauaaucaaccauaaguucugcaaccuauccgacgcccacaagaaaaaccuauacgaucacgcacucaugucaaucaucucuaccuuccaccucuccauacccaacuucaaccaauaugaagccauguccugcgacuucaacggcggaaaaauuaguguacaauacaaccucucacacuccuacgccggugacgccgcaaaccacugcggaaccgucgccaacggaguccuccaaacguucaugcgaauggccuggggcggauccuacauugcacucgacuccggccgcgaccgcugggacugcaucaugaccucauaccaauaccuaaucauccaaaacaccaccugggaagaccacugccaauucucgcguccaagccccauaggauaccugggccuacuaucucaaagaacccgagacaucuacauaucccgacgccuccucggcaccuucaccuggacccuauccgacuccgaaggcaaagacacacccggcggauacugccuaacccguuggaugcucaucgaagccgaacucaagugcuucgguaacaccgccgucgccaaaugcaacgaaaagcaugacgaagaguucugcgacaugcuccgccuuuucgacuucaacaaacaagccauucaacgccucaaagccgaagcccaaaugucaauacaacuaauuaacaaagcagucaacgcccucauuaacgaccaacucaucaugaaaaaccaccuccgcgacaucaugggaaucccuuacugcaacuacucaaaauacugguaccucaaccacacaaccaccggaaaaaccagccuccccaagugcuggcucgucuccaacggauccuaccucaacgaaacccacuucuccgacgauaucgaacaacaggccgauaacaugaucacagaaaugcuccaaaaagaauacauggaacgacaaggcaaaaccccacucggccuagucgaucuauucgucuucuccaccagcuucuaccucaucucaauauuccuccaccugguaaaaauccccacacaccgacacauaguaggaaaacccugccccaaaccucacagacuaaaccauaugggcaucugcuccugcggccucuacaaacaacccggcgucucagucaaauggaaacgcuag

SEQ ID NO: 2249 - RNA, 1476 nt, Artificial Sequence
  derived and/or modified protein sequence (opt11) from LASV(G3206-SLE-2013;Clade IV)__AIT17378__GPC
augggccaaaucgucacauucuuccaagaagucccccacgucaucgaagaagucaugaacaucguccucaucgcccucuccauacucgccguacucaaaggacucuacaaccuugccacaugcggacucguaggucuagucacguuccuacuccuaugcggccgcucaugcaccaccucacuauacaaaggcguauacgaacuacagacccucgaacucaacauggaaacccucaacaugaccaugccacucucgugcaccaaaaacaacucccaccacuacaucauggucggcaacgaaacaggacucgaacucacccugaccaacacaucaaucaucaaccacaaguucugcaaccucuccgacgcccacaagaaaaaccucuacgaccacacccucaugaguauaaucuccacauuccaucuauccauaccgaacuucaaccaauacgaagcaaugagcugcgacuucaacggcggcaaaaucuccguccaauauaaccucagccacucauacgccguagacgccgcaaaccacugcggcaccgucgccaacggcguccuacaaaccuucaugcgcauggccuggggaggauccuacaucgcccucgacuccggccgcuccggcugggacugcaucaugacuuccuaccaauaccuagucauacaaaacacaacaugggaagaccacugccaauucucccgacccucaccgaucggcuaccuaggccuucuaucacaacgaacccgagacaucuacaucucacgccgccuccucggcaccuucacuuggacccucuccgauagcgaaggcaaaaacacccccggcggauacugccucacccgguggaugcucauagaagccgaacucaaaugcuucggaaacaccgccguggccaaaugcaacgaaaaacacgacgaagaguucugcgacaugcuacgacucuuugacuucaacaagcaagccauccaacgccucaaagccgaagcccaaauguccauacaacucaucaacaaagccguaaacgcacucauaaacgaccaacuaaucaugaaaaaucaccuccgcgacauaaugggcauccccuacugcaacuacuccaaguacugguaccucaaccacacaacaacaggccguaccucacugccacgaugcuggcucguaucuaacggaucguaccucaacgaaacccacuucucagacgacaucgaacaacaagcagacaacaugaucaccgaaaugcuccaaaaagaauacauggaacgccaaggcaaaacaccccucggacucguagaucuauucgucuuuagcaccucuuucuaccucauauccaucuuccuucaccuagucaaaaucccaacccaccgccacaucgucggcaaauccugccccaaaccccaccgccuaaaccacaugggaaucugcucaugcggcuuuuacaaacaaccuggcgucccaguaaaauggaaacgauaa

SEQ ID NO: 2250 - RNA, 1476 nt, Artificial Sequence
  derived and/or modified protein sequence (opt11) from LASV(G3234-SLE-2013;Clade IV)__AIT17388__GPC
augggccaaauaguaaccuucuuccaagaagucccccacgucaucgaagaaguaaugaacaucguucuuaucgcacuauccauccuagccguccugaaaggccucuacaacgucgcaaccugcggccucauaggacucguuaccuuccuuuuacucugcggccguuccugcaccaccacccucuacaaaggaguuuacgaacuucaagcccucgaacucaacauggagacacuuaacaugaccaugccccuaucauguaccaaaaacaacucccaccacuacauccgcgucggaaacgaaacaggccucgaacuaacgcucaccaacaccuccaucaucaaccauaaauucugcaaccucuccgacgcccacaaaaagaacuuauacgaccacgcgcucaugagcauaaucucaaccuuccaccucagcaucccaaacuucaaucaauacgaggccauguccugcgacuucaacggcggaaucaucagcguccaguauaaucuaucccacuccuaugccggagacgccgccaaucacugcggaaccguagccaacggaguccuccaaacauucaugcguauggcuuggggcggcuccuacaucgcccuagacuccggccgcaacggaugggacugcaucaugaccuccuaccaguaucuaaucauccaaaacaccaccugggacgaccacugccaauucucccgaccuucucccaucggcuaccuaggucuccuaucucaacgaaccagagacaucuacaucuccagacgacuccuagguacauucaccuggacccugucagacuccgaaggcaaagacacuccugguggcuacugucucacaagauggaugcucaucgaagccgaacuaaaaugcuucggaaauaccgccguagccaagugcaacgaaaaacacgacgaagaguucugcgacaugcucagacuuuucgacuucaacaaacaagcaauccaacgccuaaaaacagaagcccaaaugaacauacaacucaucaacaaagccgucaacgcgcucauaaacgaccagcucaucaugaaaaaccaccucagagacaucaugggcauaccauacugcaacuacucuaaauacugguaccuaaacaacaccgcgacaggcaaaaccucccucccccgcugcuggcuagucuccaacggcucuuaccucaacgaaacccacuucucagacgacauagaacaacaagccgacaacaugauaaccgaaaugcuucaaaaagaauacauggaacgccaaggcaaaacgccccucggccuaguagaccucuucgucuucuccaccagcuucuaccuaaucuccaucuuccuacaccucgugaaaaucccaacccaccgccacaucguuggcaaacccugcccaaaaccacaccgccucaaccacaucggcaucugcuccugcggccucuacaaacagcccggcguccccgucaaauggaaacgcuag

SEQ ID NO: 2251 - RNA, 1476 nt, Artificial Sequence
  derived and/or modified protein sequence (opt11) from LASV(G502-SLE-2009;Clade IV)__AIT17126__GPC
augggacaaaucguuacguucuuccaagaaguaccacacgucaucgaagaaguaaugaacauaguacucaucgcccuauccauccucgccguacuaaaaggccucuacaacuucgcaaccugcggacucgucggccuacucaccuuccugcuccuaugcggucgcuccugcacaacgggacucuauaaaggcgucuacgaacuccaaacacucgaacuuaacauggaaacccuaaacaugaccaugccacucucaugcaccaaaaacaacucccaccacuacaucaugguaggcaacgaaacaggacucgaacugacccucacaaacacguccaucauaaaucacaaauucugcaaccucucagacgcccacaagaaaaaccuauaugaccacgcacuaaugagcaucauaagcacauuccaccucucaauacccaacuucaaccaauacgaagccaugucgugcgacuucaacggcggaaaaauuuccguccaauacaaccuuucccacucauacgccggcgaugcagccgaccacugcggcaccgucgccaacggaguacuccaaaccuucaugcgcauggccuggggcggcagcuacaucgcucucgacagcggacgaggucguugggacugcaucaugacaucuuaccaauaccucaucauccaaaacacaacuugggaagaccacugccaguucucccgcccuucacccaucggauaccucggccuccucucacaacgcacucgagacaucuacaucucccgacgccuacucggaaccuucaccuggacccucucagacuccgaaggaaaagacacccccggcggauacugccucacacgcuggaugcuaaucgaagcagaacucaaaugcuucggcaacacagccguagcaaaaugcaacgaaaaacacgacgaagaguucugcgauauguuacgacucuucgacuuuaacaaacaagccauccaacgacuuaaagccgaagcucaaauguccauacaacuaaucaacaaagccguaaacgcccuaaucaacgaccaacucguaaugaaaaaccaccuccgagacauaaugggaauaccauacugcaacuacucccgcuacugguaccuuaaccauaccaccaccggccgcaccagccuacccaaaugcuggcucguaagcaacggcucauaccucaacgaaacucacuucuccgaugacaucgaacaacaagccgauaacaugauuaccgaaaugcuacaaaaagaauacauggaacgccaaggcaaaacaccucuaggccuagucgaccuauucgucuucucaaccucuuucuaccucaucuccauauuccuccaccuaguaaaaauccccacccaccgccacauagucggcaaguccugccccaaaccccaccgccucaaccacauggguauuugcuccugcgggcuuuacaaacaaccaggcgucccaguaaaauggaaacgcuaa

SEQ ID NO: 2252 - RNA, 1476 nt, Artificial Sequence
  derived and/or modified protein sequence (opt11) from LASV(G503-SLE-2009;Clade IV)__AIT17130__GPC
augggccaaauagucaccuucuuucaagaaguaccccacgucaucgaagaggucaugaauaucguccucaucgcccucuccauacucgcgguacucaaaggccucuacaacuuugccacaugcggcuucguaggucucguaacauuccuccuccucugcgguagaucauguacaacaucccucuacaaaggcgucuacgaacuccaaacacucgaacucaacauggaaacacucaacaugaccaugccccucucaugcaccaaaaacaacagccaucacuacauucgcgucggcaacgauacuggccucgagcucacacucaccaacaccuccaucaucaaccacaaguucugcaaccucucugacgcccacaaaaagaaccuauacgaccacgcccucauguccauaaucuccaccuuccaccucagcauacccaacuucaaccaauacgaagccaugagcugcgacuucaacggcggcaaaaucuccguccaauacaaccuaucccacuccuacgccguugacgccgcaucccacugcgggaccaucgcaaacggcguccuacagaccuucaugcgaauggcuuggggcggauccuacaucgcccucgacuccggccgcgaccgcugggacugcauaaugaccuccuaccaauaccucauaauccaaaacacaaccugggaggaccacugucaauucucccgccccucgcccauagguuaccuaggacuucuaucccaaagaacccgagacaucuacaucucccgacgccuccucggaacauucacauggacccucucagacucugaaggcaaagacacccccggcgguuacugccucacccgauggaugcucauagaagccgaacugaaaugcuucggcaacaccgccgucgcaaaaugcaacgagaaacacgacgaagaguucugcgauaugcuacgccucuucgacuucaacaaacaagccauccaacgccugaaggcagaagcccagauguccauccaacucauaaacaaagcagucaacgcccucaucaacgaccaacucaucaugaaaaaccaccuccgcgauaucaugggaauacccuacugcaacuacucaaaauacugguaccuuaaccacaccaccacaggaaaaaccucccucccaaaaugcuggcuagucuccaacggauccuaccucaacgaaacgcacuuuucagacgacaucgaacaacaagccgacaacaugauaacagaaaugcuccaaaaggaauacauggaacgccaaggaaaaaccccacuaggucucguagaccuauucgucuucagcaccuccuucuaccuaauaucgauauuccuucaucuagucaagauccccacccaccgacacaucguaggcaagucaugccccaaaccccaccgacucaaccacaugggcaucugcuccugcggccucuacaagcagcccgggguccccgucaaauggaaacgauaa

SEQ ID NO: 2253 - RNA, 1476 nt, Artificial Sequence
  derived and/or modified protein sequence (opt11) from LASV(G610-SLE-2009;Clade IV)__AIT17134__GPC
augggacaaaucguuacauucuuccaagaagucccacacgucaucgaagaagucaugaacauaguccucaucgcccuauccauccucgcaguccucaaaggccuauacaacuucgcaaccugcggucucguaggccuugucaccuuccuucuccucuguggccgcuccugcaccaccucacuauacaaagguguauaugaacuccaaacacucgaacucaacauggaaacacucaacaugaccaugccccucagcugcaccaaaaacaacagccaccacuacaucauggucggcaacgaaacagguuuagagcucacccugaccaacacgagcaucaucaaccacaaguucugcaaccucuccgacgcacauaaaaagaaccuuuacgaccacgcccuuauguccaucaucagcaccuuccaccuauccauccccaacuucaaccaguacgaagccaugucuugcgacuucaacggcggcaaaaucuccguccaauacaaccuuucacacucauacgccggcgacgccgccaaccauugcggaaccgucgccaacggaguccuccagaccuucaugcgcauggccuggggcggaucauacaucgcccucgacuccggucguggccgaugggacugcauaaugaccucauaccaauaccuaaucauacaaaacacaaccugggaagaccacugccaguucucccgcccauccccuaucggcuaccucggccuccucucccaacgcacccgcgacaucuacaucucccgacgccuccuuggcaccuucaccuggacccucucagacuccgagggcaaagacacucccggaggcuacugccuaacccgcuggaugcugaucgaagccgaacucaaaugcuucggaaacacagccgucgcuaaaugcaacgaaaaacacgacgaagaguucugcgacaugcuccgccucuucgacuucaacaaacaagcaauacaacgacuaaaagcagaagcccaaauguccauacaacucauaaacaaagcagucaacgcccucaucaacgaccaacucauaaugaaaaaccaccuccgagacauaaugggcauacccuacugcaacuacagcaaauacugguaccucaaccacaccacaaccggcaaaaccucccuccccaagugcuggcucgucucuaauggcagcuaccuuaacgaaacccacuuuuccgacgacaucgaacaacaagccgauaauaugaucaccgaaaugcuccaaaaagaauacauggaacgacaaggcaaaacaccccucggacucguagaccucuucgucuucuccaccuccuucuaccucaucuccauuuuccuccaccuagucaaaauccccacccaccgccacaucguaggaaaauccugccccaaaccccaccgccugaaccacaugggcaucugcucaugcggccuauacaaacaaccaggcguacccgucaaauggaaacgcuaa

SEQ ID NO: 2254 - RNA, 1476 nt, Artificial Sequence
  derived and/or modified protein sequence (opt11) from LASV(G636-SLE-2009;Clade IV)__AIT17138__GPC
augggucaaauaguaaccuucuuccaagaagucccccacguaaucgaagaagucaugaacauaguccucaucgcccucucaauacucgccguucuaaaaggccucuacaaucucgcuaccugcggacucgucggccucgucaccuuccuccuccucugcggccgcuccugcaccacuucucucuacaaaggcgucuacgaacuccaaacccuagaacucaacauggaaacccucaacaugacuaugccccuuuccugcaccaaaaacaacucccaccacuacaucauggucggaaaugaaaccggccucgaacuaacccuaacaaacacgagucuuaucaaccacaaauucugcaacuuaucagaugcccacaagaaaaaccucuacgaccacgcccucaugucaaucauaucaaccuuccaccucucaauccccaacuucaaccaauacgaggccaugucuugcgacuucaacggcggaaaaaucucuguccaguacaaccucucucauuccuacgccguagaugccgccagccacugcggcaccguugccaacggcguccuacaaaccuucaugcgcauggccuggggcggauccuacauagcccucgacagcgggcgcggcgguugggacugcaucaugaccuccuaccaauaccuaaucauccaaaacaccaccugggaagaccacugccaauucucuagacccucccccaucggauaccugggccucuuaagccaacgcacacgcgacaucuacaucucccgccgccuccuaggcacuuucaccuggacucuauccgacuccgaaggcaaagacacccccgguggcuacugccugacccgauggaugcucaucgaagccgaacuaaaaugcuucggaaauacagccguagccaaaugcaacgaaaaacacgacgaggaguucugcgacaugcuccggcuauucgacuucaacaaacaagccauccaacgccucaaagcagaagcccaaaugagcauccaacuaaucaacaaagccgucaacgcccuaaucaacgaccaacucaucaugaaaaaccaccuccgcgacauaaugggcauucccuacugcaacuacuccaaauacugguaccuaaaccacaccaccaccggacgcaccucccuccccagaugcuggcucgucuccaacggcuccuaccuaaacgaaacccacuucucagaugacauugaacaacaggccgacaacaugaucaccgaaaugcuccaaaaagaguacauggaacgucagggcaaaacaccccucggacucgucgaccucuucguuuucuccacauccuucuaccucaucucaaucuuccuccaccuagucaaaauccccacccaccgccacaucgucggcaaaucaugcccaaaaccucaucgccucaaccacaugggaaucugcuccugcggccucuacaaacaacccggcguccccguaaaauggaaacgcuaa

SEQ ID NO: 2255 - RNA, 1476 nt, Artificial Sequence
  derived and/or modified protein sequence (opt11) from LASV(G692-SLE-2009;Clade IV)__AIT17146__GPC
augggucaaaucguaaccuucuuucaggaaguaccccacgucauagaagaaguaaugaacaucguccuaaucgcacucuccauacuagccguccuuaaaggccucuacaaccucgccacaugcggucuaguuggccuagucacauuucuccuccucugcggacgcucgugcacaaccucacuauacaagggagucuacgaacuacaaacccuagaacucaacauggaaacccuaaauaugaccaugccccucuccugcaccaaaaacaacucccaccacuacaucaugguuggaaacgaaacaggccucgagcucacccuuaccaacacauccaucaucaaccacaaauucugcaaccuaucagacgcacacaagaaaaaccucuacgaccacgcccucaugagcaucaucuccaccuuccaccucuccauccccaacuucaaccaauacgaagcuaugagcugcgacuucaacggcggcaaaaucuccguccaguacaaccucucucacuccuaugccggcgacgccgcaaaccacugcggcacugucgccaacggaguacuccaaaccuucaugcgcauggccuggggcggcagcuacaucgcccuagacagcggcagaggccgcugggacugcaucaugacaagcuaccaauaccugaucauccaaaacaccaccugggaagaucacugcuccuucucacgccccuccccaaucggauaccucggccugcuaucacaacgcacccgcgacaucuacauuucccgucgccuccucggcacauucaccuggacauuauccgacagcgaaggaaaagacacccccggaggcuacugccucaccagauggaugcucauagaagccgaacucaaauguuucgguaacaccgccguagccaaaugcaacgaaaaacacgacgaagaguucugcgauaugcuacgacuauucgacuucaauaaacaagcaauccaacgccucaaagcagaagcacaaaugucgauccaauuaaucaacaaagccgucaacgcccucaucaacgaccaacuaaucaugaaaaaccaccuccgcgacaucaugggcauccccuauugcaacuacuccaaauauugguaccucaaccacaccacaaccggcaaaaccucacuccccaagugcuggcuaguauccaacggcucauaccuaaacgaaacucauuucuccgacgacauagaacagcaagcagacaacaugaucaccgaaaugcuccaaaaagaauacauggaacgccaaggcaaaaccccacuuggccuugucgaccucuuugucuucuccacauccuucuaccucauuucuaucuuccuccaccucgucaaaauccccacccaccgucacauugucgguaaaucaugcccaaaaccucaccgauuaaaccacaugggcauaugcuccugcggcuucuacaaacaacccggcgucccuguaaaauggaaacgcuaa

SEQ ID NO: 2256 - RNA, 1476 nt, Artificial Sequence
  derived and/or modified protein sequence (opt11) from LASV(G733-SLE-2010;Clade IV)__AIT17154__GPC
augggccaaaucgucaccuucuuccaggaagucccccacgucaucgaagaagucaugaacauaguccucauagcccugucaauccucgccguccucaaaggacucuacaacuucgccacuugcggaauagucggccuagucuccuuucuacuucucugcggacgcucaugcacaaccagccuguacaaaggcguauacgaacuccaaacacuugaacugaacauggaaacccucaacaugaccaugccccucuccugcaccaaaaacaacucccaccacuacauaauggucggcaacgaaacaggccuagaacucacccucacaaacaccuccaucaucaaucacaaauucugcaaccuaucagacgcccauaagaaaaaccucuacgaccaugcccucaugagcaucaucucaacauuccaccucuccauccccaacuucaaccaauacgaagccauguccugcgauuucaacgguggcaaaaucagcguacaguacaaccuaucucacucauacgccggcgacgccgccaaccacugcggcaccauagccaacggcguacugcaaacauucaugcgcauggccuggggcggcuccuacaucgcgcucgauucaggccgcgaccgcugggacugcauaaugaccucauaccaguaccuaaucauccaaaacacaaccugggaagaccacugccaauucucccgacccucucccauaggcuaccucggccuucucucccaacgaacccgagacaucuacaucagccgccgacuucucggcaccuucaccuggacccucagcgacuccgaaggcaaagacaccccuggcggcuacugccucacacgguggaugcuaaucgaggccgaacuaaaaugcuucggaaacaccgcaguugccaaaugcaacgaaaaacacgacgaagaguucugugauaugcuccgccucuucgacuucaacaaacaagcuauacaacgccucaaagccgaagcacaaauguccauccaacuaaucaacaaagccgucaaugcccugaucaacgaccaacugaucaugaaaaaccaccuccgggacauaaugggcauccccuacugcaacuacucgaaguacugguaucuuaaccacaccaccaccggaaaaacaagccuccccaaaugcuggcucguauccaacggauccuaccucaacgaaacccacuucucagacgacaucgaacaacaagcggacaacaugauaacugaaaugcuccaaaaagaauacauggaacgccaaggaaagaccccacuaggcuuaguugaccuauucguauucuccaccuccuucuaucucaucuccaucuuccuacaccucgucaaaauccccacccaccgacacguagucggcaaaucaugccccaaaccccaccgccugaaccacaugggcauaugcagcugcggucuuuacggucaacccggaguacccgucaaauggaaacgcuaa

SEQ ID NO: 2257 - RNA, 1476 nt, Artificial Sequence
  derived and/or modified protein sequence (opt11) from LASV(G771-SLE-2010;Clade IV)__AIT17158__GPC
augggacagaucgucaccuucuuccaagaaguaccccacgucaucgaagaagucaugaacaucguccucauagcccuuucaauccucgcaguccucaaaggccuuuacaacuucgcaaccugcggacucguaggccucgucaccuuccuacuccucugcggacgaucuugcacgaccucacuauauaaaggcgucuacgaacuacaaacccucgaacucaacauggagacgcucaacaugaccaugccccuauccugcaccaaaaacaacucccaccacuacaucaugguaggcaacgagaccgggcucgaacucacccucaccaacaccuccaucaucaaccacaaguucugcaaccucuccgacgcccacaagaaaaaucuuuacgaccacgcccuaauguccauaaucucaaccuuccaccucucaauccccaauuucaaccaauacgaagccauguccugcgacuucaauggcggcaaaaucagcguccaauacaaccuaucgcacuccuacgccggugacgccgccaaccacuguggcaccgucgcaaacggaguacuccaaacauucaugcgcauggccuggggcggcagcuacauagcacucgauuccggccgcgaccgcugggacugcauaaugacaucauaccaauaccucauaauccaaaacaccacaugggaagaccacugccaauucagccgccccagccccaucggcuaucugggccuucucucacaaagaacccgugacaucuacaucucuagacgacuacucggaaccuucaccuggacccucuccgacuccgaaggcaaagacacccccggaggauauugccucacccgcuggaugcucauagaagccgaacucaaaugcuucggcaacaccgccgucgccaaaugcaacgaaaaacacgacgaagaguucugcgacaugcuccgcuuauucgacuucaacaaacaagcaauccaacgccuaaaagccgaagcacaaaugagcauccaacugaucaacaaggcagucaacgcccuaaucaacgaccaacucauaaugaaaaaccaccuccgagacaucauggguauacccuacugcaauuacuccaaauacugguaccucaaccacaccaccaccggcaaaaccagccuccccaaaugcuggcucgucuccaacgguuccuaucucaacgaaacccacuucuccgacgacauagaacaacaagcagacaacaugaucaccgagaugcuccagaaagaauacauggaacgccaaggcaaaacaccccucggccuugucgaccuauucgucuucucaaccucauucuaccuaaucuccaucuuccuccaccucgucaaaauccccacccacagacacaucguaggcaaaucaugcccuaaaccacaccgccucaaccacaugggcauuugcucaugcggccucuacaagcaaccaggcgucccagucaaauggaaacgcuaa

SEQ ID NO: 2258 - RNA, 1476 nt, Artificial Sequence
  derived and/or modified protein sequence (opt11) from LASV(G808-SLE-2010;Clade IV)__AIT17164__GPC
augggccaaaucguuacauucuuccaggaagucccccacgucaucgaagaaguaaugaacaucguccuaaucgcucucagcauccucgccguacucaaaggacucuacaacuucgcuaccugcggacucguaggccucguuaccuuccuacuccucugcggccgcuccugcacaagcucucucuacaaagguguauacgaacugcaaacacucgaacucaacauggaaacccucaacaugaccaugccgcucucaugcacuaaaaacaacucucaccacuacauacgcgucggaaacgaaaccggacucgaacucacccuaacaaacaccuccaucaucgaccacaaauucugcaaucuguccgacgcccauaaaaagaaccucuacgaccacgcccuuaugucaauaauauccaccuuccaccuauccauccccaacuucaaccaauacgaagccauguccugcgacuucaacggcggcaaaauuuccguccaauacaaccuaucgcacuccuacgccggcgacgccgcaaaacauugcggcaccgucgcaaacggaguucuccaaaccuucaugcgcauggcauggggcggcuccuacaucgcucucgacucaggccacggaaacugggauugcaucaugaccuccuaccaauaccucauaauacaaaacaccaccugggaagaccacugccaauucucacgacccagccccauuggcuaccucggccuccucucacaaagaacacgcgacaucuacaucucccgccgccuccuaggcaccuucaccuggacacuguccgacucagaaggcaacgacgccccaggcggcuacugccucaccagauggaugcuaauacaagcagaacucaaaugcuucgguaacacagccgucgccaaaugcaacgaaaaacacgacgaggaguucugugacaugcuccgacucuucgacuucaauaaacaagccauccaacgccuaaaagccgaagcccaaauguccauacaacuaaucaacaaagcaguaaacgcacuaaucaacgaccaacuaaucaugaagaaccaccuccgcgacaucaugggcauccccuacugcaacuacagcaaauacugguaccucaaccauacaaccaccggccgaaccucccuuccccgcugcuggcuuguuagcaacggcuccuaccucaacgaaacccacuucuccgacgacauagaacaacaagcagacaacaugaucaccgaaaugcuccaaaaagaauacauggaacgccaaggcaagacaccacuaggccucgucgaccucuucguauucucgaccuccuuuuaccuaaucuccaucuuccuccacuuggucaaaaucccuacacaccgccacaucgucggcaaaagcugcccuaaaccccaccgccucaaccacaugggcaucuguuccugcggccuuuucaaacaaccaggcguacccguaaaauggaaacgauaa

SEQ ID NO: 2259 - RNA, 1476 nt, Artificial Sequence
  derived and/or modified protein sequence (opt11) from LASV(Guinea Faranah;Clade IV)__AMZ00381__GPC
augggccaaauaguaaccuucuuccaggaagucccccacguaaucgaagaagucaugaacauaguacucauagcccucuccauccuagccguacucaaaggauuguauaacgucgcaaccugcggacucauaggacugauagccuuccugcuccugugcggccgauccugcaccuccacccucuacaaaggcgucuacgaacuacaagcccucgaacuaaacauggaaacacuaaacaugaccaugccacucuccugcacuaaaaacaacucccaccacuacauaaugguaggcaacgaaaccggccucgaacucacccucaccaacaccagcaucaucaaccacaaauuuugcaaccuaagugacgcccacaaaaagaaccucuacaaccacgcacucauguccaucaucuccaccuuccaccugaguauccccaacuucaaccaauaugaagccaugucaugcgacuuuaacggcggaaaaaucuccgugcaauacaaccucucccacuccuacgccguagacgcagccaaucacugcggaaccgucgccaacggcauacuacaaaccuucaugagaauggccuggggcggguccuacauagcacuagacucaggccacggcgguugggacuguaucauguccucauaccaguaccuggucauccaaaacaccacaugggaagaccacugccaauucucgcgcccaagccccaucggcuaccugggacuucucucacaacgcaccagagacaucuacaucucacgccgccugcuaggaaccuucaccuggacccuaagcgacuccgaaggcaaagacacacccggaggcuacugccucaccagauggaugcuaauagaagccgaacugaaaugcuucggcaauacagccgucgccaaaugcaacgagaaacacgaugaagaguucugcgauaugcuucgacucuucgacuucaacaaacaagcuauccaacgccucaaagccgaagcccaaaugucuauccaacucaucaacaaggccgucaacgcccucaucaacgaccaacucauaaugaaaaaccaccuccgagacaucaugggaauccccuacugcaacuacagcaaauacugguaccuaaaccauacaaucaccggccguaccucccuaccaaaaugcuggcucgucuccaacggcuccuacuuaaacgaaacccacuucuccgacgacaucgagcaacaggcugacaacaugaucaccgaaaugcuccaaaaagaauaccucgaacgacaaggaaaaaccccucucggacucguagaccuguucguauucucaaccagcuucuaccuaauuuccaucuuccuccaccuaaucaaaauucccacccaccgccacaucgucggcaaauccugccccaaaccccaccgccucaaccacaugggcgucugcucaugcggacucuacaaacagcccggcgucccaguccgcuggaaacgcuaa

SEQ ID NO: 2260 - RNA, 1476 nt, Artificial Sequence
  derived and/or modified protein sequence (opt11) from LASV(GUINEA Z-185a;Clade IV)__AMZ00377__GPC
augggccaaaucgucacuuucuuccaagaagucccccacgucaucgaagaagucaugaacaucguacucauagcccuauccauacucgccguccucaaaggccuauacaacguagcuaccugcggacuaaucggccucguaaccuuucuauuccuaugcggccgcuccugcuccaccucccucuacaaaggcguauacgaacuccagacccucgaacucaacauggaaacccuaaacaugaccaugccccucuccugcacaaagaacaacucacaccacuacauaauggucggcaacgaaacaggacucgaacucacacucacaaacacuuccaucaucaaccacaaauucugcaaccucagcgacgcccacaagaaaaaccucuacgaccacacccucauguccaucaucuccaccuuccaccuauccaucccaaacuucaaccaauaugaagccaugucaugcgacuucaacggcggcaaaaucucuguacaauacaaccucucacacucauacgccguagacgccgccaaccacugcggcaccgucgccaacggcguucugcaaaccuucaugcgcauggcauggggcggauccuacaucgcccucgacuccggccgaggcaacugggacugcauuaugaccuccuaccaauacuuaguaauccaaaacaccaccugggaagaccacugccaauucucccgccccuccccaaucggcuaccuaggccuccuaucccaacgcacucgugacauauacauuucacgccggcucuuaggcaccuucaccuggacccuaagcgacuccgagggcaaagacacccccggcggauacugccucacacgcuggaugcucaucgaggccgaacuaaaaugcuuuggcaacaccgcugucgccaaaugcaacgaaaaacacgacgaagaguucugcgacaugcuucgccucuucgacuucaacaagcaagccauacaacgacucaaagccgaagcccaaauguccauccaacucaucaacaaagccgucaacgcacuaaucaacgaccaacucauaaugaaaaaccacuuacgugacaucaugggcaucccauacugcaauuacuccaaguacugguaccucaaccacacagucaccggcaaaaccagccuccccaaaugcuggcucgucagcaacggaucauaccucaacgaaacccacuucucagacgacaucgaacaacaagcggacaaccucauaacagaaaugcuacagaaagaauacauggaacgccaggguaaaacaccccuaggccuuguagaccucuucguauucuccaccagcuucuaccucaucuccauauuccuacaccucguaaaaaucccaacacaccgccacaucguaggcaagcccugccccaagccccaccgucuaaaccacaugggcaucugcucgugcggcguuuacaaacaacccgguguacccguccgauggaagcgcuaa

SEQ ID NO: 2261 - RNA, 1476 nt, Artificial Sequence
  derived and/or modified protein sequence (opt11) from MOPV/LASV reassortant(IGS-1;Clade IV)__AFY05576__GPC
augggccaaaucgucaccuucuuccaagagguaccccacgucaucgaagaagucaugaacaucguacucaucgcccuuuccguccucgcaguacuaaaaggacuauacaacuucgccacuugcggccuagucggacucgucaccuuccugcuccuauguggccgcagcugcaccacuucccuuuacaagggcgucuacgaacuccaaacccucgaacucaacauggaaacccucaacaugaccaugccccucuccuguaccaaaaacaacucucaccacuacauaauggucggcaacgaaacuggccucgaacucacacucaccaacacguccaucaucaaccacaaauucugcaaccucagcgacgcccacaaaaagaaccucuacgaucacgcccucauguccauaaucagcaccuuccaccucuccauccccaacuuuaaccaauacgaagcaauguccugcgauuucaacgguggcaaaaucuccguccaauacaaccuaucccacuccuacgccggagacgccgcgaaccacugcggcacagucgccaacggaguccuccaaacauucaugcgaauggccuggggagguagcuacauagcccucgauucaggcagaggcaacugggacugcaucaugaccucauaccaauaccucaucauccaaaacacaacaugggaagaccacugccaauucagccgacccagccccaucgguuaccuaggccuccucucccaacgcacacgagacaucuacaucucacgacgucuacucgguaccuucaccuggacacucuccgacuccgaaggugaagacacccccggcggcuacugccucacccgcuggaugcucaucgaagccgagcucaaaugcuucggaaacaccgccguagcaaaaugcaacgagaaacacgacgaagaguucugcgacaugcuucgccucuucgacuucaacaaacaagccauacaacgccuaaaagccgaagcccaaaugucaauccaacucaucaacaaagcuguaaacgcacuaaucaacgaccaacucaucaugaaaaaucaucuucgcgacaucauggguauccccuacugcaacuacuccaaauacugguaccucaaccacacaaccaccggacgaaccucccucccuaaaugcuggcucguaucaaacggcuccuaccuuaacgaaacccacuucucagacgacauagaacaacaagccgacaacaugaucacagaaaugcuucaaaaagaauacauggaacgccaaggaaaaacuccccuaggucucgucgaccucuucgucuucuccaccagcuucuaccuaaucucgauauuccuacaccuagucaaaauacccacccaccgccacaucguaggcaaaagcugccccaaaccccaccgccucaaccacaugggcauaugcuccugcggccuauacaagcagcccggugucccugucaaauggaaacgcuga

SEQ ID NO: 2262 - RNA, 1476 nt, Artificial Sequence
  derived and/or modified protein sequence (opt11) from MOPV/LASV reassortant(IGS-11;Clade IV)__AFY05588__GPC
augggacaaaucguuaccuucuuccaagaagucccgcacguaaucgaagaaguaaugaacauaguccucaucgcucucagcguccuggccguccugaaaggccucuacaauuucgcaaccuguggccucgucggccuaguaacauuccuccuacucugcggccgcuccugcaccaccucccucuacaaaggcgucuacgaacuccagacccucgaacucaacauggaaacccucaacaugaccaugccacucucaugcaccaaaaacaacagccaccacuacauaauggucggcaacgaaacaggccuagaacucacacucacuaacaccuccaucaucaaccacaaauuuugcaaccucagcgacgcccacaagaaaaaccucuacgaccacgcacuaauguccauaaucuccaccuuccaccuauccauccccaacuucaaccaauacgaagcaaugucaugcgacuucaacggcggcaaaaucuccguacaauacaaccucucccacagcuacgcuggagacgccgccaaccacugcggcaccguagccaacggaguccugcaaacuuucaugcgcauggccuggggaggcuccuacaucgcacuagacagcggccgaggcaacugggacuguauaaugaccuccuaccaauaccuuaucauacaaaacacuaccugggaagaccacugccaauucagccgacccucacccaucggcuaccucggacuccucucucaacggacccgggaccucuacauaagccgacgccuccucggcaccuucaccuggacccuguccgacucugagggagaagacacucccggcggcuacugccucaccagauggaugcucaucgaagccgaacucaaaugcuucgguaacaccgccguagccaaaugcaacgaaaaacacgacgaagaguucugcgacaugcuccgccuauucgacuucaacaaacaagcaauccagcgccucaaggccgaagcccaaauguccauccaacucaucaacaaagccgucaacgccuuaauuaacgaccaacucaucaugaaaaaccaccuacgcgauaucaugggcaucccauacugcaacuacucuaaauacugguaccucaaccacacaacaaccggacgcaccucacuaccaaaaugcuggcuagucuccaacggaucauacuuaaacgaaacccacuucuccgacgacaucgaacaacaagccgauaacaugauaacagaaaugcuccaaaaagaauacauggaacgacaaggaaaaacaccccucggccuaguagaccucuucgucuucucaaccuccuucuaccuaaucuccaucuuccuccaccucgucaaaaucccaacacaccggcacaucgucggaaaaucaugcccuaaaccgcacagacucaaccacaugggcauaugcuccugcggacucuacaaacaaccaggcgucccggucaaauggaaacgauaa

SEQ ID NO: 2263 - RNA, 1476 nt, Artificial Sequence
  derived and/or modified protein sequence (opt11) from MOPV/LASV reassortant(IGS-12;Clade IV)__AFY05590__GPC
augggccaaaucgucaccuucuuccaagaagucccacacguaaucgaggaagucaugaacaucgugcuaaucgcccucuccguacucgccguccucaaaggccuauacaacuucgcaaccugcggccucgugggccucgucaccuuccugcuccucugcggccguuccugcacaaccucucucuacaaaggcguauacgaacuacaaacacucgaacuaaacauggaaacccucaacaugaccaugccccuaagcugcaccaaaaacaacucgcaccauuacaucauggucggcaacgaaaccggccucgaacuaacccuaaccaacaccucaaucaucaaccacaaauucugcaaccuguccgacgcccacaagaaaaaccucuacgaccacgcccuaaugucaauaaucucaaccuuccacuuauccauccccaacuucaaucaauacgaagccauguccugcgauuucaacggcggcaaaaucuccguccaauacaacuugucccacucauacgccggagacgccgcaaaucacugcggcaccguagcaaaugggguccuccaaaccuucaugcgcauggcaugggguggauccuacaucgcccucgacucuggucgaggaaacugggacuguaucaugaccuccuaucaauaccucaucauucagaacacaacuugggaagaccacugccaauucucccgccccagccccaucgguuaccucggacuccuaucccaacgaacacgagacauguacaucucucgacgacuccucggcaccuucaccuggacccuauccgacucagaaggcgaagacacccccggaggcuacugccuaacccgcuggaugcuaaucgaagccgaacuuaaaugcuucggcaacaccgccgucgccaaaugcaacgaaaaacacgacgaagaguucugcgauaugcuacgccuauucgacuucaacaaacaagccauccaacgccuaaaagccgaagcccaaauguccauacagcucaucaacaaggccguuaacgcccucaucaacgaccaacuaaucaugaaaaaccaccuccgagacaucauggguaucccauacugcaacuacuccaaauacugguaccucaaccacaccaccaccggccgcaccagccuacccaaaugcuggcucgucuccaacggcuccuaccucaacgaaacccacuucuccgacgacauagaacaacaggccgacaacaugaucacagagaugcuccagaaagaauacauggaaagacaaggaaaaacaccccucggccucgucgaccucuucgucuucuccaccuccuucuaccucaucuccaucuuucuccaccuuguaaaaauacccacccaucgccacauagucggcaaaucaugccccaaaccccacagacuaaaccacaugggcaucugcucuugcggccucuacaaacaacccgggguacccguaaaguggaaacgauaa

SEQ ID NO: 2264 - RNA, 1476 nt, Artificial Sequence
  derived and/or modified protein sequence (opt11) from LASV(LM032-SLE-2010;Clade IV)__AIT17802__GPC
augggacaaauaguuaccuucuuccaagaagucccacacguaaucgaagaagucaugaacaucguacucaucgcccuauccauccucgcaguccucaagggccucuacaaccuagcaacaugcggccucgucggccucgucacguuccuccuccucugcggcagaucaugcacuaccucccucuauaaaggugucuacgaacuacaaacccucgaacucaacauggaaaccuuaaacaugacaaugccacuaucuugcaccaaaaacaacucccaccacuacauaauggucggaaacgaaaccggccucgaacucacccucacgaacacauccaucaucaaccacaaauucugcaaccuaagcgacgcccacaagaaaaaccucuacaaccacgcccuaaugucuaucaucucaaccuuccaccuauccauccccaacuucaaccaauaugaggccauguccugcgacuucaacggcggcaaaaucuccguccaauacaaccucucccacuccuacgccggcgacgccgccaaccacugcggaaccgucgccaacggcguccugcagaccuucaugcgcauggccuggggcggcucuuacaucgcccuagacuccggccgugaccgcugggacugcaucaugaccuccuaccaauaccuuauaauccaaaacaccaccugggaagaccacugccaguucucacgcccaucacccaucggcuaccuaggccuccuaucacaacgcaccagagacaucuauaucucccgccgcuuacucggaaccuucaccuggacccucucagacuccgagggcaaagacacaccaggaggcuacugucucacccgcuggaugcucaucgaagcagaacucaaaugcuucggcaacaccgcagucgccaaaugcaacgaaaaacacgaugaagaguucugcgacaugcuccgccucuucgauuucaacaaacaagccauacaacgccucaaagcagaagcccaaaugucaauccagcucaucaacaaagccgucaacgcccucaucaacgaccaacucaucaugaaaaaccaccuccgcgacauaaugggcauccccuacugcaacuacuccaaauacugguaccucaaccacacaaccaccggcaaaacaagccuacccaaaugcuggcuugucagcaacggauccuaccucaacgaaacccauuucucggacgacauugaacaacaggcggauaacaugaucaccgaaaugcuccaaaaagaauauauggaacgccuuggcaaaacaccccucggccucgucgaccuuuucguauucuccacaucguucuaccuaaucucaauauuccuccaccuggucaaaaucccuacacacagacacaucgucggccgcuccugcccaaagccccaucgucucaaccacauggguaucugcuccugcggacucuauaagcaacccggcguaccggucaaauggaaacgauag

SEQ ID NO: 2265 - RNA, 1476 nt, Artificial Sequence
  derived and/or modified protein sequence (opt11) from LASV(LM222-SLE-2010;Clade IV)__AIT17806__GPC
augggccagaucgucacuuucuuccaggaagucccacacgucauagaagaaguaaugaacaucguacucaucgcacuauccauccucgcuguucucaaaggccucuacaacuucgcuaccugcggccucaucggccucgucaccuuccuccuccucugcggucgcuccugcaccaccucacucuacaaaggagucuacgaacuacaaacgcucgaacucaacauggaaacacugaacaugaccaugccccucuccugcaccaaaaacaacagccaccacuacaucauggucggcaacgaaaccggccucgagcuaacccucaccaacaccuccaucauaaaccacaaguucugcaaccuaagcgacgcccacaagaaaaaccucuacgaccacgcccucaugucaaucaucuccacuuuccaccuuucaauacccaacuucaaccaauacgaagccaugucaugcgacuucaacggcggaaaaaucuccguccaguacaaccucucacacucguacgccggcgacgccgccaaccacugcggaacuguagccaacggcguccuacaaacauucaugcgaauggcauggggcggcuccuacaucgcacucgacuccggccgcggaaaaugggacugcauaaugaccuccuaccaauaccuuaucauccaaaacacaaccugggaagaccacugccaauucucccgcccaucccccauuggguaccugggccuccucucacaacgcacccgcgacauauacauaagccgccgccuacucggcacauucaccuggacccuaucugacucggaaggcaaagacacacccggaggcuacugccugacacgcuggaugcucauagaagccgaacucaaauguuucgguaacacggcagucgccaaaugcaacgaaaaacaugacgaagaguucugcgacaugcucagacucuucgauuucaacaaacaagccauccaaagacuuaaagcugaagcacaaaugucuauacagcucauaaacaaagcugucaacgcccucaucaacgaccaacucauuaugaagaaucaccucagagacaucaugggcaucccauacugcaacuacucuaaauacugguaccuaaaccacaccacuacaggcaaaaccucccucccuaaaugcuggcucgucuccaacggcagcuaccugaacgaaacacacuucuccgacgacaucgaacagcaagccgacaacaugauuaccgaaaugcuccaaaaagaauacauggaacgacaaggcaaaaccccacucggccucguagaccuauucgucuucuccaccuccuucuaccuaaucuccaucuuccuacaccucgucaaaauccccacacaccgccacaucgucggaaaauccugcccaaaaccacaccgucucaaucacaugggcaucugcucuugcggacucuauaaacaaccaggcgucccagucaaauggaaacgcuga

SEQ ID NO: 2266 - RNA, 1476 nt, Artificial Sequence
  derived and/or modified protein sequence (opt11) from LASV(LM395-SLE-2009;Clade IV)__AIT17810__GPC
augggccaaauagucaccuucuuccaagaagucccacacgucauagaagaaguaaugaacaucguuuuaauugcucuuuccauccucgccguucucaagggccucuacaaccucgcaaccugcggccucgucggucucguaaccuuccuccuccucugcggacgcucuugcaccaccagccucuacaaaggcgucuacgaacuacaaacacuagaacucaacauggaaacacugaauaugaccaugccccucucaugcaccaaggacaacucccaucacuacauccgcgucggcaacgaaacaggccuagaacucacacuaaccaacaccuccauccucaaccacaaguucugcaaccuauccgacgcccacaagaaaaaccucuacgaccacgcccuaauguccaucaucuccaccuuccaccucuccauccccaauuucaaccaauacgaagcuauguccugcgacuucaacggcggacgcauauccguacaauauaaccucagccacuccuacgccggagacgcagccaaccacugcggcaccguagcaaacggcguccuccaaacguucaugagaauggccuggggcggcagcuauaucgcccuagacuccggccgcggccgaugggacugcaucaugaccuccuaccaauaccugauaauccaaaacaccaccugggaagaccacugccaauucucacgccccagcccaauuggcuaccuuggccuccuuucccaacgaacccgcgauauauacaucucccgccgccuccucggaacauucaccuggacccuuuccgacuccgaaggcaaagacacccccggcggcuacugccuaacaagauggaugcucaucgaagccgaacucaagugcuucggaaacaccgccgucgcaaaaugcaacgaaaaacacgacgaagaguucugcgacaugcuccgucuuuucgacuucaacaaacaagcaauccaacgccuaaaagcugaagcacagauguccauccaacuuauaaacaaagccgucaacgcacuaaucaacgaccaacuaaucaugaaaaaccaccuccgugacauaaugggcauaccauacugcaacuacuccaaauacugguaccuaaaccacaccaccaccgguaaaaccagucucccacgcugcuggcucgucuccaacggcucuuaccucaacgaaacucacuucucagacgacaucgaacaacaagccgacaacaugauaacagaaaugcuccaaaaagaauacauggaacgccaaggcaaaaccccacucggccucgucgaccuuuucgucuucuccacauccuucuaucucaucuccauauuccuccaccuugucaaaauacccacacaccgccacgucgucggcaaacccugcccuaaaccacaccgacuaaaccacaugggcaucugcagcugcggacuauacaagcaaccaggcgugcccgucaaauggaagcguuaa

SEQ ID NO: 2267 - RNA, 1476 nt, Artificial Sequence
  derived and/or modified protein sequence (opt11) from LASV(LM765-SLE-2012;Clade IV)__AIT17814__GPC
augggccaaaucgucaccuucuuccaagaaguaccacacgucaucgaagaagucaugaacaucguacucauagcccuaagcauccucgccguacucaaaggacucuacaacuucgcaacuugcggccucgucggccucguaacauuccuucugcucugcggucgaagcugcaccaccucccuauacaaaggcgucuacgaacuccaaacacuagaacucaacauggaaacccucaacaugaccaugccccuaucaugcaccaaaaacaacucccaccacuacaucauggucgguaacgaaacaggccuagaacucacucuaacaaacaccuccaucaucgaucacaaauucugcaaccucucagacgcgcaccggaaaaaccucuacgaccacgcacucauguccaucauauccacguuccaccuuucaauccccaacuucaaccaauacgaagcuaugucaugcgacuucaacggcgguaagauaucaguccaguacaaccucucccacuccuacgccaaggacgccgcagaccacugcggcaccgucgccaacggcguccuccaaaccuucaugcgaauggccuggggcggcuccuauaucgcccucgacucaggccgaggccgcugggacugcaucaugaccagcuaccaauaccucaucauccaaaacacaaccugggaagaccacugccaauucucacgaccaucuccuaucggcuaccuaggcuuacucucccaacgcacccgagacaucuacauaagccgccgccuacuugguacauucaccuggacacuauccgacuccgaaggaaaagacaccccugguggauauugccuaacacgcuggaugcucaucgaagcagagcucaaaugcuucggcaacaccgccguagcaaaaugcaacgaaaaacacgacgaagaguucugcgacaugcuccgccucuucgacuucaacaaacaagccauccaacgccuaaaagccgaagcccaaauguccauacaacucaucaacaaagcagucaacgcccucaucaacgaccagcucaucaugaaaaaccaccuuagagacauaaugggcaucccauacugcaacuacucaaaauauugguaucucaaccacacaaccaccggaaaaaccagccuccccaaaugcuggcucgucaguaauggaucauaccucaacgaaacccacuucuccgacgacauugaacaacaagcagacaauaugaucacugaaaugcuucaaaaagaauacauggaacgacaaggcaaaacuccucucggccucgucgaccucuucgucuucagcaccagcuucuaccucaucucgaucuuccuacaccuugucaaaauccccacacaucgccacaucgucggaaaacccugccccaaaccccaccgccucaaccacaugggaaucugcucaugcggccucuauaaacaacccggcguccccgucaaauggaaacgcuaa

SEQ ID NO: 2268 - RNA, 1476 nt, Artificial Sequence
  derived and/or modified protein sequence (opt11) from LASV(LM774-SLE-2012;Clade IV)__AIT17820__GPC
augggacaaaucgucaccuucuuccaagaagucccccacgucaucgaagaaguaaugaacaucguacuaaucgcccuaagcauccucgccguccugaaaggacuauacaacuucgcaaccugcggccucgucggccuaguuacauuccuucuccucugcggccgcuccugcacaaccucacuuuacaaaggagucuacgaacuccaaacccuggaacucaacauggaaacccucaacaugaccaugccccucuccugcaccaaaaacaacucacaccacuacaucauggucggcaacgaaaccggucuugaacucacacucacaaacaccagcaucaucaaccacaaauucugcaaccucuccgacgcccacaagaaaaaccuauacgaccacgcacuuaugucaaucaucucuaccuuccaccuuuccaucccuaacuucaaucaguacgaagccaugucaugcgacuucaacggcggcaaaauauccguccaauacaaccucucccacucauacgcagaggacgcagccaaccacugcggcaccgucgccaacggcguccuccaaaccuucaugcgaauggccuggggaggcuccuacaucgcacucgacuccggaagaggcaacugggacugcauuaugaccucauaccaauaucucaucauccaaaacaccacaugggaagaccacugccaauucucccgacccucccccaucggcuaccuuggccuccucucccaaagaacucgcgacaucuacaucucccgccgacuccucggcaccuucaccuggacgcuaucugacucagaaggcaaagacacccccggaggauacugccuaacaagauggaugcucaucgaggccgaacucaaaugcuucggaaacaccgccguugccaaaugcaacgaaaaacacgacgaagaguucugcgacaugcuccgccucuucgacuucaacaaacaagccauacaacgucuuaaagccgaagcccaaaugagcauacaacucaucaacaaagcagucaacgcccugaucaacgaccagcucaucaugaaaaaucaccuacgagacaucaugggcauuccauacugcaacuacuccaaauacugguaccuaaaccacacgaccaccggaaaaaccucccuaccaaaaugcuggcuagucucgaacggcuccuaccuaaaugaaacccacuucuccgacgacaucgaacaacaagccgacaacaugaucaccgaaaugcuacaaaaagaauacauggaacgccaaggcaaaacaccccucggucuaguagaccucuucgucuucuccacguccuucuaccucauauccauauuccuccaccucguaaaaauacccacccaccgccacaucguuggaaaauccugccccaagccccaccgacuuaaccauaugggcaucugcagcugcggccucuacaaacaacccgguguccccgucaaauggaaacgcuaa

SEQ ID NO: 2269 - RNA, 1476 nt, Artificial Sequence
  derived and/or modified protein sequence (opt11) from LASV(LM776-SLE-2012;Clade IV)__AIT17824__GPC
auggggcaaaucgucaccuucuuccaagaaguuccccacgucaucgaagaagucaugaacaucguacuaaucgcccucuccauccucgcaguacuaaaaggacucuacaacuucgccacaugcggccucgucggccucgucacauuccuacuccuaugcggccgcucaugcaccaccuccgucuacaaaggcgucuacgaacuccaaacccucgaacucaacauggaaacccucaacaugaccaugccucucuccugcaccaaaaacaacucccaucacuacaucauggucggcaacgagaccggacuagaacucacacucacaaacaccuccaucaucaaccacaaauucugcaaccuaucugacgcacacaagaaaaaccucuacgaccacgcccucaugucaauuaucuccaccuuccaccuauccauacccaacuucaaccaauacgaagccaugucaugcgacuucaacggcggcaaaaucuccguccaauacaaccucagccacucauacgcuggcgacgccgcuaaccacugcgguaccgucgccaacggcguccugcaaacauucaugcgcauggccuggggcggauccuacaucgcccucgacuccggacacgggaaaugggacugcaucaugacuuccuaccaauaccucauaauacaaaacaccaccugggaagaccacugccaguucucccgaccauccccaaucggauaccucggacuccuaucucaacgcacccgagacaucuacaucagccgacgccuccuuggcaccuucaccuggacccucucagacuccgagggcaaagacaccccgggcggcuacugccucacccgcuggaugcuaauagaagccgaacucaaaugcuucggcaacaccgccguagccaaauguaacgaaaaacacgacgaagaguucugcgauaugcuucgccucuucgacuucaacaaacaagcaauccaacgacucaaagcagaagcacagaugagcauucaacuuaucaauaaagccguaaacgcccugaucaacgaccaacucaucaugaaaaaccaccuucgcgacauaaugggcauccccuacugcaacuacuccaaauacugguacuugaaccacaccaccaccgguaaaacuagccuaccuaaaugcuggcuugucucuaacggauccuaccucaacgaaacacacuucagcgacgacaucgaacaacaagccgauaacaugaucacagaaaugcuccagaaagaguacauggagcgccaaggaaaaaccccgcucggccuagucgaccucuucguauucuccaccagcuucuaucucaucuccauauuccuccaccucgucaaaaucccuacccaccgccacauaguagguaaaucaugcccaaaaccccaccgacucaaccacaugggcaucugcuccugcggccucuacaaacaaccaggcguacccguucgauggaaacgauga

SEQ ID NO: 2270 - RNA, 1476 nt, Artificial Sequence
  derived and/or modified protein sequence (opt11) from LASV(LM778-SLE-2012;Clade IV)__AIT17828__GPC
augggacaaaucgucaccuucuuccaagaagucccccacgucaucgaggagguuaugaacauuguacucauagccuuaucuauccucgccguccuaaaaggacucuacaacuucgccacaugcggccucgucggacucgucaccuuccuccuccuaugcggacgcuccugcaccacaucccucuacaaaggagacuaugaacuccaaacacuggaacucaacauggaaacccucaauaugaccaugccccucuccugcaccaaaaacaacucacaccacuacaucauggucggaaacgaaaccggccuugaacuaacccucacaaacaccuccaucaucaaccacaaauucugcaaucugagcgaugcccacaagaaaaaccuauacgaccacgcccuaauguccauaaucuccaccuuccaccucagcauaccuaacuuuaaccaauacgaagcgaugucaugcgacuucaacggcggaaaaaucucaguccaauacaaccucucacacuccuacgccggcgacgcagccaaccacugcggcaccguagcaaacggcguccuccaaaccuucaugcgcauggccuggggaggcucauacaucgcccucgacagcggccgcggcaacugggacugcaucaugacauccuaccaauaccucaucauacaaaacaccaccugggaggaccauugccaauucucccgacccuccccaaucggcuaucuaggacuccucucccaacgcacacgagacaucuacaucagccgacgccuccucggaaccuucaccuggacccucuccgacuccgaagggaaagacacacccgguggcuacugccucacccguuggaugcuaaucgaagcagaacucaaaugcuucggcaacacagccguagccaaaugcaacgaaaaacacgacgaagaguucugcgacaugcuccgacucuucgacuucaacaaacaagccauccaacggcucaaagcagaagcucaaauguccauccaacuaaucaacaaagccgucaacgcccucaucaacgaccaacucaucaugaaaaaccaccuccgagacaucaugggcauaccauacugcaacuacucaaaauacugguaccugaaccacaccaccaccggcaaaacuucacuccccaaaugcuggcucgucuccaacggcuccuaccuaaacgaaacccacuucagcgacgacauugaacaacaagcagacaacaugaucaccgaaaugcuccaaaaagaauacauggaacgccaaggcaaaaccccucucggccuugucgaccucuucguauucagcacaucauucuaccucaucuccauauuccuucaccucgucaaaauuccgacccaccgccauauugucggaaaaucuugcccgaagccacaccgccucaaccacaugggcaucugcuccugcggacucuacaaacaacccggcguccccguuaaauggaaacgcuag

SEQ ID NO: 2271 - RNA, 1476 nt, Artificial Sequence
  derived and/or modified protein sequence (opt11) from LASV(Mad39;Clade IV)__ANH09722__GPC
augggccaaaucguaacuuucuuccaagaagucccccacguaauugaagaagugaugaacaucguccucaucgcccucuccauccuagccguacugaagggccucuacaacguagcaacgugcggccucaucggccucgucaccuuccuacugcucugcggaagaucaugcaccaccacccucuacaagggagucuacgaacuccaagcccucgaacucaauauggaaacccuaaacaugaccaugccacuauccugcaccaaaaacaacagccaccacuacauucgcgucgguaacgaaacaggccucgaacuaacccuuaccaacaccucccucaucaaccacaaauuuugcaaucugucugacgcacacaagaaaaaccucuacgaccacgcacucaugucaaucaucuccacauuccaccuauccauaccaaacuucaaccaguacgaggcaauguccugcgacuuuaacgauggcaaaaucucaguccaauauaaccucucccacaccuacgccggagacacagccaaccacugcggaaccgucgcaaauggcguacuccaaacuuucaugcgaauggccuggggcggauccuacauagcccuagacuccggacgcggagguugggacuguaucaugaccuccuaucaauaccuaaucauacagaacaccaccugggaagaccacugccaauucucacgacccucuccgaucggcuaccucggccuccuaucacaacgaacccgggacauauacaucucacgccgacuauuaggcacguucaccuggacacucucagacucagaaggaaaagauacccccggaggcuacugccugacccgauggaugcucaucgaagcagaacucaaaugcuucggaaacaccgccguugccaaaugcaacgaaaaacacgacgaagaguucugcgacaugcuccgacuauuugacuucaacaaacaagccauccagcgccucaaagccgaagcccagaugucaauccaacuaauaaacaaagcagucaacgcccucaucaacgaccaacucaucaugaaaaaccaccuacgcgacauaaugggcaucccauacugcaacuacuccaaauacugguaccuaaaccacaccguaaccgguaaaacaucacuuccuaaaugcuggcucgucuccaacggaagcuaccuaaacgaaacacacuucucagacgacaucgaacaacaagcagacaacaugauuacagaaaugcuccaaaaagaauacauggaacgacaaggcaagacaccacucggccucgucgaccucuucgucuucagcaccucauucuaccucaucuccaucuuccuucaccucgugaagauacccacccaccgucacgucguagguaaacccugcccaaaaccccaccgacucaaccacaugggaauaugcuccugcggcuucuacaaacaacccggcguucccguccgauggaaacgcuaa

SEQ ID NO: 2272 - RNA, 1476 nt, Artificial Sequence
  derived and/or modified protein sequence (opt11) from LASV(Mad41;Clade IV)__ANH09724__GPC
augggccaaaucgucacauucuuucaggaagucccccaugucauagaagaagucaugaacaucguccucaucgcccuaucaaucuuagcaguacucaagggccuguacaacguagcaaccugcggccuaaucggccuaguaaccuuccuccuccuaugcggccgcuccugcacgacaacacucuacaaaggcguguacgaacuccaagcccucgaacucaacauggaaacccuaaacaugaccaugcccuugagcugcaccaaaaaugacucccaccacuacaucaugguuggcaacgagaccggacucgaacucacccugacaaacaccucaaucaucucgcacaaguucugcaaccugucugaugcccacaagcaaaaccucuacgaccacgcccuaaugagcauaaucucgaccuuccaccucuccauccccaacuucaaccaauacgaagcuauguccugcgacuucaacggcggcaaaaucucaguccaauauaaccuaucccacaccuacgccggcgacgccgccaaccauugcggcaccgucgccaacggcguccuacaaaccuucaugcgaauggccugggguggcuccuauaucgcccucgacucuggccgcggcggaugggacugcaucaugaccuccuaccaguaccucaucauccaaaacaccaccugggaagaccacugccaauucucacgccccucccccauaggcuaccucggacuccucucgcaacgcacucgagacauauacauaucacgacgccuccucggcacuuucaccuggacccucuccgauagcgaaggcaaagacacacccggcggcuacugccuaacccgcuggaugcucaucgaagccgagcuaaaaugcuucggcaacaccgccgucgcaaagugcaacgaaaaacacgacgaagaauuuugcgacaugcucagacuauucgacuucaacaaacaagccauucaacgucucaaagcugaagcucaaaugagcauacaacugaucaacaaagccguaaacgcccuaaucaacgaccaacucaucaugaaaaaccaccuccgcgacauaaugggaauacccuacugcaacuauuccaaauacugguaccuaaaccacaccgucaccggaaaaacauccuuacccaaaugcuggcuaguuuccaacggcuccuaccuaaacgaaacacacuucuccgacgauaucgagcaacaagccgacaacaugauaaccgaaaugcuccaaaaagaauacauggaaagacaaggaaaaacaccccuuggauuagucgaucucuucgucuucuccaccucuuuuuaccuuaucucaaucuuccuccaccucguaaaaauccccacccaccgacacgucgucggaaaacccugccccaaaccacaccgacucaaccacaugggcaucugcucaugcgguuucuacggccaacccggcguaccuguccgauggaaacgcuaa

SEQ ID NO: 2273 - RNA, 1476 nt, Artificial Sequence
  derived and/or modified protein sequence (opt11) from LASV(Mad63;Clade IV)__ANH09728__GPC
augggacaaaucgucaccuucuuccaagaagucccccacguuauagaagaagucaugaacaucguccucaucgcucucuccguccucgccguacucaagggccuuuacaacgucgcuaccugcggccucaucggccucgucaccuuccuccugcucugcggccgcuccugcaccacaacccucuacaaaggaguauacgaacuccaagcccuugaacuuaauaugggcacccucaauaugaccaugccccuauccugcaccaaaaacaauucacaccacuacaucauggucggcaaugagaccggccucgaacugacccuaaccaacaccagcaucaucaaccauaaauucugcaaccuaucagacgcccacaagaaagaccucuacgaccacgcccuaauguccauuaucucaaccuuccaccucuccguaccuaacuucaaucaauacgaggccauguccugcgacuucaacgguggaaaaaucucaguccaauacaaccucucccacgcauacgccggagauaccgcuaaccacugcgguacuguagccaacggcguccuacaaaccuucaugcgcauggcauggggcggcuccuacaucgcccucgacucaggccgcggcggcugggacugcaucaugaccuccuaccaauaccucaucauccaaaacaccaccugggaagaccacugccaauucucacgccccucgcccauugguuaccuaggccuccucucccaacgcacacgcgacauauacauaucacgacgccuccucgguaccuucacauggacccuauccgacuccgaaggcgaauauacacccggcggcuacugccucacacgcuggaugcucauugaagccgaacucaaaugcuucggcaacaccgccguugcgaaaugcaacgaaaaacacgacgaggaguucugcgauaugcuccgccucuucgauuucaacaaacaagcuauacaacgccugaaagcagaagcacaaaugucaauacaacucaucaacaaagcagucaacgcccucaucaacgaccaacucaucaugaaaaaucaccuccgcgacauaauggguauccccuacugcaacuacuccaaauacugguaccucaaccacacugucacgggaaaaaccucacucccaaaaugcuggcuugucuccaacggcucauaccucaacgaaacccacuucuccgacgacaucgaacagcaagccgacaacaugaucaccgaaaugcuacaaaaagaauauauggaacgccaaggcaaaacuccccucggacucgucgaccuuuucgucuucucaaccuccuucuaucucaucagcaucuuccuccaccucgucaaaauccccacucaccgacacgucgucggcaaacccugccccaaaccacaccgacuaaaccacaugggcaucugcagcugcggcuucuacaaacaacccggcguacccguacgcuggaaacgcuaa

SEQ ID NO: 2274 - RNA, 1476 nt, Artificial Sequence
  derived and/or modified protein sequence (opt11) from LASV(Mad69;Clade IV)__ANH09730__GPC
augggacaaaucgucaccuucuuccaagaagucccccacgucaucgaggaaguaaugaacauaguccucauagcccucucuguccuagcuguccuaaaaggacuuuacaacgucgcaaccugcggccucaucggccuaguuaccuuccuacuauuaugcggacguucaugcacaacuacacucuacaaaggcgucuacgaacuucaagcccuagaacucaacauggaaacccucaacaugaccaugccauuauccugcaccaaaaacaacucucaccacuacaucauggucggcaaugaaaccggccuagaguuaacccucacaaacaccuccauuaucaaccauaaauucugcaaccugucagacgcccacaaaaagaaccuauacgaccaugcucugaugagcaucaucuccaccuuccaccucagcaucccaaacuucaaccaauacgaagccauguccugcgacuucaaccaagguaaaaucuccguccaauacaaccucucccacgccuacgccggcgacgcagccaaccacugcggcaccguagcgaacggaguccuacaaacuuucaugcgcauggcauggggcggaagcuacaucgcacucgacuccggccgcggcggcugggacugcauuaugacaucauaccaauaccucaucauccaaaacacaaccugggaaaaccacugccaauucucucgccccagcccuaucggcuaccuaggacuccucucccaaagaacccgcgacauauauaucuccagacgccuucucggaaccuucaccuggaccuuaagcgacuccgagggcaagggcacccccgggggcuacugccuaacccgauggaugcuuaucgaagccgaacugaaaugcuucggcaacacagccguagcuaaaugcaacgaaaaacacgacgaagaguucugcgacaugcuccgccuauucgacuucaacaaacaagccauccaacgcuucaaagcagaagcccaaauguccauccaacucauaaacaaagcggucaacgcacucaucaacgaccagcuuaucaugaaaaaccaccuccgugacaucauggggaucccauacugcaacuacagcaaguacugguaccucaaccacacagucaccggaaaaacaucccugcccaaaugcuggcuaguuuccaacggcuccuaccucaaugaaacccacuuuuccgacgacaucgaacaacaagccgacaacaugaucaccgaaaugcuccaaaaggaauacauggaacgccaaggccgcacaccccucggacucgucgaccucuucguuuucuccaccuccuucuaccugaucuccaucuuccuccaccuagucaaaauccccacacaccgucacgucgucgguaaaccaugccccaaaccucaccgccuaaaccacaugggcauaugcucaugcggcuucuauaaacaacccggcguccccguccgcuggaagcgcuaa

SEQ ID NO: 2275 - RNA, 1476 nt, Artificial Sequence
  derived and/or modified protein sequence (opt11) from LASV(Mad83;Clade IV)__ANH09732__GPC
augggccaaaucguaacauucuuccaagaagucccccacgucaucgaggaaguaaugaacaucguccucaucgcacuauccauacucgccguacugaaaggcgucuacaacgucgcuaccugcggccucauaggccucgucacauuccuccuccucucaggucgcucauguaccacaaccaucuauaaaggagucuacgaacuacaagcccuagaacuaaacauggaaacccuuaauaugacaaugccgcugucaugcaccaaaaacaacucccaccacuacaucauggucggcaacgaaacaggucucgaacucacccucacuaacacauccaucaucaaucacaaauucugcaaccucucagacgcccacaagaaaaaccuuuacgaccacgcccucaugucaaucaucucuaccuuccaccucucuauccccaauuucaaccaauacgaagccaugucaugcgacuucaacggcggcaaaaucagcguccaauacaaccuaucacacaccuacgccggcgacgccgcaaaccacugcggcaccguagccaacggaguccuccaaaccuucaugcgcauggccuggggcggcagcuacauagcacucgacuccggacacggcggcugggacugcauaaugacguccuaccaauaccuaaucauccaaaacacaacaugggaaaaccacugccaauucucccgcccaucaccaaucggcuaccucggacuccucucccagcgcacccgcgacauauacaucucccgccgccuccuugguacuuucaccuggacccucagcgacuccgaagggaaagacacccccggcggcuacugucuuacccgauggaugcuuauagaggcugaacuaaaauguuucggcaacacugccguagcaaaaugcaacgaaaaacacgacgaagaguucugcgacaugcuacgacucuucgacuucaacaaacaagccauccaacgccuaaaagcagaagcccaaaugucaauccaacucaucaacaaggccgucaacgcccucaucaacgaccaacuaaucaugaaaaaccaccuucgcgacaucauggggauccccuacugcaacuacuccaaauacugguaccucaaccacaccguaacaggaaaaacuucccuaccaaaaugcuggcucguaagcaacggauccuaccucaacgaaacacacuucuccgacgauaucgaacaacaagccgacaacaugaucaccgaaaugcuccaaaaagaauacauggaacgacaagggaaaaccccucucggucucgucgaucuauucguauucuccaccuccuucuaccucaucucgauuuuccuacaccuaguaaaaauccccacccaccgacacaucguaggcaaacccugcccaaaaccccaccgccucaaccacaugggcaucugcuccugcggcuucuacaaacagcccggcguccccguacgcuggaaacgcuaa

SEQ ID NO: 2276 - RNA, 1476 nt, Artificial Sequence
  derived and/or modified protein sequence (opt11) from LASV(NL;Clade IV)__AAO59512__GPC
augggccaaaucgucacuuucuuccaagaaguuccucacguaaucgaagaaguaaugaacaucguccucauagcccucucaauccucgcaguacuaaaaggacucuacaacuucgccaccuguggccucgucggccuagucgccuuccuccuacugugcggacgaagcugcacauccucccucuacaaaggcgucuacgaacugcaaacccucgaacuaaacauggaaacccucaacaugaccaugccccucucuugcaccaagaacaacucccaccacuacauacgcguagguaacgagaccggccucgaauuaacccucacaaacaccucaaucauaaaccacaaauucugcaaccuauccgacgcccacaagaaaaaccucuacgaccacgcgcucaugucaauaaucucaaccuuccaccucagcaucccuaacuucaaccaauacgaagcuauguccugcgacuucaauggcggcaaaaucucaguccaauacaaccucucccacuccuacgcagucgacgccgccaaacacugcggcacugucgccaacggcguccuccagaccuucaugcgcauggccugggguggcucauacaucgcacucgacucaggccacggacgcugggacugcaucaugaccuccuaccaauacuuaaucauccaaaacaccaccugggaggaccacugccaauucucacgccccuccccgaucggcuaccucggccuacucucccaacgaacacgcgacauauacauaucgcgccgccuccucgguaccuucacauggacccucucagacuccgagggcaaagacacacccggcggcuacugccucacccgcuggaugcucaucgaagccgaacuaaaaugcuucggcaauacagccguggccaaaugcaacgaaaagcacgaugaagaguucugcgacaugcuccgccucuucgacuucaacaaacaagccauccaacgccuaaaaaccgaagcccaaauguccauccaacucaucaacaaagccgucaacgcccuaaucaacgaccaacucaucaugaaaaaccaccuccgagacaucaugggaauccccuacugcaacuacucacgauacugguaccuaaaccacaccacaaccggcaagaccagccuccccaaauguuggcucgucagcaacggcuccuaccuaaacgaaacacgcuucagcgacgacaucgaacaacaagccgauaacaugaucaccgaaaugcuccaaaaagaauacauggaacgacaaggcaaaacaccccugggccuagucgaccuauucgucuucuccaccucauuuuaccucaucuccaucuuccuacaccucgucaaaauccccacacaccgccauauaguuggcaaauccugcccuaagccccaccgccuaaaccacaugggcaucugcucgugcggacucuacaaacaaccagguguaccggucaaguggaaacgcuaa

SEQ ID NO: 2277 - RNA, 1476 nt, Artificial Sequence
  derived and/or modified protein sequence (opt11) from LASV(Z0947-SLE-2011;Clade IV)__AIT17840__GPC
augggccaaauugucaccuucuuccaggaagucccucacgucaucgaagaagucaugaacaucguacugaucgcacucucgauccucgcuguccugaaaggccuauacaacuucgcaaccugcggacucgucggacucguaacauuucuccuccucuguggccgaucuugcacaaucucccuauacaaaggcgucuacgaacuucaaacccuagaacuaaauauggaaacccucaacaugacaaugccccucuccugcacuaaaaacaacucacaccacuacauaaugguagguaacgaaaccggccucgaacucacccucaccaacaccuccaucaucaaccacaaauucugcaaccuuuccgacgcccacaagaaaaaccuauacgaccacgcccucaugucaauaaucuccacauuccaccucuccauccccaauuucaaccaauacgaagccaugucaugcgacuucaacgguggaaaaauauccguacaauacaaccucucccacuccuacgccggcgacgcugccaaccacugcggcacagucgccaacggcguccuccaaaccuucaugagaauggcguggggcggcuccuacauagcccucgacagcggccgugaccgcugggacugcaucaugacuuccuaccaguaccucaucauccaaaauacgacaugggaagaccacugccaauucucccgcccgucccccaucggcuaccuuggccuccuaucacaaagaacacgcgacaucuacaucucccgccgccuccuggguaccuucacauggacccucuccgacagcgaaggcaaagacacccccggcggcuacugccucacccgauggaugcucaucgaagcagaacucaaaugcuucggcaauaccgccgucgccaaaugcaacgaaaaacacgacgaagaauuuugcgacaugcucagacucuucgacuucaacaaacaagcgauccaacggcuaaaagccgaagcccaaaugucuauccaacuaauaaacaaagccgucaacgcacuaauaaacgaccaacuaaucaugaaaaaccaucuacgugacaucaugggcaucccauacugcaacuacuccaaauauugguaccuaaaccacacaacaaccggaaaaaccucacuuccuaaaugcuggcucgucuccaauggcuccuaccucaacgaaacucacuucucugacgacaucgaacaacaagccgacaacaugauuacagaaaugcuccaaaaagaauauauggaacgccaaggaaaaaccccacucggccuaguagacuuauucgucuucuccaccagcuucuaccucaucucaaucuuccuccaccucgucaaaauccccacacaccgccacaucgucggcaaacccugccccaaaccccaccgccugaaccacaugggcaucugcagcugcggccucuacaaacaacccgguguuccaguaaaguggaaacgauag

SEQ ID NO: 2278 - RNA, 1476 nt, Artificial Sequence
  derived and/or modified protein sequence (opt11) from LASV(Z0948-SLE-2011;Clade IV)__AIT17844__GPC
augggccaaaucguaacauucuuccaagaagucccccacguaauagaggaagucaugaacauugucuuaaucgcccucagcauccucgcaguccuuaaaggacucuacaauuucgcaaccugcggccuugucggauuagucaccuucuuacuccucugcggucguuccugcacaaucucacucuacaaaggcgucuacgaacuacaaacccucgagcuaaacauggaaacccucaacaugaccaugccccucucaugcaccaaaaacaacucccaccacuacaucauggucggaaacgaaacaggccuagagcucacccucaccaacacauccaucaucaaccacaaauucugcaaccucagcgacgcccacaagaaaaaccucuacgaccacgcccuaaugucaauaaucucgaccuuccaccuauccauccccaacuuuaaccaauacgaagcaauguccugcgacuucaacggcggcaaaaucagcguccaauauaaccuaucccacuccuacgcaggcgacgcugccaaccacugcggaaccgucgcaaacggcguccuccaaacauucaugcgaauggccuggggcggguccuacaucgcacuugacagcggccgagaccgcugggacugcaucaugaccuccuaccaauaccugaucauacaaaacaccacaugggaagaccacugccaauucucacgacccucucccaucgguuaccucggccuacucucccaaagaacccgcgauaucuacaucagccgacgacuacucggcaccuucaccuggacccucuccgacagcgagggcaaagacacccccggcggcuacugccuaacucgcuggaugcucaucgaggcugaacuaaaaugcuucggcaacaccgcagucgccaaaugcaacgaaaaacacgacgaagaguucugcgacaugcuccgccucuucgacuuuaacaaacaagccauccagcgccucaaagccgaagcccaaaugucaauccaacucaucaaccgagccgucaacgcacuaaucaacgaccaacucauaaugaaaaaccaccuccgagacaucaugggcauccccuacugcaacuacagcaaauacugguaccuaaaccacaccacuaccgggaaaaccucccuccccaaaugcuggcucgucuccaacgguuccuaccuaaacgaaacccacuucucugacgacaucgaacaacaagcagacaacaugaucaccgagaugcuccaaaaagaauacauggaacgccaaggaaaaacuccccucggccucguagaucuauucguauucucgaccuccuucuaccucaucagcauauuccuccaccucgucaaaauccccacccaccgacacaucgucggcaaaccaugccccaaaccccaucgccuaaaccacaugggaauuugcucaugcggccucuacaaacaacccggcguccccgucaaauggaaacgcuaa

SEQ ID NO: 2279 - RNA, 1476 nt, Artificial Sequence
  derived and/or modified protein sequence (opt11) from LASV(Z148;Clade IV)__AAT49008__GPC
augggccaaaucgucaccuucuuccaagaagucccccacgucaucgaagaagucaugaacaucguccucaucgcccuguccauccucgcgguacucaaaggccucuacaacgucgcuaccugcggguuaauaggacucgucacauuccucuuccuuugcggccgcuccugcucgaccacacucuacaaaggagucuacgaacuccaaacucuugaacucaacauggaaacccuuaacaugaccaugccccuaucaugcaccaaaaacaacucccaccacuacauaaugguugguaacgaaaccgggcucgaacuaacccucaccaacaccuccauaaucaaccacaaauucugcaaccucucagacgcccacaagaaaaaccuauacgaccacaccuugaugaguauaaucagcacauuccauuuaagcauccccaacuucaaccaauacgaagccaugucaugcgacuucaacggaggcaaaauauccguacaauacaaccuaucccacuccuacgccguggacgccgccaaccacuguggcaccgucgccaacggcguccuacaaaccuucaugcgcauggccuggggcggauccuacaucgcacuagacucuggccgcggcaacugggacugcauaaugaccucauaccaauaccuaaucauacagaacaccaccugggaagaccacugccaguucucccgcccaucaccaaucggcuaccucggacuacucucacaacgaacacgagacaucuacaucucccgcagacuccucggaacuuucaccuggacgcuuagcgacuccgaaggcaaagauacccccggaggcuauugccucacccgguggaugcucaucgaagccgagcucaaaugcuucggcaacacagcagucgcuaaaugcaacgaaaaacacgacgaggaguucugcgacaugcuacgccuauucgacuucaacaaacaagccauucaacgucuaaaagccgaagcacaaauguccauccaacucaucaacaaagcugucaacgcccuaaucaacgaccaacucaucaugaaaaaccaccuacgcgacaucaugggcaucccguacugcaacuacucccgcuacugguaccucaaccacaccgucaccggcaaaaccucccuuccaaaaugcuggcucgucuccaacgguucauaccuuaacgaaacccacuucagcgacgacauagaacaacaagcagacaaccuaauuacagaaaugcuucaaaaagaauacauggaaaggcaaggcaaaacuccccugggacucgucgaccuauucgucuucucaaccuccuucuaccucaucuccaucuuccuccaccucguaaaaauccccacacaccgccacaucgucggcaaacccugccccaaaccccaccgccuuaaccacaugggcauaugcuccugcggcgucuauaaacaacccggaguacccgucagauggaaacgcuaa

SEQ ID NO: 2280 - RNA, 1476 nt, Artificial Sequence
  derived and/or modified protein sequence (opt11) from LASV(Bamba-R114;Clade V)__AHC95555__GPC
augggccaaauaguuacuuucuuucaagaagucccacacguaaucgaagaaguaaugaacauaguccucaucgcccucuccauccuggcaguccuuaaaggacucuacaacaucgccaccuguggccucaucggccucguaacauuccuccuccucugcggucggucuugcuccucaaaccucuacaaaggcgucuacgaacuccaaucacucgaccucaacauggaaacccucaacaugaccaugccccucucuugcaccaaaaacaacucacaccacuacauacgcgccggaaacgaaaccggccucgaacucacccucaccaacacuucucuaauaaaccacaaauucugcaaccuuuccgacgcccacaagaaaaaccucuacgaccacacccucauguccaucaucucaaccuuccaccuauccauccccaauuucaaccaauacgaagcaauguccugcgacuucaacggcggcaaaaucuccguccaauacaaccucucccacgcuuacgccaucgaugccgccgaacacugcggaaccgucgccaacggcguccuccaaaccuuuaugcgcauggccuggggaggcucauacaucgccuuagacuccggacgcggaaacugggacugcaucaugaccuccuaccaauaccuaaucauccaaaacacaacaugggaagaccacugccaauucucgcgccccucccccauaggauaccucggacuacucagccaacgaacucgagacaucuacaucagccggcgccuucuaggcaccuucaccuggacccucuccgacucggaaggcaacgccacacccggaggauacugccuaacccgcuggaugcuaaucgaagccgaacucaaaugcuucggaaacaccgcagucgcaaaaugcaacgaaaaacacgacgaagaguucugcgacaugcuccgacucuucgacuuuaacaaacaagccaucucucgccucaaaagcgaagcacaaauguccauacaacucaucaacaaagccgucaacgcccuaaucaacgaccagcucaucaugaaaaaccaccuccgcgacaucaugggaaucccauacugcaacuacuccaaauacugguaccucaaccacacaaucacuggacgcacuucccuuccaaaaugcuggcucguaucuaacggcuccuaccuaaacgaaacacacuucuccgacgacaucgaacaacaagcugacaacaugauuaccgaaaugcuucaaaaagaauacauggaacgccaaggcaaaacaccccucggccuagucgaccucuucgucuucuccaccucauucuaccucaucagcauuuuccuccaccuaguaaaaauucccacccaccgacacaucguaggcaaaccaugucccaaaccgcaccgccuaaaccacaugggcaucugcuccugcggauuauacaaacaacccggcgucccccucaaauggaaacgcuag

SEQ ID NO: 2281 - RNA, 1476 nt, Artificial Sequence
  derived and/or modified protein sequence (opt11) from LASV(Komina-R16;Clade V)__AHC95557__GPC
augggacaaauugucaccuucuuccaagaagucccccacguaauagaagaggucaugaacaucguacucaucgcccuuuccauccuugccguccuaaagggccucuacaacaucgcaaccugcggccucauaggccucguuacauucuuccuccucugcggccgcuccugcuccuccaaccucuacaaaggcgucuacgaacuacaaucacucgauuuaaacauggaaacccucaacaugaccaugccacucucaugcaccaaaaacaacucccaccacuacauccgggucggaaacgaaaccggccuagagcucacccuaaccaacaccucccuccuaaaccacaaauucugcaaccucuccgacgcccacaaacgaaaccucuacgaccacgcacucauguccauaauauccacauuccaccucuccauccccaacuucaaccaauacgaagcaauguccugcgacuuuaacggaggcaaaauuaccgugcaauacaacuuaucacacucuuacgcuggcgacaccgccaaacacugcggcacuauagcuaauggaguacuccaaaccuucaugcgcauggccuggggcggauccuacaucgcacuugacuccggacacggaaacugggacugcaucaugaccuccuaccaguaccuaaucauccaaaacacuacaugggaagaccacugccaauucagccgccccagccccaucgguuaccucggccuccucucccaacgaacccgcgacaucuacaucucccgccgccuacucggcaccuucaccuggacccucuccgacucggaaggaaacgccacacccggcggauacugccucacucgcuggaugcuaauugaggcggaacucaaaugcuucgggaacacagcugucgccaaaugcaacgaaaaacacgacgaagaguucugcgacaugcuacgccuauucgacuucaauaaacaagccaucucccgucuacgcuccgaagcccaaauguccauccaacuaaucaacaaagccgucaacgcccuaaucaacgaccaacuaaucaugaaaaaccaccuccgcgauaucaugggcauaccauauugcaacuacagcaaauacugguaucuaaaucacaccgucaccggccgcacaucccuccccaaaugcuggcucgucuccaacggaucauaccucaacgaaacacacuucuccgacgacaucgaacaacaagccgacaacaugaucaccgaaaugcuccaaaaagaauacauggacagacaaggaaaaacaccccucggccuagucgaccucuucguauucuccaccagcuucuaccucaucagcauuuuccuacaccuggucaaaaucccuacccacagacacaucgucggaaaacccugccccaaaccccaucgacucaaccgaaugggcaucugcucaugcggacuauacaaacaaccuggaguccccgucaaauggaaacgcuaa

SEQ ID NO: 2282 - RNA, 1476 nt, Artificial Sequence
  derived and/or modified protein sequence (opt11) from LASV(Ouoma-R123;Clade V)__AHC95559__GPC
augggccaaaucaucaccuucuuccaagaagugccccacgucaucgaagaagucaugaacaucguccucaucgcccucagcauacucgccgugcuaaaaggccuauacaacaucgcuaccugcggccucauuggccucgucaccuuccugcuccuuugcggccguuccugcucaagcagccuauacaaaggcguuuacgaacugcaaagccucgaccuaaacauggaaacucuaaacaugacaaugccccucuccugcaccaagaacaacucccaccacuacauacgcguaggcaacgaaaccggccucgagcucacacuaacaaacaccucccucauaaaccacaaauucugcaaccucuccgacgcccacaagaaaaaccuauacgaccacgcccuaaugucaaucaucuccaccuuccaccuauccauaccaaacuucaaccaguacgaagccauguccugcgacuucaacggcggcaagaucuccguccaauacaaccucucccacgcauacgccaucgacgccgcaucccacugcggcaccguagcaaacgggguacuacaaaccuucaugcguauggccuggggcggcuccuacauagcccucgacagcggccacgguaacugggacugcauaaugaccagcuaccaguaccuaaucauccaaaauaccacaugggaagaccacugccaauucagccgaccauccccaaucggauaccuaggccuccuaucucagcguacccgcgauauauacaucucccggcgccuucucggcaccuucaccuggacccucuccgacagcgaagguaaugccacgcccggaggcuacugccuuacacgcuggaugcuaaucgaagccgaacuaaagugcuucggcaacaccgccgucgcuaaaugcaaugaaaaacacgacgaagaguucugcgacaugcuucgacucuucgacuucaacaaacaagcaaucucacgccuaaaauccgaagcacagauguccauucaacucaucaacaaagccgucaacgcccugaucaaugaccaacucaucaugaaaaaccaucuccgugacauaaugggcauccccuacugcaacuacucaaaguacugguaccucaaccacaccgucacaggaaaaaccagccucccaaagugcuggcucguauccaacggaagcuaccucaaugaaacccacuucuccgacgacaucgaacaacaagccgacaacaugaucaccgaaaugcugcagaaagaauacauggaaagacaaggcaaaacaccccucggacuugucgaccuauucgucuucuccaccagcuucuaccuaaucuccauauuccuccaccuugucaaaauccccacccaccgucacauagucggcaaaccaugccccaagccccaccgccucaaccauaugggcaucugcuccugcggccucuacaaacaacccgggguccccguaaaauggaagcgcuaa

SEQ ID NO: 2283 - RNA, 1476 nt, Artificial Sequence
  derived and/or modified protein sequence (opt11) from LASV(Soromba-R;Clade V)__AHC95553__GPC
augggccaaaucgucaccuucuuccaagaagucccucacgucaucgaagaaguaaugaacaucguccucauagcacucagcauccucgccguccugaaaggacucuacaacaucgcgaccugcggccucauaggucucguaacauucuuccuccucugcgggcgcuccugcucaucuaaccucuacaaaggcgucuacgaacuccaaucacuugaccuuaacauggaaacacucaacaugacaaugccccucuccugcaccaaaaacaacagccaccacuacauccgagucggcaacgaaaccggccucgaacucacacuaaccaacaccucccugcucgaccacaaauucugcaaccucucagacgcccacaagaaaaaccuguacgaccacgcccuaaugagcaucaucucaaccuuccaccuauccauccccaacuuuaaccaauacgaagccauguccugcgacuucaacggcggcaaaaucaccguccaauacaaccucucccacuccuacgcaggcgacgccgcccgccacugcggaaccauagcaaaugguguacuacaaaccuucaugcgaauggccuggggcggcucauacaucgcccucgacuccggccacggcaacugggacugcaucaugaccuccuaccaauaccuaaucauccaaaacacaacaugggaagaccacugccaauucucccgccccuccccuaucggcuaccuuucccuacucucacaacgcacccgagacaucuacaucucccgccgccuacucggcacuuucacauggacccucagcgacagcgaaggcaacgccacacccggcggauacugccucacacgcuggaugcucauagaagccgaacucaaaugcuucggaaacaccgcagucgccaaaugcaacgagaaacaugacgaagaguucugcgauaugcuacgccuauucgacuucaacaaacaagccaucucccgccuucgcuccgaagcccagaugucaauccaacucaucaacaaagccgucaacgcacucaucaacgaccagcuaaucaugaaaaaccaccuccgugacauuaugggcauccccuacugcaacuacagcaaauacugguaccucaaccacacagucaccggcagaaccucccuacccaagugcuggcucgucuccaacggcuccuaccucaacgaaacccacuucuccgacgacaucgaacagcaagcugacaacaugaucaccgaaaugcuccaaaaagaauacauggaccgccaaggcaagacaccccuaggccuagucgaccucuucgucuucuccaccuccuucuaccucauaucaaucuuccugcaccuaguaaaaauccccacccaccgacacaucgucggaaagccuugccccaaaccacaccgacuaaaccgcaugggcauaugcucaugcggacuauacaaacagcccggcgugcccguaaaauggaagagauaa

SEQ ID NO: 2284 - RNA, 1473 nt, Artificial Sequence
  derived and/or modified protein sequence (opt11) from LASV(Alzey;Clade VI)__SCA79105__GPC
augggucagauaaucaccuuuuuccaagaggucccccacgucaucgaagaaguaaugaauaucguccucauagcucucucacuacucgcaauccucaaagguguauacaauguagcaaccuguggcauaaucggacucgucaccuuccucuuccucugcggccgauccugcucccucaucuacaagggcuccuacgaacugcaaacccuagaacucaacauggaaacccucaacaugaccaugccccucucaugcaccaaaaacucuagccaccacuacauccgaguaggaaacgaaacuggccuggaacucacguuaaccaacaccucaaucaucaaucacaaauucugcaaccucucagacgcccacaaacgaaaccucuacgaccacgcccucauguccauccucuccaccuuccaccucuccaucccuaacuucaaccaauacgaagccaugucaugcgacuuuaacggcggaaagauauccguacaauacaacuuaucacacgcauacgcagucgacgccgccgaacauugcggaacagucgccaacggaguccuccaaaccuucaugcgcauggcauggggcggcuccuacauagcacucgacucaggacgcggaaacugggacugcaucaugaccuccuaccaauaccuaaucauacaaaacaccaccugggaagaccacugccaguucagccgccccucccccaucgguuaccuaggccuccuaucacaacgaacacgagauaucuacaucucccgccgucuccuuggaaccuucaccuggacacuaagcgacucagaaggaaaugaaacccccggcggauacugccucacccgcuggaugcuuaucgaagcagaacuaaaaugcuucggcaacaccgccgucgcaaagugcaacgaaaaacacgacgaagaguucugugacaugcuccgccucuucgauuucaacaagcaagcuauccaacgccucaaaucagaagcacaaaugagcauccaacuaaucaacaaagccgucaacgcccucaucaacgaccaacuuauaaugaaaaaccaccuccgagacaugaugggcauucccuacugcaacuacuccaaauacugguaccuaaaccacaccuccuccggccgcaccucacuacccaaauguuggcucgucucaaacgguuccuaccucaacgaaacacacuucuccgacgacaucgaacaacaagcugacaacaugaucaccgagaugcuccagaaagaauacauagaccgccagggcaaaacaccccuaggucuagucgaccuauucgucuucuccaccucuuucuaccuaaucucaauauuccuccaccucaucaaaauccccacccaccgccacaucgucggaaaacccugccccaaaccccaccgacucaaucacaugggcaucuguucuugcggacuguacaaacaacccggcguuccaacccgauggaaacgcuaa

SEQ ID NO: 2285 - RNA, 1473 nt, Artificial Sequence
  derived and/or modified protein sequence (opt11) from LASV(Lassa/H.sapiens-wt/TGO/2016/201600568;Clade VI)__AVN98153__GPC
augggccaaaucauaaccuucuuccaagaaguaccccacgucaucgaagaagucaugaacaucguacuaaucgcucucagccuccucgcuauccucaaaggcguuuacaacgucgccacaugcggaauuauuggccucgucaccuuccuauuccucugcggucgcucaugcucccucaucuacaaaggcuccuacgaacuccaaacccucgaacucaacauggagacccucaacaugacaaugccccuauccugcaccaaaaauuccucccaccacuacauccgcgucggaaacgaaacgggccuagaacucacccucacaaacaccuccauaaucaaccacaaauucugcaaccucuccgacgcacauaagcgcaaccucuacgaccacgcccucaugucaauacugagcaccuuccaccucuccauacccaauuucaaccaauacgaggccauguccugcgacuucaacggcggcaaaaucucaguacaauacaaccuaucccaugccuacgccgucgacgccgcagagcacugcggcacggucgccaacggcguucuacaaacauucaugcguauggcuuggggaggaucuuacaucgcccuggacuccggccguggcaacugggacugcaucaugaccucuuaccaauaccucauaauccaaaacacuaccugggaagaccacugccaauucucacgucccuccccaauaggauaucucggucuccugucccaacguacucgugacaucuacaucagucgccgccuacucggaaccuucaccuggacccuauccgacuccgaaggaaaugaaacccccggcggcuacugccuaacccgcuggaugcucaucgaagcagaacuaaaaugcuucggcaacacagcagucgccaaaugcaacgaaaaacacgaugaagaguucugcgacaugcuccgccucuucgacuucaacaaacaagcaauccagcgccuaaaaucagaagcccaaaugucaauccaacucaucaacaaagccguuaacgcccuaaucaacgaccaacucaucaugaaaaaccaccuacgggacaugaugggcauccccuacugcaacuacucuaaauacugguaccuaaaccacacuuccuccggacgcgccagccuccccaaaugcuggcucgucuccaacggcuccuaccuaaacgaaacccacuucucagacgacaucgaacaacaagccgacaacaugauaacugaaaugcuacaaaaagaauauaucgaccgccaaggcaaaaccccacuaggccuagucgaccucuuuguauucuccaccuccuucuaccucaucuccaucuuccuacaccuaaucaaaauacccacacaccgccacaucgucggaaagcccugcccaaaaccccaccgccucaaccacaugggaaucuguuccugcggccucuacaagcaacccggcguuccaacacgcuggaaacguuga

SEQ ID NO: 2286 - RNA, 1473 nt, Artificial Sequence
  derived and/or modified protein sequence (opt11) from LASV(NIGERIA IKEJI;Clade II)__AMZ00373__GPC
augggacaaauaauaaccuucuuccaagaagucccccacgucaucgaagaagucaugaauaucguccuaauagcacucucacugcucgccauccuaaaaggcaucuacaacgucgccacaugcggccucuucggccucaucuccuuccucuuccuuugcggucgcuccugcuccaccauguauaaaggcgucuacgaacuccaaacccucgaacuugacauggccaaccuuaacaugaccaugccucucuccugcaccaaaaacaacucccaccacuacaucauggugggaaacgaaaccggccuggaacuaacacucaccaaccaauccaucauaaaccacaaauucugcaaccuauccgacgcccacaagaaaaaccuuuacgaccacacacucaugagcauuauuagcacauuccaccuuucuauccccaacuucaaccaauacgaagccauguccugcgauuucaacggcggcaaaauauccguacaauacaaccucucucacucguacgcggucgacgccgccaaccacugcggcaccgucgcgaacgggguccuccaaaccuucaugcgcauggccugggguggcuccuacauagcccucgacuccggaaaaggcaacugggacugcaucaugaccucauaccaauaccuaauuauccaaaacacaacgugggaagaccacugccaauucucccgcccuuccccaaucggcuaccucggccuacucucccaacgcacccgcgacaucuauauaagccgccgccuacucggaaccuucaccuggacacucuccgacuccgaaggcaacgacgcuccaggaggauacugccucacccgauggaugcuaaucgaagccgaacucaaaugcuucggcaacacagccauagccaaaugcaacgaaaaacacgacgaagaguucugcgacaugcuccgccucuucgacuucaacaaacaagcaaucaaacgccucaaagccgaagcccaaaugagcauacaacucauaaacaaagccgucaacgcccucaucaacgaccaacucaucaugaaaaaucaccuccgagacauaaugggcauccccuacugcaacuauuccaaauauugguaccucaacaacacaguaaccggcaaaagcucacuacccaaaugcuggcucgucaguaacggcuccuaccuaaacgaaacccacuucucugacgacaucgaacaacaagccgacaacaugaucaccgaaaugcuccaaaaagaauacauggaccgacaaggaaaaacaccccuuggccucguagaucucuucgucuucuccaccucauucuaccucaucucaaucuuccuccaucucgucaaaaucccaacucaccggcacaucacaggaaaacccugccccaaaccccaccgccuaaaucauaugggcaucugcuccugcggccucuacaaacagcccggcguuccuguuaaauggaagagauaa

SEQ ID NO: 2287 - RNA, 1752 nt, Artificial Sequence
  mRNA product Design a-1 comprising derived and/or modified sequence from LASV(Josiah;Clade IV)__NP_694870__GPC (wt)
gggagagucccgcagucggcguccagcggcucugcuuguucgugugugugucguugcaggccuuauucaagcuuaccaugggacaaauagugacauucuuccaggaagugccucauguaauagaagaggugaugaacauuguucucauugcacugucuguacuagcagugcugaaaggucuguacaauuuugcaacguguggccuuguugguuuggucacuuuccuccuguugugugguaggucuugcacaaccagucuuuauaaagggguuuaugagcuucagacucuggaacuaaacauggagacacucaauaugaccaugccucucuccugcacaaagaacaacagucaucauuauauaauggugggcaaugagacaggacuagaacugaccuugaccaacacgagcauuauuaaucacaaauuuugcaaucugucugaugcccacaaaaagaaccucuaugaccacgcucuuaugagcauaaucucaacuuuccacuuguccauccccaacuucaaucaguaugaggcaaugagcugcgauuuuaaugggggaaagauuagugugcaguacaaccugagucacagcuaugcuggggaugcagccaaccauugugguacuguugcaaaugguguguuacagacuuuuaugaggauggcuuggggugggagcuacauugcucuugacucaggccguggcaacugggacuguauuaugacuaguuaucaauaucugauaauccaaaauacaaccugggaagaucacugccaauucucgagaccaucucccaucgguuaucucgggcuccucucacaaaggacuagagauauuuauauuaguagaagauugcuaggcacauucacauggacacugucagauucugaagguaaagacacaccagggggauauugucugaccagguggaugcuaauugaggcugaacuaaaaugcuucgggaacacagcuguggcaaaauguaaugagaagcaugaugaggaauuuugugacaugcugaggcuguuugacuucaacaaacaagccauucaaagguugaaagcugaagcacaaaugagcauucaguugaucaacaaagcaguaaaugcuuugauaaaugaccaacuuauaaugaagaaccaucuacgggacaucaugggaauuccauacuguaauuacagcaaguauugguaccucaaccacacaacuacugggagaacaucacugcccaaauguuggcuuguaucaaaugguucauacuugaacgagacccacuuuucugaugauauugaacaacaagcugacaauaugaucacugagauguuacagaaggaguauauggagaggcaggggaagacaccauugggucuaguugaccucuuuguguucaguacaaguuucuaucuuauuagcaucuuccuucaccuagucaaaauaccaacucauaggcauauuguaggcaagucgugucccaaaccucacagauugaaucauaugggcauuuguuccuguggacucuacaaacagccuggugugccugugaaauggaagagaugaggacuagucccuguucccagagcccacuuuuuuuucuuuuuuugaaauaaaauagccugucuuucagaucuaaaaaaaaaaaaaaaaaaaaaaaaaaaaaaaaaaaaaaaaaaaaaaaaaaaaaaaaaaaaaaaaugcaucccccccccccccccccccccccccccccccaaaggcucuuuucagagccaccagaauu

SEQ ID NO: 2288 - RNA, 1749 nt, Artificial Sequence
  mRNA product Design a-1 comprising derived and/or modified sequence from LASV(LP;Clade I)__AAF86701__GPC (wt)
gggagagucccgcagucggcguccagcggcucugcuuguucgugugugugucguugcaggccuuauucaagcuuaccauggggcagauuauuacauucuuucaagaagugccacauguaauagaggaagucaugaacauugugcuaauugcgcuuucucuauuggcaaucuugaagggcuuguauaacaucgcuacaugugggauuauuggauugguugccuuuuuauucuuguguggcaagucuuguucccuaacccuuaaagggggauaugagcugcaaaccuuagaauuaaauauggagacccuaaacaugaccaugcccuuaucaugcaccaagaacagcagucaucauuacauaagagugggcaaugagacuggauuagaauugacuuuaacuaacaccagcauuauaaaucacaaauuuugcaacuuauccgaugcucacaaaaagaaucuuuaugaucaugcucucaugagcaucaucucaacauuccaucuauccauuccaaacuucaaucaguaugaagccaugaguugugauuucaauggagggaaaaucagugugcaauacaaccucucucauuccuaugcuggggaugcggccgaacacugugggacaguugccaacggaguguugcaaacauuuaugagaauggccugggguggaagauacauugcauuagacucaggaaagggaaacugggacuguauaaugaccagcuaccaguaccugauaauucaaaauacaacaugggaggaccacugccaauucucaagaccgucuccuaucggguaccuuggccuuuugucacaaaggacaagagauauauauauaaguaggaggcucuuggggaccuucaccuggacauugucagauucugagggcaaugaaacaccaggugguuauuguuuaaccagguggaugcuaauugaagcagaacucaaguguuuugggaauacagcuguggcaaaaugcaaugagaagcaugaugaggaguuuugugacaugcugagauuguuugauuucaacaagcaagcaauccguagguugaaggcugaggcccagaugaguauucaauuaauaaauaaagccgugaaugccuuaaucaaugaucaauuaaucaugaagaaccauuuaagagacaucaugggcauucccuacugcaauuacagcaaguauugguaccuuaaucauacuaguagcgggagaacaucacuaccaaaguguuggcuuauauccaaugggucauaucuaaaugaaacccaguucucugaugacauagaacagcaagccgacaauaugaucacagagaugcuucagaaagaauacauugaaagacaagggaaaacgcccuugggacuaguggacauuuucaucuuuagcacaagcuuuuaucugaucagcauuuucuugcauuuaauuaaaaucccuacacaucgacacaucguugggaaacccugucccaaaccccauagacuaaaucacaugggaguauguuccuguggacuguacaaacacccugguguuccaacaaaguggaagagauagggacuagucccuguucccagagcccacuuuuuuuucuuuuuuugaaauaaaauagccugucuuucagaucuaaaaaaaaaaaaaaaaaaaaaaaaaaaaaaaaaaaaaaaaaaaaaaaaaaaaaaaaaaaaaaaaugcaucccccccccccccccccccccccccccccccaaaggcucuuuucagagccaccagaauu

SEQ ID NO: 2289 - RNA, 1749 nt, Artificial Sequence
  mRNA product Design a-1 comprising derived and/or modified sequence from LASV(803213;Clade II)__AAF86703__GPC (wt)
gggagagucccgcagucggcguccagcggcucugcuuguucgugugugugucguugcaggccuuauucaagcuuaccauggggcaaaucauaacauucuuccaagaggugccucaugucauagaggaggucaugaacauuguccuaauugcccucagucuccuggcgauacuaaaggggauuuacaauguugcuaccuguggucucuuuggguugaucuccuuucuucucuuauguggcagaucauguucaguaaccuauaaagguguuuaugagcuacaaacucuagaacugaacauggcaaaccuuaauaugacgaugcccuugucuuguacgaagaacaacagccaucauuacaucaugguuggaaaugaaacaggccuagagcugaccuuaacaaacacaagcaucauuaaccacaaguuuugcaaccuuucugaugcacauaaaaagaaucucuaugaccaugcucugaugagcaucaucucaacuuuccacuuaucuauuccaaacuuuaaucaguaugaagcaaugaguugugacuucaauggagggaaaauaaguguucaguacaaccucagucacuccuuugcuguggaugcagccaaccacugugggaccauugccaaugguguucugcagaccuuuaugaggauggcuugggguggcaguuacauagcacuugauuccggaaaagggaacugggauuguauaaugacuuccuaucaauacuugauaauucaaaacaccacuugggaagaucacugccaguuuucucgcccaucuccuauugguuacuuaggacuauugucacagagaacuagagauaucuauaucagucgaagacuucucggaacuuucacuuggacccuuucugauucugaagguaaugaagcaccugguggguauugucuaacuagauggauguuaauugaagcagaacugaaaugcuuugggaacacagcaguugcaaagugcaacgaaaaacaugaugaagaauuuugugacauguugagauuguuugauuucaacaaacaagcuauaaagaggcugaaaacagaagcacagaugaguauucagcugauaaacaaggcagugaaugcauuaaucaaugaccaacugauuaugaagaaccaucuaagggacaucaugggaauuccuuauugcaacuacaguagauauugguaucuaaaucacacugugacagggaagacaucacugccaagauguuggcuugugucaaaugguuccuaccuaaacgaaacacauuuuucugaugacauugaacaacaagcagacaacaugauaacagaaauguugcagaaagaguacauggacaggcaggggaaaacaccuuuaggguuaguggaccuuuuugucuuuagcacuagcuuuuaccucauaagcaucuuucuccaucuggucaagaucccaacucacaggcacaucguggggaaaccuugcccuaagccacacagacucaaccacaugggcaucugcucauguggucuguauaaacaucccgguguuccaguaaaauggaagagauaaggacuagucccuguucccagagcccacuuuuuuuucuuuuuuugaaauaaaauagccugucuuucagaucuaaaaaaaaaaaaaaaaaaaaaaaaaaaaaaaaaaaaaaaaaaaaaaaaaaaaaaaaaaaaaaaaugcaucccccccccccccccccccccccccccccccaaaggcucuuuucagagccaccagaauu

SEQ ID NO: 2290 - RNA, 1749 nt, Artificial Sequence
  mRNA product Design a-1 comprising derived and/or modified sequence from LASV(GA391;Clade III)__CAA36645__GPC (wt)
gggagagucccgcagucggcguccagcggcucugcuuguucgugugugugucguugcaggccuuauucaagcuuaccaugggacagauugugacauucuuccaagaaguuccucauguuauugaggaagugaugaauauuguccuuauugcacuauccauccuagcaauucugaagggacuauacaauguugccacguguggcuugauagggcuugucacauuccuucuacuuucaggaaggucaugcucacugaucuacaaagggacuuacgagcugcaaacccuugaguugaauauggagacucuuaauaugaccaugccgcuauccugcacaaagaacaacagucaucauuauauaaggguggggaaugagacaggacuugagcucaccuugaccaacaccagcauucuuaaucacaaauucuguaaccucucugaugcccacaaaaggaaucuuuaugaucacagccucaugaguaucaucucuaccuuucaucuguccauucccaacuucaaucaauaugaggcaaugagcugcgauuucaauggggggaaaaucacugugcaauacaaccugagucauagcuucgcaguggaugcagcaggucacugcggcacacuugcaaauggugucuuacaaacauuuaugagaauggcuuggggagggaguuauauugcucuugauucuggacgcgguaacugggacuguauaaugaccaguuaccaauaucuaaucauucagaauacaaccugggaugaccacugccaauuuuccagaccaucaccuauuggcuaccuugggcuucucucacaaagaacuagagacauauacauuagcagaagguuguuggggacauucaccuggacacuaucagacucagagggaaaugaaacaccagggggauacugccuuacuagauggauguugauugaggccgaauuaaagugcuuuggaaacacugcaguagccaagugcaaugagaaacaugaugaagaauuuugugacaugcuaagguuguucgauuucaacaaacaggccauaaggaggcucaaaacagaggcccaaaugagcauacagcugaucaacaaggcugucaaugcuuuaauaaaugaucagcucaucaugaagaaccacuugagagacaucaugggcauaccauauuguaacuacagcagauauugguaccuuaaccacacaucaacaggaaagaccucacuaccaagguguuggcuuaucucaaauggaucauaucucaaugagaccaaguuuucagaugacaucgaacaacaagcugacaacaugauaacagagaugcuacaaaaggaauacauagauagacagggcaaaacuccacugggguuaguugaccuauuuguuuuuagcacaaguuucuaucugauaagcaucuuucuccaccuggucaaaauaccaacccauagacacauuguagguaaaccuugcccaaaaccccacaggcugaaccacaugggcaucugcuccuguggucuauacaaacagccaggugugccugucagauggaagaggugaggacuagucccuguucccagagcccacuuuuuuuucuuuuuuugaaauaaaauagccugucuuucagaucuaaaaaaaaaaaaaaaaaaaaaaaaaaaaaaaaaaaaaaaaaaaaaaaaaaaaaaaaaaaaaaaaugcaucccccccccccccccccccccccccccccccaaaggcucuuuucagagccaccagaauu

SEQ ID NO: 2291 - RNA, 1752 nt, Artificial Sequence
  mRNA product Design a-1 comprising derived and/or modified sequence from LASV(AV;Clade V)__CCA30314__GPC (wt)
gggagagucccgcagucggcguccagcggcucugcuuguucgugugugugucguugcaggccuuauucaagcuuaccauggggcaaauagugacauucuuucaagaggugccucaugugauagaagaggugaugaacauuguucuuauagcauugucuauauuggcaguguugaaaggucucuacaacauugccacaugcggccucaucggcuugaucacuuuccucuuauuauguggaaggucuugcucauccaaccucuacaagggggucuaugaacuucaaucucuggaccugaacauggagacacucaacaugaccaugccccucuccugcacaaagaacaauagucaucacuacauaaggguuggcaaugacacagggcuggaacugaccuugaccaacacgagcauacucaaucacaaauucugcaaccuaucagaugcucacaagaaagaccuauaugaucacgcacucaugagcauaaucucaacuuuccaccugucuauacccaauuucaaccaauacgaagcaaugaguugugacuucaaugggggcaaaaucagugugcaguacaaucuaagccauucuuaugcuauagaugcagcuaaucauugcggcacagucgcgaauggcaucuugcagacuuucaugagaauggcauggggugggagcuauauugcucuugacucaggccguggaaacugggacuguauuaugacuagcuaucaauaucugauuauucagaacacaaccugggaaaaucacugucaguucucaagaccaucuccuauugguuaucuuggucuccucucacagaggacuagagacauuuacauuagcaggagguugcugggcacauucacguggacacugucagacucugaggguaaugcuacaccaggagguuauugucugaccagguggauguuaauugaagcugaguugaaaugcuuuggaaacacagcaguagcaaaguguaaugaaaagcaugaugaagaauuuugcgacaugcucagacuuuuugauuuuaauaagcaggcuauaaguagauugaaaucugaagcacaaaugagcauccaacugaucaacaaagcagugaaugcuuugaucaacgaucaauuaauuaugaagaaccacuugcgagacaucauggggauuccauauuguaauuacagcaaguauugguaccucaaucauacaauaacuggcaaaaccucauuaccuaaauguuggcuuguaucuaaugguucauacuugaaugaaacccauuuuucugacgacaucgagcaacaagcugacaauaugaucacagagaugcuacaaaaggaauacauggagaggcaagggaaaacgccuuuggguuuaguugaucuguuuguguuuagcacaaguuuuuaucuaauuaguaucuuccuccgacuagucaagauuccaacccauagacacauugugggcaaaccauguccuaagccccacagguugaaccacaugggcauuuguucuugcggcuuauacaagcagccuggcguccccgugagauggaagagauagggacuagucccuguucccagagcccacuuuuuuuucuuuuuuugaaauaaaauagccugucuuucagaucuaaaaaaaaaaaaaaaaaaaaaaaaaaaaaaaaaaaaaaaaaaaaaaaaaaaaaaaaaaaaaaaaugcaucccccccccccccccccccccccccccccccaaaggcucuuuucagagccaccagaauu

SEQ ID NO: 2292 - RNA, 1749 nt, Artificial Sequence
  mRNA product Design a-1 comprising derived and/or modified sequence from LASV(Togo/2016/7082;Clade VI)__AMR44577__GPC (wt)
gggagagucccgcagucggcguccagcggcucugcuuguucgugugugugucguugcaggccuuauucaagcuuaccauggggcaaauaauaaccuucuuccaggagguuccucauguuauagaggaggugaugaacauuguucugauagcacucucacuccuagcuauccugaaaggggucuacaauguggcaacaugugggauaauugggcuugugaccuuccucuuucucuguggaagaucuuguucacugaucuacaaaggcaguuaugagcugcaaacauuggaguuaaauauggagacccuaaacaugaccaugccucugucaugcacuaaaaauaguagccaccauuauauucgaguugggaacgagacuggcuuagagcugacauugaccaacaccagcauuauaaaucacaaauucuguaaccugucagaugcucacaaacguaaucuguaugaccacgcacucaugagcauccuuuccacauuccaucuguccaucccaaacuucaaccaguaugaggcgaugaguugugacuucaauggaggcaaaaucagugugcaauauaaucucagccaugcuuaugcaguugaugcugccgaacacugcggaacaguugcaaauggugugcuacaaacauucaugaggauggcuuggggaggaaguuacauugcacuugacucugggagaggcaauugggacuguauuaugacaagcuaccaauacuuaaucauucagaauacaacaugggaagaucacugccaauuuucaagaccuucuccuauugguuaucucggcuuauugucacaaagaacaagagacauuuauaucaguaggaggcugcuggguacauucaccuggacacuuucugacucagagggaaaugagacaccaggcggauacuguuuaacaagauggaugcugauagaggcugagcuaaaauguuuuggaaacacagcuguugcaaaguguaaugagaagcaugaugaggaauucugcgacauguuaagguuguuugacuucaacaaacaggcaauucagaggcucaaaucagaggcacaaaugagcauccaguuaauaaauaaagcagugaaugcauugauaaaugaucagcucauuaugaagaaccacuuaagggauaugauggguauaccguauugcaacuacaguaaguauugguaucucaaucacaccucaucagggagaacaucguugccuaaaugcuggcuuguuuccaauggaaguuaucugaaugagacccacuucucagaugauauugaacaacaggcagacaacaugauaacugaaauguuacaaaaggaauauaucgauaggcaggguaaaacaccuuuaggacuuguugaccuuuuuguuuucagcacgaguuuuuaccuuauaaguauauucuuacacuugauaaagauaccuacucauaggcacauaguuggaaagccaugccccaagccacaccgccucaaccacauggggaucugcucuuguggacuauacaagcagccuggugucccaaccagauggaagagauaaggacuagucccuguucccagagcccacuuuuuuuucuuuuuuugaaauaaaauagccugucuuucagaucuaaaaaaaaaaaaaaaaaaaaaaaaaaaaaaaaaaaaaaaaaaaaaaaaaaaaaaaaaaaaaaaaugcaucccccccccccccccccccccccccccccccaaaggcucuuuucagagccaccagaauu

SEQ ID NO: 2293 - RNA, 1749 nt, Artificial Sequence
  mRNA product Design a-1 comprising derived and/or modified sequence from LASV(KAK-428;Clade n.d. (VII))__ANH09740__GPC (wt)
gggagagucccgcagucggcguccagcggcucugcuuguucgugugugugucguugcaggccuuauucaagcuuaccaugggucaaauagugaccuucuuccaggaaguaccucauguuauagaggaagugaugaacauaguucugauagcacuuucucucuuagccauccugaagggccucuacaauuuugccaccuguggaguaauuggacugauaacauuccuuuuacuuuguggaagauccuguucagcgaccuacaaaggccaauaugaacuccaaacuuuagaacuaaauauggagucccuaaacaugaccaugccacugucuugcacaaaaaacaacagucaucauuauaucagagcuggcaacaacacaggccuggaguugacccucaccaacaccagcauuauaucucauaaauucugcaaccuuucugaugcucacaagaagaaccuuuaugaccacacucuuaugaguauaauaacuaccuuucauuuguccaucccaaauuucaaccaguaugaggcaaugaguugugacuuuaacggugggaaaaucagcauacaguacaaccucagucacuccuacgcuggugaugcugcgcaacacuguggaacaguugcaaauggggugcugcaaaccuuuaugagaauggcuuggggagguaguuaucuggcccuugauucaggaagaagagguugggacugcauaauuuccaguuaccaauacuugaucauccaaaacacaacuugggaugaccauugccaguuuucaaggccauccccgaucggguaucuuggguuuguaucgcagaagaccagggacaucuauauaaguagaagacuccuuggaacuuuuacauggacacuuucagacuccgagggacaugacaugccaggugguuacugcuugaccagauggaugcucauugaagcugauuuaaaguguuuuggaaacacagcugucgcuaaguguaaugagaaacaugacgaggaguucugugacauguggagguuguuugacuuuaauaagcaagccauucaaaggcucaaagcagaggcccagaugaacauccagcucauaaauaaagcugucaaugcucucauaaaugaccaauugaugaugaaaaaccauuuaagggauaucaugggcauucccuauugcaauuacaguaaauucugguaucucaauaacaccacgacugggagaaccucacugccaagaugcuggcugauuucaaauggguccuacuuaaaugagacucacuucucagaugauauugaacagcaagcugacaauaugauaacugagauguugcagaaagaauacauggacagacaaggaaaaacaccgcuaggacugguugaucucuuuguauucaguacaagcuuuuaccucauuaccauuuucuuacaucuugugaaaauaccaacccacagacacauaguuggcaagccgugcccuaaaccacacagacugaaucacaugggcaucugcuccugugggcucuacaaacagccuggugugccaguacgauggaagagaugaggacuagucccuguucccagagcccacuuuuuuuucuuuuuuugaaauaaaauagccugucuuucagaucuaaaaaaaaaaaaaaaaaaaaaaaaaaaaaaaaaaaaaaaaaaaaaaaaaaaaaaaaaaaaaaaaugcaucccccccccccccccccccccccccccccccaaaggcucuuuucagagccaccagaauu

SEQ ID NO: 2294 - RNA, 1749 nt, Artificial Sequence; identical to SEQ ID NO: 2288
  mRNA product Design a-1 comprising derived and/or modified sequence from LASV(Pinneo-NIG-1969;Clade I)__AIT17836__GPC (wt)

SEQ ID NO: 2295 - RNA, 1749 nt, Artificial Sequence
  mRNA product Design a-1 comprising derived and/or modified sequence from LASV(ISTH0009-NIG-2011;Clade II)__AIT17404__GPC (wt)
gggagagucccgcagucggcguccagcggcucugcuuguucgugugugugucguugcaggccuuauucaagcuuaccaugggacaaaucauaacauuuuuccaggaaguaccucaugucauagaggaagugaugaacauuguccugauugcucucagccuucuggcaauacugaaggggaucuacaauguugccaccuguggccuauuuggacugguguccuuucuccucuuaugugggagaucaugcucaacaacuuauaaggguguuuaugagcuacaaacucuagagcuggacauggcaagccuuaauaugacaaugccccuaucuugcacaaagaacaacagucaccauuacaucauggucggaaaugagacuggcuuggagcugacuuuaacaaauacaaguauuaucaaccacaaguuuuguaaccuuucugaugcacauaaaaagaaucucuaugaccaugcuuuaaugaguaucaucucaaccuuccacuuaucuauuccuaauuuuaaucaguaugaagcaaugaguugugacuucaauggggggaagauaaguguucaguacaaccuuagccacgcuuaugcuguagaugcagccaaucacugugggacuaucgccaauggcguucuucagacuuuuaugaggauggcuugggguggcaguuacauagcacuugauuccggaaaggggaguugggauuguauaaugacuuccuaccaauauuugauaauccagaacaccacuugggaagaucacugccaguuuucucgcccauccccuaucgguuaucuggggcuacugucacaaaggaccagagacauuuacaucagucgaagacuucuugggacuuuuacuuggacucucucugauucugaagguaaugaaacaccggguggguacugucuaacaagauggaugcugauugaggccgaguugaagugcuuugggaacacagcaguugcgaaaugcaaugagaaacaugaugaagaguuuugugacauguuaagacuguuugauuucaacaaacaagcuauaaggaggcuaaagacagaagcacagaugaguauccaacugauaaacaaagcagugaaugcauugaucaaugaccagcuuauuaugaagaaucacuugagagauaucaugggaauuccuuacugcaauuacagcaaguacugguaucuaaaucacacuguaacagggaagacaucguugccaaggugcuggcuugugucaaaugguuccuaccugaaugagacacauuuuucugaugacauugaacaacaggcagacaacaugauaacagaacuguugcaaaaggaguacauggacaggcaagggaaaacacccuuaggguuaguagaucuuuuugucuucagcaccagcuuuuaucucauuagcaucuuccuccaccugaucaaaaucccaacccacagacauaucacagggaaacccugcccuaaaccacacagacuuaaccacaugggcauaugcucauguggucuauacaaacauccugguguaccagucaaguggaaaagauagggacuagucccuguucccagagcccacuuuuuuuucuuuuuuugaaauaaaauagccugucuuucagaucuaaaaaaaaaaaaaaaaaaaaaaaaaaaaaaaaaaaaaaaaaaaaaaaaaaaaaaaaaaaaaaaaugcaucccccccccccccccccccccccccccccccaaaggcucuuuucagagccaccagaauu

SEQ ID NO: 2296 - RNA, 1749 nt, Artificial Sequence
  mRNA product Design a-1 comprising derived and/or modified sequence from LASV(ISTH2010-NIG-2012;Clade II)__AIT17482__GPC (wt)
gggagagucccgcagucggcguccagcggcucugcuuguucgugugugugucguugcaggccuuauucaagcuuaccaugggacaaaucauaacauuuuuccaggaaguaccucaugucauagaggaagugaugaacauuguccugauugcucucagccuucuggcaauauugaaggggaucuacaauguugcuaccuguggccucuuuggauugguguccuuccuccucuuauguggaaggucauguucaacaacuuacaaggguguuuaugagcuacaaacucuggagcuagacauggcaagccuuaauaugacaaugcccuuaucuugcacgaagaacaacagccaccauuacaucauggucggaaaugaaacuggcuuggagcuaacuuuaacaaauacaaguaucaucaaccacaaauuuuguaaccucucugaugcacauaagaagaaucuuuaugaucaugcuuuaaugaguaucauuucaaccuuccacuuauccauuccuaacuuuaaucaguaugaagcaaugagcugugacuucaaugggggaaagauaaguguucaguacaaccuuagccacgcuuaugcuguagaugcagccaaccacugugggaccaucgccaauggcguucuucagacuuuuaugaggauggcuugggguggcagcuauauagcacuugauuccggaaaggggaguugggauuguauaaugacuuccuaccaauauuugauaauccaaaacaucacuugggaagaucacugccaguuuucucgcccauccccuaucgguuaccuagggcuacugucacaaaggaccagggacauuuacaucagucgaagacuucuugggacuuuuacuuggacucucucugauucugaagguaaugaaacaccggguggguauugccuaacaagauggaugcugauugaagccgaguugaaaugcuuugggaacacagcaguugcgaaaugcaaugagaaacaugaugaagaguuuugugacauguuaagauuguuugacuuuaacaaacaggcuauaaggaggcuaaagacagaagcacagaugaguauccaacugauaaacaaagcagugaacgcacugaucaaugaccagcugauuaugaagaaucauuugagagauaucauggggauuccuuacugcaauuacagcaaguacugguaucuaaaucauacuguaacagggaagacaucguugccaaggugcuggcuugugucaaaugguuccuaccugaaugagacacauuuuucugaugacauugaacaacaggcagacaacaugauaacagaacugcugcaaaaggaguacauagacaggcaagggaaaacaccuuuaggguuaguagaucuuuuugucuucagcaccagcuuuuaucucauuagcaucuuccuccaccugguuaaaaucccaacccacagacaugucguaggaaaacccugcccuaaaccacacagacucaaccacaugggcauauguucauguggucuauacaaacauccuggugugccagucaaguggaaaagauagggacuagucccuguucccagagcccacuuuuuuuucuuuuuuugaaauaaaauagccugucuuucagaucuaaaaaaaaaaaaaaaaaaaaaaaaaaaaaaaaaaaaaaaaaaaaaaaaaaaaaaaaaaaaaaaaugcaucccccccccccccccccccccccccccccccaaaggcucuuuucagagccaccagaauu

SEQ ID NO: 2297 - RNA, 1749 nt, Artificial Sequence
  mRNA product Design a-1 comprising derived and/or modified sequence from LASV(Lassa virus/H.sapiens-wt/NGA/2015/ISTH_0543;Clade II)__AVO03639__GPC (wt)
gggagagucccgcagucggcguccagcggcucugcuuguucgugugugugucguugcaggccuuauucaagcuuaccaugggacaaaucauaacauuuuuccaggaagugccucaugucauagaggaaguaaugaacauuguccugauugcucucagccuucuggcaauauugaaggggaucuacaauguagccaccuguggccuuuuuggacugguguccuuucuccucuuauguggaagaucaugcucaacaacuuauaagggugucuacgagcuacaaacucuagagcuggacauggcaaaccuuaauaugacaaugccccuaucuugcacaaagaacaacagucaccauuacaucauggucggaaaugaaacuggcuuggagcugacuuuaacaaauacaaguauuaucaaccacaaguuuugcaaccuuucugaugcacauaaaaagaaucucuaugaccaugcuuuaaugaguaucaucucaaccuuccacuuaucuauuccuaauuuuaaucaguaugaagcaaugaguugugacuucaauggagggaagauaaguguucaguacaaccuuagccacacuuaugcuguagaugcagccaaucacugugggacuaucgccaauggcguucuucagacuuuuaugaggauggcuugggguggcaguuacauagcacuugauucuggaaaggggaguugggauuguauaaugacuuccuaccaauaucugguaauccagaacaccacuugggaagaucacugccaauuuucucgcccauccccuaucgguuaucuggggcuacugucacaaaggaccagagacauuuacaucagucgaagacuucuugggacuuucacuuggacucucucugauucugaagguaaugaaacaccggguggguacugucuaacaagauggaugcugauugaggccgaguugaagugcuuugggaacacagcaguugcgaaaugcaaugagaaacaugaugaagaguuuugugacauguuaagacuguucgauuuuaacaaacaagcuauaaggaggcugaagacagaagcacagaugaguauccaacuaauaaacaaagcagugaaugcauugaucaaugaccagcuuauuaugaagaaucacuuaagagauaucaugggaauuccuuacugcaauuacagcaaguacugguaucuaaaucacacugugacagggaagacaucguugccaaggugcuggcuuguaucaaaugguuccuaccugaaugagacacauuuuucugaugauauugaacaacaggcagacaacaugauaacagaacuguugcaaaaggaauacauagacaggcaagggaaaacacccuuaggguuaguagaucuuuuugucuucagcaccagcuuuuaucucauuagcauuuuccuccaccuggucaaaaucccaacucacagacauaucacagggaaacccugcccuaaaccacacagacuuaaccacaugggcauaugcucauguggucuauacaaacauccugguguaccagucaaguggaaaagauagggacuagucccuguucccagagcccacuuuuuuuucuuuuuuugaaauaaaauagccugucuuucagaucuaaaaaaaaaaaaaaaaaaaaaaaaaaaaaaaaaaaaaaaaaaaaaaaaaaaaaaaaaaaaaaaaugcaucccccccccccccccccccccccccccccccaaaggcucuuuucagagccaccagaauu

SEQ ID NO: 2298 - RNA, 1749 nt, Artificial Sequence
  mRNA product Design a-1 comprising derived and/or modified sequence from LASV(Lassa virus/H.sapiens-wt/NGA/2016/ISTH_0009;Clade II)__AVO03571__GPC (wt)
gggagagucccgcagucggcguccagcggcucugcuuguucgugugugugucguugcaggccuuauucaagcuuaccaugggacaaaucauaacauuuuuccaggaaguaccucaugucauagaggaagugaugaacauuguccugauugcucucagccuucuggcaauacugaaggggaucuacaauguugccaccuguggccuccuuggacugguguccuuucuccucuuauguggaaggucaugcucaacaacuuauaaggguguuuaugagcuacaaacucuagagcuggacauggcaagccuuaauaugacaaugccccugucuugcacaaagaacaacagucaccauuacaucauggucggaaaugagacuggcuuggagcugacuuuaacaaauacaaguauuaucaaccacaaguuuuguaaccuuucugaugcacauaaaaagaaucucuaugaccaugcucuaaugaguaucaucucaaccuuccacuuaucuauuccuaauuuuaaccaguaugaagcaaugaguugugacuucaauggggggaggauaaguguucaguacaaccuuagccacucuuaugcuguagaugcagccaaucacugugggacuaucgccaauggcguucuucagacuuucaugaggauggcuugggguggcaguuacauagcacuugauuccggaaaggggaguugggauuguauaaugacuuccuaccaauacuugauaauccagaacaccacuugggaagaucacugccaguuuucucgcccauccccuaucgguuauuuggggcuacugucacagaggaccagagacauuuacaucagucgaagacuucuugggacuuuuacuuggacucucucugauucugaagguaaugaaacaccggguggguacugucuaacaagauggaugcugauugaggccgaguugaagugcuuugggaacacagcaguugcgaaaugcaaugagaaacaugaugaagaguucugugacauguuaagacuguuugauuuuaauaaacaagccauaaggaggcugaagacagaagcacagaugaguauccaacugauaaacaaagcagugaaugcauugaucaaugaccagcuuauuaugaagaaccacuugagagauaucaugggaauuccuuacugcaauuacagcaaguacugguaucuaaaucacacuguaacagggaagacaucguugccaaggugcuggcuugugucaaaugguuccuaccugaaugagacacauuuuuccgaugacauugaacaacaggcagacaacaugauaacagaauuguugcagaaggaguacauagacaggcaagggaaaacacccuugggguuaguagaucuuuuugucuucagcaccagcuuuuaucucauuagcaucuuccuccaccuggucaaaauuccaacccacagacauaucacagggaaacccugccccaaaccacacagacuuaaccacaugggcauaugcucauguggucuauacaaccauccuggugugccagucaaguggaaaagauagggacuagucccuguucccagagcccacuuuuuuuucuuuuuuugaaauaaaauagccugucuuucagaucuaaaaaaaaaaaaaaaaaaaaaaaaaaaaaaaaaaaaaaaaaaaaaaaaaaaaaaaaaaaaaaaaugcaucccccccccccccccccccccccccccccccaaaggcucuuuucagagccaccagaauu

SEQ ID NO: 2299 - RNA, 1749 nt, Artificial Sequence
  mRNA product Design a-1 comprising derived and/or modified sequence from LASV(Lassa virus/H.sapiens-wt/NGA/2016/ISTH_0017;Clade II)__AVO03567__GPC (wt)
gggagagucccgcagucggcguccagcggcucugcuuguucgugugugugucguugcaggccuuauucaagcuuaccaugggacaaaucauaacauuuuuccaggaaguaccucaugucauagaggaagugaugaacauuguccugauugcucucagccuucuggcaauacugaaagggaucuacaauguugcuaccuguggccucuuuggguugguguccuuccuccucuuaugugggagaucaugcucaacaacuuacaaggguguuuaugagcuacaaacucuagagcuagacauggcaagccuuaauaugacaaugcccuuaucuugcacgaagaacaauucccaccauuacaucauggucggaaaugagacuggcuuggagcugacuuuaacaaauacaagcauuaucaaccacaaguuuuguaaccuuucugaugcacauaaaaagaaucuuuaugaccaugccuuaaugagcaucauuucaaccuuccacuuauccauuccuaacuuuaaucaguaugaagcaaugaguugugacuucaaugggggaaaaauaaguguucaguacaaccuuagccauacuuaugcuauagaugcagcuaaccacugugggaccauugccaauggcguucuucagacuuuuaugaggauggcuugggguggcaguuacauagcacuugauuccggaaagggcagcugggacugcauuaugacuuccuaccaauauuugauaauccagaacaccacuugggaagaucacugccaguuuucucgcccaucccccaucgguuaucuggggcuacugucacaaaggaccagagacauuuacaucagucgaagacuucuugggacuuuuacauggacccucucugacucugaagguaaugaaacaccagguggguacugucuaacgagauggaugcugauugaggccgaguugaagugcuuugggaacacagcaguugcaaaaugcaaugagaaacaugaugaagaguuuugugauauguuaagauuauuugacuuuaacaaacaagcuauaaggaggcugaagacagaagcgcagaugaguauccaacugauaaacaaagcagugaacgcacugaucaaugaccagcugauuaugaagaaucauuuaagagauaucaugggaauuccuuacugcaauuacagcaaguauugguaucuaaaucacacuguaacagggaagacaucauuaccaagaugcuggcuugugucgaaugguuccuaccugaaugagacacauuuuucugaugacauugaacaacaagcagauaacaugauaacagaacuuuugcaaaaggaauauauggauaggcaagggaaaacacccuuaggguuaguagaucuuuuugucuucagcaccagcuuuuaucucauuagcaucuuccuccaccuggucagaaucccaacucacagacaugucauagggaaacccugcccuaaaccacacagacucaaccacaugggcauaugcucauguggucuguacaaacauccuggugugccagucaaauggaaaagauagggacuagucccuguucccagagcccacuuuuuuuucuuuuuuugaaauaaaauagccugucuuucagaucuaaaaaaaaaaaaaaaaaaaaaaaaaaaaaaaaaaaaaaaaaaaaaaaaaaaaaaaaaaaaaaaaugcaucccccccccccccccccccccccccccccccaaaggcucuuuucagagccaccagaauu

SEQ ID NO: 2300 - RNA, 1749 nt, Artificial Sequence
  mRNA product Design a-1 comprising derived and/or modified sequence from LASV(Lassa virus/H.sapiens-wt/NGA/2018/ISTH_0959;Clade II)__AVV65099__GPC (wt)
gggagagucccgcagucggcguccagcggcucugcuuguucgugugugugucguugcaggccuuauucaagcuuaccaugggacaaaucauaacauuuuuccaggaaguaccucaugucauagaggaagugaugaacauuguccugauugcucucagccuuuuggcaauacugaaggggaucuacaauguuguuaccuguggccucuuuggauugguguccuuccuccucuuauguggaagaucauguucaacaacuuacaaggguguuuaugagcuacaaacucuggagcuggacauggcaagccuuaauaugacaaugcccuuaucuugcacgaagaacaacagccaccauuacaucauggucggaaaugagacuggcuuggagcugacuuuaacaaauacaaguaucaucaaccauaaauuuuguaaccucucugaugcacauaaaaagaaucuuuaugaucaugcuuuaaugaguaucauuucaaccuuccacuuauccauuccaaacuuuaaucaguaugaagcaaugagcugugacuucaaugggggaaagauaaguguucaguacaaccuuagccacgccuaugcuauagaugcagccaaccacugcgggacuauugccaauggcguucuucaaacuuuuaugaggauggcuugggguggcagcuauauagcacuugauuccggaaaggggaguugggacuguauaaugacuuccuaccaguauuugauaauccaaaacaccacuugggaagaucauugucaguuuucucgcccauccccuaucgguuaccuagggcuacugucacaaaggaccagggacauuuacaucagucgaagacuucuugggacuuuuacuuggacucucucugauucugaagguaaugaaacaccggguggguauugucuaacaagauggaugcugauugaggccgaguugaaaugcuuugggaacacagcaguugcgaaaugcaaugagaaacaugaugaagaguuuugugacauguuaagauuguuugacuuuaacaaacaagcuauaaggaggcuaaagacagaagcacagaugaguauccagcugauaaacaaagcagugaacgcacugaucaaugaccagcugauuaugaaaaaucauuugagagauaucauggggauuccuuacugcaauuacagcaaguacugguaucuaaaucauacuguaacagggaagacaucguugccaaggugcuggcuugugucaaaugguuccuaccugaaugagacacauuuuucugaugacauugaacaacaagcagacaauaugauaacagaacugcugcaaaaggaguacauagacaggcaagggaaaacaccuuuaggguuaguagaucuuuuugucuucagcaccagcuuuuaucucauuagcaucuuccuccaccugguuaaaaucccaacccacagacaugucauaggaaaacccugcccuaaaccacacagacuuaaucacaugggcauauguucauguggucuauacaaacauccuggugugccagucaaguggaaaagauagggacuagucccuguucccagagcccacuuuuuuuucuuuuuuugaaauaaaauagccugucuuucagaucuaaaaaaaaaaaaaaaaaaaaaaaaaaaaaaaaaaaaaaaaaaaaaaaaaaaaaaaaaaaaaaaaugcaucccccccccccccccccccccccccccccccaaaggcucuuuucagagccaccagaauu

SEQ ID NO: 2301 - RNA, 1749 nt, Artificial Sequence
  mRNA product Design a-1 comprising derived and/or modified sequence from LASV(LASV003-NIG-2008;Clade II)__AIT17580__GPC (wt)
gggagagucccgcagucggcguccagcggcucugcuuguucgugugugugucguugcaggccuuauucaagcuuaccauggggcaaaucauaacauuuuuccaggaagugccucaugucauagaagaagugaugaacauuguccugauugcccucagccuuuuggcaauauugaaagggaucuacaauguugcuacuuguggccucuuuggacugguguccuuucuucucuuauguggaagaucaugcucaacaacuuacaaagguguuuaugagcuacaaacucuagagcuagacauggcaagccuuaauaugacaaugcccuuaucuugcacaaagaauaauagccaccauuacaucauggucggaaaugaaacuggcuuagagcugacuuuaacaaauacaaguaucaucaaccacaaguuuuguaaccuuucugaugcacauaaaaagaaucuuuaugaccaugcuuuaaugagcaucaucucaaccuuccacuuauccauuccuaacuuuaaucaauaugaagcaaugaguugugacuucaauggggggaagauaaguguucaguacaaccuuagccacacuuaugcuguagaugcagcuaaccacugugggacuauugccaauggcguucuucagacuuucaugaggauggcuugggguggcagcuacauagcacuugauuccggaaaagggaguugggauuguauaaugacuuccuaccaauaucugauaauccagaacaccacuugggaagaucauugccaguuuucucgcccaucccccaucgguuaucuggggcuacugucacaaaggaccagggacauuuacaucagucgaagacuccuugggacuuuuacuuggacccucucugauucugaaagcaaugaaacuccagguggguauugucuaacaagguggauguugauugaggccgagcugaagugcuuugggaacacagcaguugcgaaaugcaaugaaaaacaugaugaagaguuuugugacaugcuaagauuguuugacuuuaacaaacaagcuauaaggaggcugaaagcagaagcacagaugagcauccaacuaauaaacaaagcagugaaugcacugaucaaugaccagcugauaaugaagaaucauuuaagagauaucaugggaauuccuuacugcaauuacagcaaauauugguacuugaaucacacuguaacagggaggacaucguuaccaagaugcuggcuugugucaaaugguuccuaccugaaugagacacauuuuucugacgacauugaacaacaagcagacaauaugauaacagaacuguugcagaaggaguacauggacaggcaagggaaaacaccuuuaggguuaguagaucuuuuugucuucagcaccagcuuuuaucucaucagcaucuuccuccaccugguuaaaaucccaacccacagacaugucauagggaaacccugcccuaaaccacacagacucaaccacaugggcauaugcucauguggucuguacaaacauccuggugugccagucaaguggaaaagauagggacuagucccuguucccagagcccacuuuuuuuucuuuuuuugaaauaaaauagccugucuuucagaucuaaaaaaaaaaaaaaaaaaaaaaaaaaaaaaaaaaaaaaaaaaaaaaaaaaaaaaaaaaaaaaaaugcaucccccccccccccccccccccccccccccccaaaggcucuuuucagagccaccagaauu

SEQ ID NO: 2302 - RNA, 1749 nt, Artificial Sequence
  mRNA product Design a-1 comprising derived and/or modified sequence from LASV(LASV035-NIG-2009;Clade II)__AIT17588__GPC (wt)
gggagagucccgcagucggcguccagcggcucugcuuguucgugugugugucguugcaggccuuauucaagcuuaccauggggcaaaucauaacauuuuuccaggaagugccucaugucauugaggaggugaugaacauugucuuaauugcucucagucuucuagcaauacugaaagggauuuacaauguugcuaccuguggccucuuuggguugguguccuuucuucucuuauguggaaggucaugcucaacaacuuacaaggguguuuaugagcuucaaacucuagagcuggauauggcaagccuuaauaugacaaugcccuuauccugcacgaagaacaacagccaccacuacaucaugguuggaaaugagacuggcuuggagcugacuuugacaaacacaaguaucaucaaccacaaguucugcaaccuuuccgaugcacauaaaaagaaucucuaugaccaugcuuuaaugagcaucaucucaacuuuccaccuauccaucccuaacuuuaaucaguaugaagcaaugaguugugacuucaauggggggaagauaaguguucaguacaaccucagccacgcuuaugcuguagaugcagcuaaccauugugggaccauugccaauggaguucuucaaacuuuuaugaggauggcuugggguggcaguuacauagcacuugauucuggaaaggggaguugggauuguauaaugacuuccuaccaauauuugauaauccaaaacaccacuugggaagaucacugccaguuuucucgcccauccccuauugguuaucuggggcuacugucacaaagaaccagggauauuuacaucagccgaagacuccuuggaacuuuuacuuggacucucucugauucugaaggcaaugaaacaccggguggauauuguuuaacaagauggaugcugauugaggccgaauuaaagugcuuugggaacacagcaguugcgaaaugcaaugagaaacaugaugaagaguuuugugacauguuaagguuguuugacuuuaacaaacaggcuauaaggaggcuaaaggcagaagcacagaugagcauccaacuaauaaacaaagcagugaacgcacugaucaaugaccagcucauuaugaagaaucauuuaagagauaucaugggaauuccuuacugcaauuacagcaaguauugguauuuaaaucacacuguaacagggaagacaucguugccaagaugcuggcuuguaucaaaugguuccuaccugaaugaaacacauuuuucugaugacauugaacaacaagcagauaacaugauaacagaauuguuacagaaagaguacauugacaggcaagggaaaacacccuuaggguugguggaucuuuuugucuucagcacuagcuucuaccuuauuagcaucuuccuccaccugguuaaaaucccaacccacagacaugucauagggaagcccugccccaagccacacagacucaaccacaugggcauaugcucauguggucuguacaaacauccugguguaccagucaaguggaaaagauagggacuagucccuguucccagagcccacuuuuuuuucuuuuuuugaaauaaaauagccugucuuucagaucuaaaaaaaaaaaaaaaaaaaaaaaaaaaaaaaaaaaaaaaaaaaaaaaaaaaaaaaaaaaaaaaaugcaucccccccccccccccccccccccccccccccaaaggcucuuuucagagccaccagaauu

SEQ ID NO: 2303 - RNA, 1749 nt, Artificial Sequence
  mRNA product Design a-1 comprising derived and/or modified sequence from LASV(LASV1000-NIG-2009;Clade II)__AIT17782__GPC (wt)
gggagagucccgcagucggcguccagcggcucugcuuguucgugugugugucguugcaggccuuauucaagcuuaccaugggacaaaucauaacauuuuuccaggaaguuccucaugucauagaggaagugaugaacauuguccugauugcucucagccuccuggcaauacuaaaagggaucuacaauguugcuaccuguggccucuuuggauugguguccuuccuccucuuauguggaagaucaugcucaacaacuuacaaggguguuuaugagcugcaaacucuagagcuagacauggcaagccuuaauaugacaaugccucuaucuugcacgaagaauaacagccaccauuacaucauggucggaaaugagacuggcuuggagcugacuuuaacaaacacaaguauuaucaaucacaaguuuuguaaccuuucugaugcacacaaaaagaaucuuuaugaccaugcuuuaaugagcaucaucucaaccuuccauuuaucuauucccaacuucaaucaguaugaagcaaugaguugugacuucaaugggggaaagauaaguguucaguacaaccuuagccacacuuaugcuguagaugcagccaaccacugugggacuaucgccaauggcguccuucagaccuuuaugaggauggcuugggguggcaguuacauagcacuugauuccggaaaggggaguugggacuguauaaugacuuccuaucaauaucugauaauccaaaacaccacuugggaagaucacugccaguuuucucgcccaucuccuaucgguuaucuggggcuacugucacaaaggaccagagacauuuacaucagucgaagacuucuugggacuuucacuuggacucucucugauucugaagguaaugaaacaccggguggguacugucuaacaagguggaugcugauugaggccgaguugaagugcuuugggaacacagcaguugcgaaaugcaaugagaaacaugaugaagaguuuugugacauguuaagauuguuugacuuuaacaaacaagcuauaaagaggcugaagacagaagcacagaugaguauucaacugauaaacaaagcagugaacgcacugaucaaugaccagcugauuaugaagaaucauuugagagacaucaugggaauuccuuacuguaauuacagcaaguauugguaucuaaaucacaccguaacagggaagacaucguugccaaggugcuggcuugugucaaaugguuccuaccugaaugagacacacuuuucugaugacauugaacaacaagcagauaacaugauaacagaacuauugcaaaaggaguacauagacaggcaagggaaaacacccuuaggguuaguagaccuuuuugucuuuagcaccagcuuuuaucucauuagcaucuuccuccaccuggucaaaaucccaacccauagacaugucguagggaaacccugcccuaaaccacacagacucaaccacaugggcauaugcucauguggucuauacaaacauccugguguaccagucaaauggaaaagauagggacuagucccuguucccagagcccacuuuuuuuucuuuuuuugaaauaaaauagccugucuuucagaucuaaaaaaaaaaaaaaaaaaaaaaaaaaaaaaaaaaaaaaaaaaaaaaaaaaaaaaaaaaaaaaaaugcaucccccccccccccccccccccccccccccccaaaggcucuuuucagagccaccagaauu

SEQ ID NO: 2304 - RNA, 1749 nt, Artificial Sequence
  mRNA product Design a-1 comprising derived and/or modified sequence from LASV(LASV221-NIG-2010;Clade II)__AIT17624__GPC (wt)
gggagagucccgcagucggcguccagcggcucugcuuguucgugugugugucguugcaggccuuauucaagcuuaccaugggacaaaucauaacauuuuuccaggaaguaccucaugucauagaggaagugaugaacauuguccugauugcucucagccuucuggcaauacugaaagggaucuacaauguugcuaccuguggccucuuuggauugguguccuuccuccucuuauguggaagaucaugcucaacaacuuacaaggguguuuaugagcuacaaacucuagagcuagacauggcaagccuuaauaugacaaugcccuuaucuugcacgaagaacaacucccaccauuacaucauggucggaaaugagacuggcuuggagcugacuuugacaaauacaagcauuaucaaccacaaguuuuguaaccuuucugaugcgcauaaaaagaaucuuuaugaccaugcuuuaaugaguaucaucucaaccuuccacuuguccauuccuaacuuuaaucaguaugaagcaaugaguugugauuucaaugggggaaagauaaguguucaguacaaccuuagccacacuuaugcuauagaugcagccaaccacugugggaccauugccaauggcguucuucagacuuucaugagaauggcuugggguggcaguuacauagcacuugauuccggaaaggggagcugggauugcauaaugacuuccuaccaauauuugauaauccaaaacaccacaugggaagaucacugccaguuuucucgcccaucccccaucgguuaucuggggcuacuaucacaaagaaccagggacauuuacauuagucgaagacuucuugggacuuucacuuggacucucucugacucugaagguaaugaaacaccggguggguauugucuaacaagauggaugcugauugaggccgaguugaagugcuuuggaaacacagcaguugcaaaaugcaaugaaaaacaugaugaagaguuuugugauauguugagauuguuugacuucaacaaacaagcuauaaggaggcuaaagacagaagcacagaugaguauccaacugauaaacaaagcggugaacgcacugaucaaugaccagcugaucaugaagaaucauuugagagauaucaugggaauuccuuacugcaauuacagcaaguauugguaucuaaaucacacuguaacagggaagacaucguugccaagaugcuggcuugugucgaaugguucuuaccugaaugagacacauuuuucugaugacauugaacaacaagcagacaacaugauaacagaaauguugcaaaaggaguacauggacaggcaagggaaaacacccuuaggguuaguagaucuuuuugucuucagcaccagcuuuuaucucauuagcaucuuccuccaccuaguuaaaauuccaacccacagacaugucauagggaaacccugcccuaaaccacacagacucaaccacaugggcauauguucauguggucuguauaagcauccuggcgugccagucaaguggaaaagauagggacuagucccuguucccagagcccacuuuuuuuucuuuuuuugaaauaaaauagccugucuuucagaucuaaaaaaaaaaaaaaaaaaaaaaaaaaaaaaaaaaaaaaaaaaaaaaaaaaaaaaaaaaaaaaaaugcaucccccccccccccccccccccccccccccccaaaggcucuuuucagagccaccagaauu

SEQ ID NO: 2305 - RNA, 1749 nt, Artificial Sequence
  mRNA product Design a-1 comprising derived and/or modified sequence from LASV(LASV237-NIG-2010;Clade II)__AIT17638__GPC (wt)
gggagagucccgcagucggcguccagcggcucugcuuguucgugugugugucguugcaggccuuauucaagcuuaccaugggacaaaucauaacauuuuuccaggaaguaccucaugucauagaggaagugaugaacauuguccugauugcucucagccuucuggcaauacugaaggggaucuacaauguugccaccuguggccuauuuggacugguguccuuucuccucuuauguggaagaucaugcucaacaacuuauaaggguguuuaugagcuacaaacucuagagcuggauauggcaagccuuaauaugacaaugccccuaucuugcacaaagaacaacagucaccauuacaucauggucggaaaugagacuggcuuggagcugacuuuaacaaauacaaguauuaucaaccacaaguuuuguaaccuuucugaugcacauaaaaaggaucucuaugaccaugcuuuaaugaguaucaucucaaccuuccacuuaucuauuccuaauuuuaaucaguaugaagcaaugaguugugacuucaauggggggaagauaaguguucaguacaaccuuagccacacuuaugcuguagaugcagccaaucacugugggacuaucgccaauggcguucuucagacuuuuaugaggauggcuugggguggcaguuacauagcacuugauuccggaaaggggaguugggauuguauaaugacuuccuaccaauauuugauaauccagaacaccacuugggaagaucacugccaguuuucucgcccauccccuaucgguuaucuggggcuacugucacaaaggaccagagacauuuacaucagucgaagacuucuugggacuuuuacuuggacucucucugauucugaagguaaugaaacaccggguggguacugucuaacaagauggaugcugauugaggccgaguugaagugcuuugggaacacagcaguugcgaaaugcaaugagaaacaugaugaagaguuuugugacauguuaagacuguuugauuucaacaaacaagcuauaaggaggcuaaagacagaagcacagaugaguauccaacugauaaacaaagcagugaaugcauugaucaaugaccagcuuauuaugaagaaucacuugagagauaucaugggaauuccuuacugcaauuacagcaaguacugguaucugaaucacacuguaacagggaagacaucguugccgaggugcuggcuugugucaaaugguuccuaccugaaugagacacauuuuucugaugacauugaacaacaggcagacaacaugauaacagaacuguugcaaaaggaguacauggacaggcaagggaaaacacccuuaggguuaguagaccuuuuugucuucagcaccagcuuuuaucucauuagcaucuuccuccaccugaucaaaaucccaacccacagacauaucacagggaaacccugcccuaaaccacacagacuuaaccacaugggcauaugcucauguggucuauacaaacauccugguguaccagucaaguggaaaagauagggacuagucccuguucccagagcccacuuuuuuuucuuuuuuugaaauaaaauagccugucuuucagaucuaaaaaaaaaaaaaaaaaaaaaaaaaaaaaaaaaaaaaaaaaaaaaaaaaaaaaaaaaaaaaaaaugcaucccccccccccccccccccccccccccccccaaaggcucuuuucagagccaccagaauu

SEQ ID NO: 2306 - RNA, 1749 nt, Artificial Sequence
  mRNA product Design a-1 comprising derived and/or modified sequence from LASV(LASV253-NIG-2011;Clade II)__AIT17670__GPC (wt)
gggagagucccgcagucggcguccagcggcucugcuuguucgugugugugucguugcaggccuuauucaagcuuaccauggggcaaaucauaacauuuuuucaggaagugccucaugucauagaagaagugaugaacauuguccugauugcccucagccuucuggcaauauugaaagggaucuacaauguugcuacuuguggccucuuuggacugguguccuuucuucucuuauguggaagaucaugcucaacaacuuacaaagguguuuaugagcuacaaacucuagagcuagacauggcaagccuuaauaugacaaugcccuuaucuugcacaaagaauaauagccaccauuacaucauggucggaaaugaaacuggcuuagagcugacuuuaacaaauacaaguaucaucaaccacaaguuuuguaaccuuucugaugcacauaaaaagaaucuuuaugaccaugcuuuaaugagcaucaucucaaccuuccacuuauccauuccuaacuucaaucaauaugaagcaaugaguugugacuucaauggggggaagauaaguguucaguacaaccuuagccacacuuaugcuguagaugcagcuaaccacugugggacuauugccaauggcguucuucagacuuuuaugaggauggcuugggguggcagcuacauagcacuugauuccggaaaagggagcugggauuguauaaugacuuccuaccaauauuugauaauccagaacaccacuugggaggaucacugccaguuuucucgcccaucccccaucgguuaucuggggcuacugucacaaaggaccagggacauuuacaucagucgaagacuccuuggaacuuuuacuuggacccucucugauucugaaggcaaugaaacuccagguggguauugucuaacaagguggauguugauugaggccgaguugaagugcuuugggaacacagcaguugcgaaaugcaaugagaaacaugaugaagaguuuugugacaugcuaagauuguuugacuuuaauaaacaagcuauaaggagacugaaagcagaagcacagaugaguauucaacuaauaaacaaagcagugaaugcacugaucaaugaccagcugauaaugaagaaucauuuaagagauaucauggggauuccuuacugcaauuacagcaaguauugguaucugaaucacacuguaacaggaaggacaucguuaccaagaugcuggcuugugucaaaugguuccuaccugaaugagacacauuuuucugacgacauugaacaacaagcagacaacaugauaacagaacuguugcagaaggaguacauagacaggcaagggaaaacaccuuuaggguuaguggaucuuuuugucuucagcaccagcuuuuaucucaucagcaucuuccuccaccugguuaaaaucccaacccacagacauaucauagggaaacccugcccuaaaccacacagacucaaccacaugggcauaugcucauguggucuguacaaacauccuggugugccaguuaaguggaaaagauagggacuagucccuguucccagagcccacuuuuuuuucuuuuuuugaaauaaaauagccugucuuucagaucuaaaaaaaaaaaaaaaaaaaaaaaaaaaaaaaaaaaaaaaaaaaaaaaaaaaaaaaaaaaaaaaaugcaucccccccccccccccccccccccccccccccaaaggcucuuuucagagccaccagaauu

SEQ ID NO: 2307 - RNA, 1749 nt, Artificial Sequence
  mRNA product Design a-1 comprising derived and/or modified sequence from LASV(LASV254-NIG-2011;Clade II)__AIT17674__GPC (wt)
gggagagucccgcagucggcguccagcggcucugcuuguucgugugugugucguugcaggccuuauucaagcuuaccaugggacaaaucauaacauuuuuccaggaaguaccucaugucauagaggaagugaugaacauuguucugauugcucucagccuucuggcaauauugaaagggaucuacaauguugcuaccuguggccucuuuggauugguguccuuucuucucuuauguggaagaucaugcucaacaacuuacaaggguguuuaugagcuacaaacucuagagcuagacaugacaaaccucaauaugacaaugccuuuauccugcacgaaaaacaacagccaccauuacaucauggucggaaaugagacuggucuggagcugacuuuaacaaauacaagcaucaucaaccacaaguuuuguaaccuuucugaugcacauaaaaagaaucuuuauaaccaugcuuuaaugaguauuauuucaacuuuccacuuauccauuccuaacuuuaaucaguaugaagcaaugaguugugacuucaaugggggcaagauaaguguccaguacaaccuuagccauaguuaugcuguggaugcagcuaaccacugugggaccauugccaauggcgugcuucagacuuuuaugaggauggcuugggguggcaguuacauagcacuugauuccggaaaggggaauugggauuguauaaugaccuccuaccaauauuugauaauccaaaacaccacuugggaagaucacugucaguuuucucgcccauccccuauugguuaucugggguuacugucacaaaggaccagggacauuuacaucagucgaagacuucuugggacuuuuacuuggacucucucugauucugaagguaaugaaacaccagguggguauugucuaacaagauggaugcugauugaggccgaguugaagugcuuugggaacacagcaguugcgaaauguaaugagaaacaugaugaggaguuuugugacauguuaagauuguuugacuuuaacaaacaagcuauaaggaggcugaagacagaggcacaggcgaauauccaacugauaaauaaagcagugaacgcacugaucaaugaccagcugaucaugaagaaucauuugagagauaucaugggaauuccuuacugcaauuacagcaaguauugguacuuaaaucacacuguaacagggaagacaucguugccaagaugcuggcuugugucaaauggcuccuacuugaaugagacacauuuuucugaugacauugaacaacaagcagacaauaugauaacagaacuguugcagaaggaguacauggacaggcaagggaaaacacccuuaggguugguagaucuuuuugucuucagcaccagcuuuuaucucauuagcaucuuccuccaccugguuaaaaucccaacccacagacaugucauagggaaacccugcccuaaaccacacagacucaaccacaugggcauaugcucauguggucuguacaaacauccugguguaccagucaaguggaaaagauagggacuagucccuguucccagagcccacuuuuuuuucuuuuuuugaaauaaaauagccugucuuucagaucuaaaaaaaaaaaaaaaaaaaaaaaaaaaaaaaaaaaaaaaaaaaaaaaaaaaaaaaaaaaaaaaaugcaucccccccccccccccccccccccccccccccaaaggcucuuuucagagccaccagaauu

SEQ ID NO: 2308 - RNA, 1749 nt, Artificial Sequence
  mRNA product Design a-1 comprising derived and/or modified sequence from LASV(Nig08-A19;Clade III)__ADU56618__GPC (wt)
gggagagucccgcagucggcguccagcggcucugcuuguucgugugugugucguugcaggccuuauucaagcuuaccaugggacaaauugugacauucuuccaggaagucccucauguuaucgaggaagugaugaauaucguccucauagcauugucaauuuuggcaauccuaaaaggacucuacaacauugcuacauguggcuugauaggccuugucacauuccucuuacuuucuggaaggucauguucaaugaccuacaaaggaguuuaugaacuacagacccuugaacugaacaugaacacucugaauaugacuaugccgcuaucuuguacaaagaacaauagucaccacuacaucauggugggaaacgagacagggcuugagcucaccuuaaccaacacaagcuugcuccaucacaaauucugcaaccuaucagaugcucauaagaaaaaucuuuaugaucacacucucaugagcauuaucuccacauuccauuuguccauuccuaacuuuaaucaguaugaggcaaugaguugugauuuuaaugguggcaagaucacugugcaauacaaucugagucauagcuaugcaauugaugcagcaaaccauuguggcacaguggcaaacgguguguugcaaacauuuaugaggauggcuuggggagguaguuacauugcccuugauuccggacgugggaaaugggauuguauaaugaccaguuaucaauacuuaaucauccagaacacaaccugggaagaucauugucaauuuuccagaccauccccaauuggauaucuugggcuccucucacagagaacuagagacauauacauuaguagaagacuacuaggaacauuuacuuggacacuuucugacucagaaggaaaugagacaccaggagguuacugucucacuagauggauguugauugaggcugaacuaaaguguuucgggaauacagcuguagcuaagugcaaugaaaaacacgaugaagaguuuugugacaugcuaaggcuauuugacuucaauaagcaagcuauaaggagguuaaaggcagaggcccaaaugagcauacagcugaucaacaaagcaguuaaugcucuaauaaacgaucagcugaucaugaagaaucaucuaagggacaucaugggaauaccauacugcaauuacagcaaguacugguaucucaaucacaccucaacagggaggaccucauuaccgagauguuggcuuguuucaaaugggucauaucucaaugaaacucacuuuucagaugacauugagcagcaagcugauaacaugauaacugaaauguugcaaaaagaauaccuggacagacaaggaaagaccccauugggauugguagaucuuuuugucuucaguacaaguuuuuacuuaaucaguauuuuccuccaucuggucaaaauaccaacccauagacacauuguagggaagccuugccccaaaccucauagguugaaccacaugggcaucugcucuuguggucuauauaaacagccaggaguacccguuagauggaagagauaaggacuagucccuguucccagagcccacuuuuuuuucuuuuuuugaaauaaaauagccugucuuucagaucuaaaaaaaaaaaaaaaaaaaaaaaaaaaaaaaaaaaaaaaaaaaaaaaaaaaaaaaaaaaaaaaaugcaucccccccccccccccccccccccccccccccaaaggcucuuuucagagccaccagaauu

SEQ ID NO: 2309 - RNA, 1752 nt, Artificial Sequence
  mRNA product Design a-1 comprising derived and/or modified sequence from LASV(G1180-SLE-2010;Clade IV)__AIT17168__GPC (wt)
gggagagucccgcagucggcguccagcggcucugcuuguucgugugugugucguugcaggccuuauucaagcuuaccaugggacagauagugacauucuuccaggaagugccucauguaauagaagaggugaugaacauuguucucauugcacugucuauacuagcagugcugaaaggucuguacaauuuugcaacauguggccucguuggucuacucacuuuccuccuguuguguggcagaucuugcacagcuagucguuacaaagggguuuaugagcuucagacucuggaacuaaacauggagacacucaauaugaccaugccucucuccugcacaaagaacaacagucaucauuauauaaugguggguaaugagacaggacuagaacugacuuugacuaacacgagcaucauuaaucauaaauuuugcaaucugucugaugcccacaaaaagaaccuuuaugaccacgcucuuaugagcauaauuucaacuuuccacuuauccauccccaacuucaaucaguaugaggcaaugagcugcgauuuuaaugggggaaagauuagugugcaguacaaccugagucacagcuaugcuggggaugcagccaaucauugugguacuguugcaaauggugucuugcagaccuucaugaggauggcuuggggugggagcuacauugcucuugacucaggccauggcaguugggacuguauuaugacuaguuaucaauaucugauaauccaaaauacaaccugggaagaucacugccaguucucaagaccaucucccauugguuaucucgggcuccuuucacaaagaaccagagauauuuacauuaguagaagacuacuaggcacauucacauggacacugucagauucugaaggcaaggacacaccagggggauauugucugaccagauggaugcuaauugaagcugaacuaaaaugcuucgggaacacagcuguggcaaaauguaaugagaagcaugaugaggaauuuugugacaugcugaggcuguuugacuucaacaaacaagccauucaaagguugaaagcugaagcacaaaugagcauucaauugaucaacaaggcaguaaaugcuuugauaaaugaccaacuuauaaugaagaaccauuuacgagacaucaugggaaucccauacuguaauuacagcaaguauugguaccucaaccacacaaccacugggaaaacaucacugccuaaguguuggcuuguaucaaaugguucauacuuaaaugagacccacuuuucugaugauauugagcaacaagcugacaacaugaucacugagauguuacagaaggaguauauggaaaggcagggcaagacaccauugggccuaguugaccucuuuguguuuagcacaaguuucuaucucauuagcaucuuccuucaccuggucaaaauaccaacucauaggcauauuguaggcaagucgugucccaaaccucauagauugaaucacaugggcauauguuccuguggacucuacaaacagcccggugugccugugaaauggaagagaugaggacuagucccuguucccagagcccacuuuuuuuucuuuuuuugaaauaaaauagccugucuuucagaucuaaaaaaaaaaaaaaaaaaaaaaaaaaaaaaaaaaaaaaaaaaaaaaaaaaaaaaaaaaaaaaaaugcaucccccccccccccccccccccccccccccccaaaggcucuuuucagagccaccagaauu

SEQ ID NO: 2310 - RNA, 1752 nt, Artificial Sequence
  mRNA product Design a-1 comprising derived and/or modified sequence from LASV(G1442-SLE-2011;Clade IV)__AIT17180__GPC (wt)
gggagagucccgcagucggcguccagcggcucugcuuguucgugugugugucguugcaggccuuauucaagcuuaccaugggacaaauagugacauucuuucaggaagugccucaugugauagaggagguaaugaacauugugcucauugcacuauccauacuggcagugcugaagggucuauacaauguugcaacaugcggccugauugguuuagucaccuuccuauuguuaugugguaggucuugcacaacaacucuuuacaaaggaguuuacgaacuucagacucuggaauuaaacauggagacacucaauaugacuaugccucucucuuguacaaagaacaacagucaccacuauauaaggguggguaaugagacaggacuagaguugacccugaccaacacaagcaucaucaaucacaaguuuugcaaucuaucugaugcucacaaaaagaaccucuaugaucaugcuuugaugagcauaaucucgacuuuucacuuguccauucccaacuucaaccaauaugaggcaaugagcugugacuucaauggagggaagauuagugugcaguauaaccugagucacagcuaugcuggagaugcagccaaccauugugguacaguugcaaaugguguuuuacaaaccuucaugaggauggcuuggggugggaguuacaucgcccuugacucaggucguggcaauugggacuguauuaugacuaguuaucaauaccuaauaauucagaauacgaccugggaugaucauugccaauucucaagaccaucccccaucgguuaucuugggcuccucucacaaaggaccagagauguuuauaucaguagaagacugcuaggcacauucacauggacacugucagauucugaaggcaaggacacaccaggaggguacugucugaccagguggaugcuaauugaagcugaacugaaaugcuuuggcaacacagcuguagcaaaauguaaugagaaacaugaugaagaauucugugacaugcuaaggcuguuugacuucaauaaacaagcuauucagagguugaaagccgaagcacaaaugaguauucaguugaucaacaaagcagugaaugcuuugauaaaugaccaacuaauaaugaaaaaccaucuacgggacaucauggggauuccauacugcaauuacagcaaguacugguaucucaacaacacagccacugggaaaacaucacugcccaaauguuggcuuauaucaaauggcucauauuugaacgaaacucacuucucugaugacauugaacaggaagcugacaauaugaucacugagauguuacaaaaagaauacauggagaggcaggggaagacaccauuaggucugguugaccucuuuguguucagcacaaguuucuaucucauuagcaucuuccuucaccuagucaaaauaccaacucacaggcauauugugggcaaaucauguccuaaaccccauagguugaaucacauggguauuugcucuuguggacuuuauaaacaacccggugugccuguaagauggaagagaugaggacuagucccuguucccagagcccacuuuuuuuucuuuuuuugaaauaaaauagccugucuuucagaucuaaaaaaaaaaaaaaaaaaaaaaaaaaaaaaaaaaaaaaaaaaaaaaaaaaaaaaaaaaaaaaaaugcaucccccccccccccccccccccccccccccccaaaggcucuuuucagagccaccagaauu

SEQ ID NO: 2311 - RNA, 1752 nt, Artificial Sequence
  mRNA product Design a-1 comprising derived and/or modified sequence from LASV(G3010-SLE-2013;Clade IV)__AIT17344__GPC (wt)
gggagagucccgcagucggcguccagcggcucugcuuguucgugugugugucguugcaggccuuauucaagcuuaccaugggacagauaguaacauucuuccaggaagugccucaugugauagaagaggugaugaacauuguucucauugcacugucuauauuagcagugcugaaaggucuguacaauuuugcaacauguggccucguugguuugguuaccuuccuccuguuaugugguaggucuugcacaaccagucuuuacaaagggguuuaugagcuucagacucuggaacuaaacauggagacacucaauaugaccaugccucucuccuguacaaagaacaacagucaucauuauauuaugguggguaaugagacaggacuagaacugaccuugaccaacacgagcaucauuaaucauaaauuuugcaaucugucugaugcccacaaaaagaaccucuauaaucacgcucuuaugagcauaauuucaacuuuccaucuguccauucccaacuucaaucaguaugaggcaaugagcugcgauuucaaugggggaaagauuagugugcaguacaaccugagucacaguuaugcuggggaugcggccagccauuguggcacuguugcaaauggugucuuacagacuuucaugaggauggcuugggguggaagcuauauugcucuugacucaggcuauggcaagugggacugcauuaugacuaguuaucaguaccugauaauucaaaauacaaccugggaagaucacugccaauucucaagaccaucucccauuggcuaucucgggcuccucucacaaaggaccagagauauuuauauuaguagaagacugcugggcacauucacauggacacugucggauucugaagguaaggacacaccagggggauauuguuugaccagauggaugcuaauugaagcugaacuaaagugcuucgggaacacagcuguagcaaaauguaaugagaagcaugaugaggaauuuugugacaugcugaggcuguuugacuucaacaaacaagccauucaaagauugaaaacugaagcacaaaugagcauucaguugaucaacaaggcaguaaaugccuuaauaaaugaccagcuuauaaugaagaaccaucuacgagacauaaugggaauuccauacuguaacuacagcaaguauugguaccucaaccacacaaccacugggaaaacaucacugccuaaauguuggcuuguaucaaauggcucauacuugaaugagacccacuuuucugaugauauugaacaacaggcugacaacaugaucacugagauguuacagaaagaguacauggagaggcaggggaagacaccauugggccuggucgaccuuuuuguguucagcacaaguuucuaucucaucaguaucuuucuucaccuagucaaaauaccaacucauagacauauuguaggaaagucgugucccaaaccucacagauugaaucacaugggcauauguuccuguggacucuacaaacagcccggugugccugugagauggaagagaugaggacuagucccuguucccagagcccacuuuuuuuucuuuuuuugaaauaaaauagccugucuuucagaucuaaaaaaaaaaaaaaaaaaaaaaaaaaaaaaaaaaaaaaaaaaaaaaaaaaaaaaaaaaaaaaaaugcaucccccccccccccccccccccccccccccccaaaggcucuuuucagagccaccagaauu

SEQ ID NO: 2312 - RNA, 1752 nt, Artificial Sequence
  mRNA product Design a-1 comprising derived and/or modified sequence from LASV(G502-SLE-2009;Clade IV)__AIT17126__GPC (wt)
gggagagucccgcagucggcguccagcggcucugcuuguucgugugugugucguugcaggccuuauucaagcuuaccaugggacagauagugacauucuuccaggaaguaccucauguaauagaagaggugaugaacauuguucucauugcacugucuauacuagcagugcugaaaggucuguauaauuuugcaacauguggccucguuggucuacucaccuuccuccuauuguguggcaggucuugcacaaccggacuuuacaaagggguuuaugagcuucaaacucuggaacuaaacauggagacacucaauaugaccaugccucucuccugcacaaagaacaacagucaucauuauauaaugguggguaaugagacaggacuagaacugacuuugacuaacacgagcaucauuaaucauaaauuuugcaaucugucugaugcccacaaaaagaaccuuuaugaccacgcucuuaugagcauaauuucaacuuuccacuuguccauccccaacuucaaucaguaugaggcaaugagcugcgauuuuaaugggggaaagauuaguguacaguacaaccugagccacaguuaugcuggggaugcggcugaucauuguggcacuguugcaaauggugucuugcagacuuucaugaggauggccuggggugggagcuacauugcucuugacucaggucguggcaggugggacuguauuaugacuaguuaucaauauuugauaauccaaaauacaaccugggaagaucacugccaguucucaagaccaucucccaucgguuaucucgggcuccucucacaaagaacuagagacauuuacauuaguagaaggcuacuaggcacauucacauggacacugucagauucugaaggcaaggacacaccaggaggauauugucugacuagauggaugcugauugaggcugaauuaaaaugcuucgggaacacagcuguagcaaaauguaaugagaagcaugaugaggaauuuugugacaugcugaggcuguuugacuucaacaaacaagccauucaaagguuaaaagcugaagcacagaugagcauucaauugaucaacaaggcaguaaaugcuuugauaaaugaccaacuuguaaugaagaaccacuuacgggacaucaugggaauuccauacuguaauuacagcagguauugguaucucaaccacacaaccacuggaagaacaucacugccuaaauguuggcuugugucaaauggcucauacuuaaacgagacccacuuuucugaugauauugagcaacaagcugacaacaugaucacugagauguuacagaaggaauauauggaaaggcagggaaagacaccauuaggucugguugaccucuuuguguucagcacaaguuucuaucuuauuagcaucuuccuucaccuggucaagauaccaacucauaggcauauugugggcaagucgugucccaaaccucauagauugaaucacaugggcauauguuccuguggacucuacaaacagcccgguguaccugugaaauggaagagaugaggacuagucccuguucccagagcccacuuuuuuuucuuuuuuugaaauaaaauagccugucuuucagaucuaaaaaaaaaaaaaaaaaaaaaaaaaaaaaaaaaaaaaaaaaaaaaaaaaaaaaaaaaaaaaaaaugcaucccccccccccccccccccccccccccccccaaaggcucuuuucagagccaccagaauu

SEQ ID NO: 2313 - RNA, 1752 nt, Artificial Sequence
  mRNA product Design a-1 comprising derived and/or modified sequence from LASV(G733-SLE-2010;Clade IV)__AIT17154__GPC (wt)
gggagagucccgcagucggcguccagcggcucugcuuguucgugugugugucguugcaggccuuauucaagcuuaccaugggacagauagugacauucuuccaggaagugccucauguaauagaagaggugaugaacauuguucucauugcacugucuauacuagcaguccugaagggucuguacaacuuugcaacauguggcaucguugguuuggucagcuuucuccuguuguguggcaggucuugcacaaccagucuuuacaaagggguuuaugagcuucagacucuggagcuaaacauggagacacuuaacaugaccaugccucucucuugcacaaagaacaacagucaucauuauauaauggugggcaaugagacgggauuggaacugaccuugaccaacacgagcauuaucaaucauaaauuuugcaaucuaucugaugcccauaagaagaaccucuaugaccacgcccuuaugaguauaaucucaaccuuccacuuguccauccccaacuucaaucaguaugaagcaaugagcugugauuucaaugggggaaagauuaguguacaguacaaccugagucacagcuaugcuggggaugcagccaaccauuguggcacaauugcaaauggugucuuacagacuuucaugaggauggccuggggugggagcuacauugcucuugacucaggccgugacaggugggacugcauaaugaccaguuaucaauaucugauaauccaaaacacaaccugggaagaucacugccaauucucaagaccaucucccaucgguuaucuugggcuccucucacaaaggaccagagauauauauauuaguaggagacuacugggcacauuuacauggacauugucagauucugaagguaaggacacaccaggaggguauugucuaaccagauggaugcugauugaggcugagcugaaaugcuuugggaacacagcuguggcaaaaugcaaugagaaacaugaugaggaauuuugugauaugcuaaggcuguuugacuucaacaaacaagccauucaaagguuaaaagcugaggcacaaaugagcauucaguugaucaacaaagcagugaaugcuuugauaaacgaccaacuaauaaugaagaaccaucuacgggacaucaugggaauuccauacuguaauuacagcaaguacugguaccucaaccacacaacuacugggaaaacaucacugccuaaauguuggcuugugucgaaugguucauacuuaaacgagacucacuuuucugaugacauugaacaacaagcugacaauaugaucacugagauguuacagaaggaauacauggaaaggcaggggaagacaccauugggucuaguugaccucuuuguguucagcacaaguuucuaucucauuagcaucuuccuucauuuggucaaaauaccaacucauaggcauguuguaggcaagucgugucccaagccucacagauugaaucacaugggcauaugcuccugcggacucuauggacagccugguguaccugugaaauggaagagaugaggacuagucccuguucccagagcccacuuuuuuuucuuuuuuugaaauaaaauagccugucuuucagaucuaaaaaaaaaaaaaaaaaaaaaaaaaaaaaaaaaaaaaaaaaaaaaaaaaaaaaaaaaaaaaaaaugcaucccccccccccccccccccccccccccccccaaaggcucuuuucagagccaccagaauu

SEQ ID NO: 2314 - RNA, 1752 nt, Artificial Sequence
  mRNA product Design a-1 comprising derived and/or modified sequence from MOPV/LASV reassortant(IGS-1;Clade IV)__AFY05576__GPC (wt)
gggagagucccgcagucggcguccagcggcucugcuuguucgugugugugucguugcaggccuuauucaagcuuaccaugggacaaauagugacauucuuccaggaagugccucauguaauagaagaggugaugaacauuguucucauugcacugucuguacuagcagugcugaaaggucuguacaauuuugcaacguguggccuuguugguuuggucacuuuccuccuguugugugguaggucuugcacaaccagucuuuauaaagggguuuaugagcuucagacucuggaacuaaacauggagacacucaauaugaccaugccucucuccugcacaaagaacaacagucaucauuauauaauggugggcaaugagacaggacuagaacugaccuugaccaacacgagcauuauuaaucacaaauuuugcaaucugucugaugcccacaaaaagaaccucuaugaccacgcucuuaugagcauaaucucaacuuuccacuuguccauccccaacuucaaucaguaugaggcaaugagcugcgauuuuaaugggggaaagauuagugugcaguacaaccugagucacagcuaugcuggggaugcagccaaccauugugguacuguugcaaaugguguguuacagacuuuuaugaggauggcuuggggugggagcuacauugcucuugacucaggccguggcaacugggacuguauuaugacuaguuaucaauaucugauaauccaaaauacaaccugggaagaucacugccaauucucgagaccaucucccaucgguuaucucgggcuccucucacaaaggacuagagauauuuauauuaguagaagauugcuaggcacauucacauggacacugucagauucugaaggugaagacacaccagggggauauugucugaccagguggaugcuaauugaggcugaacuaaaaugcuucgggaacacagcuguggcaaaauguaaugagaagcaugaugaggaauuuugugacaugcugaggcuguuugacuucaacaaacaagccauucaaagguugaaagcugaagcacaaaugagcauucaguugaucaacaaagcaguaaaugcuuugauaaaugaccaacuuauaaugaagaaccaucuacgggacaucaugggaauuccauacuguaauuacagcaaguauugguaccucaaccacacaacuacugggagaacaucacugcccaaauguuggcuuguaucaaaugguucauacuugaacgagacccacuuuucugaugauauugaacaacaagcugacaauaugaucacugagauguuacagaaggaguauauggagaggcaggggaagacaccauugggucuaguugaccucuuuguguucagcacaaguuucuaucuuauuagcaucuuccuucaccuagucaaaauaccaacucauaggcauauuguaggcaagucgugucccaaaccucacagauugaaucauaugggcauuuguuccuguggacucuacaaacagccuggugugccugugaaauggaagagaugaggacuagucccuguucccagagcccacuuuuuuuucuuuuuuugaaauaaaauagccugucuuucagaucuaaaaaaaaaaaaaaaaaaaaaaaaaaaaaaaaaaaaaaaaaaaaaaaaaaaaaaaaaaaaaaaaugcaucccccccccccccccccccccccccccccccaaaggcucuuuucagagccaccagaauu

SEQ ID NO: 2315 - RNA, 1752 nt, Artificial Sequence
  mRNA product Design a-1 comprising derived and/or modified sequence from LASV(LM765-SLE-2012;Clade IV)__AIT17814__GPC (wt)
gggagagucccgcagucggcguccagcggcucugcuuguucgugugugugucguugcaggccuuauucaagcuuaccaugggacaaauagugacauucuuccaggaagugccccaugucauagaagaggugaugaacauuguucucauugcacuguccauacuagcagugcugaaaggucuguacaauuuugcaacauguggccucguuggcuuggucacuuuccuccuguuguguggcaggucuuguacaacuagccuuuacaaagggguuuaugagcuucagacucuggaacuaaacauggaaacacucaauaugaccaugccucucuccugcacaaagaacaauagucaucauuauauaauggugggcaaugagacaggacuagaacugaccuugaccaacacgagcauuauugaucauaaauuuugcaaucugucugaugcccacagaaagaaccucuaugaccacgcucuuaugagcauuaucucaacuuuccacuugucuaucccuaacuucaaucaguaugaggcaaugagcugcgauuucaaugggggaaagauuaguguacaguacaaccugagucacagcuaugccaaggacgcagccgaccauuguggaacuguugcaaaugguguauuacagacuuucaugaggauggcuuggggugggagcuacaucgcucuugacucaggccguggcaggugggacuguauuaugacuaguuaucaauaucugauaauccaaaauacaaccugggaagaucacugccaauucucgagaccaucucccaucgguuaucucgggcuccucucacagaggaccagagauauuuauauuaguagaaggcuacuaggcacauucacauggacacugucagauucugaaggcaaggacacaccagggggauauugucuaaccagauggaugcuaauugaggcugagcuaaagugcuucgggaauacagcuguggcaaaauguaaugagaagcaugaugaggaauuuugugacaugcugagguuguuugacuuuaacaagcaagccauucaaagguugaaagcugaagcacaaaugagcauucaguugaucaacaaagcaguaaaugcuuugauaaaugaccaacuuauaaugaagaaccaucuacgggacaucauggggauuccauacuguaauuacagcaaguauugguaccucaaccacacaacuacuggaaaaacaucacugcccaaguguuggcuuguaucaaaugguucauaccugaacgagacccacuuuucugaugacauugaacaacaagcugacaacaugaucaccgagauguuacagaaggaguauauggagaggcaggggaagacaccauugggucugguugaccucuuuguguucagcacaagcuucuaucucauuagcaucuuccuucaccuaguuaaaauaccaacucauaggcauauuguaggcaagccgugucccaaaccucacagguugaaucauaugggcauuuguuccuguggacucuauaaacagccuggugugccuguaaaauggaagagaugaggacuagucccuguucccagagcccacuuuuuuuucuuuuuuugaaauaaaauagccugucuuucagaucuaaaaaaaaaaaaaaaaaaaaaaaaaaaaaaaaaaaaaaaaaaaaaaaaaaaaaaaaaaaaaaaaugcaucccccccccccccccccccccccccccccccaaaggcucuuuucagagccaccagaauu

SEQ ID NO: 2316 - RNA, 1752 nt, Artificial Sequence
  mRNA product Design a-1 comprising derived and/or modified sequence from LASV(LM776-SLE-2012;Clade IV)__AIT17824__GPC (wt)
gggagagucccgcagucggcguccagcggcucugcuuguucgugugugugucguugcaggccuuauucaagcuuaccaugggacagauagugacauucuuccaggaagugccucauguaauagaagaggugaugaacauuguccucauugcgcugucuauauuagcagugcugaaaggucuguacaacuuugcaacauguggccucguugguuugguuacuuuccuccuguuguguggcaggucuugcacaaccaguguuuauaaaggggucuaugagcuucagacucuggaguuaaacauggagacacucaauaugaccaugccucucuccugcacaaagaauaacagucaucauuauauaaugguagguaaugagacaggacuagaacugaccuugaccaacacaagcauuauuaaucauaaauuuugcaaucugucugaugcccacaaaaagaaccucuaugaccaugcccuuaugagcauaauuucaacuuuccacuuguccauccccaacuucaaucaguaugaagcaaugagcugugauuucaaugggggaaagauuagugugcaguacaaccugagucacagcuaugcuggggaugcugccaaccauuguggcacuguugcaaauggugucuuacagacuuucaugaggauggcuuggggugggagcuacauugcucuugacucaggccauggcaagugggacuguauuaugacuaguuaucaauaucugauaauccaaaauacaaccugggaagaucacugccaauucucaagaccaucuccuaucgguuaucuugggcuucucucacaaaggaccagagauauuuauaucaguagaagacuacuaggcacauucacauggacacugucagauucugaaggcaaggacacaccagggggauauugucugaccagauggaugcugauugaagcugaauuaaaaugcuucgggaacacagcuguagcaaaauguaaugagaagcaugaugaggaauuuugugacauguugaggcuguuugacuucaacaaacaagccauucaaagguugaaagcugaagcacaaaugagcauucaguugaucaacaaggcaguaaaugccuugauaaaugaucaacuuauaaugaagaaccaucuacgggacaucaugggaaucccauacuguaauuacagcaaauauugguaccucaaccacacaacuacugggaaaacaucacugccuaaauguuggcuugucucaaaugggucauacuugaacgagacccacuuuucugaugauauugaacaacaagcugacaacaugaucacugagauguuacagaaggaguauauggagaggcaggggaagacaccauugggccuaguugaccucuuuguguucagcacaaguuucuaucucaucagcaucuuccuucaccuagucaaaauaccaacucauaggcauauuguaggcaagucguguccuaaaccucacagauugaaucacaugggcauauguuccuguggacucuacaaacagcccggugugccugugagauggaaaagaugaggacuagucccuguucccagagcccacuuuuuuuucuuuuuuugaaauaaaauagccugucuuucagaucuaaaaaaaaaaaaaaaaaaaaaaaaaaaaaaaaaaaaaaaaaaaaaaaaaaaaaaaaaaaaaaaaugcaucccccccccccccccccccccccccccccccaaaggcucuuuucagagccaccagaauu

SEQ ID NO: 2317 - RNA, 1752 nt, Artificial Sequence
  mRNA product Design a-1 comprising derived and/or modified sequence from LASV(Mad39;Clade IV)__ANH09722__GPC (wt)
gggagagucccgcagucggcguccagcggcucugcuuguucgugugugugucguugcaggccuuauucaagcuuaccauggggcaaauugugacauucuuucaggaagugccucauguaauugaggaggugaugaacauuguacucauugcacuauccauacuggcagugcuaaagggucuguacaauguugcaacauguggccucauuggcuugguuaccuuccuccugcugugugguagaucuuguacaaccacucuuuauaaagggguuuaugagcuucaagcucuggaacuaaacauggaaacacucaacaugacuaugccucucucuugcacaaaaaacaacucucaucacuauauaagggugggcaaugaaacaggccuagaacugaccuugaccaacacaagccucauaaaucacaaguucugcaaucugucugaugcucacaaaaagaaccucuaugaucaugcucuuaugagcauaaucucaacuuuccauuuguccauccccaacuucaaucaguaugaagcaaugagcugugauuucaaugaugggaagaucaguguacaguacaaccuaagccacaccuacgcuggggauacagccaaccacugugguacuguugcgaacgguguuuuacagacuuucaugaggauggcuuggggugggaguuacauugcucuugauucaggccgugguggaugggacugcauuaugaccagcuaucaauauuugauaauucagaacacaaccugggaagaucacugucaguucucaagaccaucucccaucggguaccuugggcuccucucacaaagaaccagagacauuuauaucaguagaagacuacugggcacauucacauggacacuaucagauucugaggguaaagacacaccagggggguacugucuaacuagguggaugcugauugaagcugaauugaaaugcuuuggcaacacagcuguagcaaaaugcaaugagaagcaugaugaggaauuuugugauauguugaggcuauuugacuuuaacaaacaagccauucaaagauugaaagcugaagcacaaaugaguauucagcugaucaacaaagcagugaaugccuugauaaaugaucaacugauaaugaaaaaccauuugcgggacauuauggggauuccguacugcaacuacagcaaguauugguaucuuaaucacacagucaccggaaagacaucauuacccaaaugcuggcuuguaucaaauggcucauaccuaaacgagacccacuucucugaugauauugagcagcaagcugauaacaugauuacugagaugcuacagaaggaauacauggagagacaggggaagacaccacuuggucugguugaccucuuuguauuuagcacaaguuucuaucucauuagcauuuuccuucaccuagugaaaauaccaacucauaggcauguugugggcaaaccguguccuaaaccucacagacugaaccacauggguauauguucuuguggguucuacaagcaaccuggugugccugugagauggaagagaugaggacuagucccuguucccagagcccacuuuuuuuucuuuuuuugaaauaaaauagccugucuuucagaucuaaaaaaaaaaaaaaaaaaaaaaaaaaaaaaaaaaaaaaaaaaaaaaaaaaaaaaaaaaaaaaaaugcaucccccccccccccccccccccccccccccccaaaggcucuuuucagagccaccagaauu

SEQ ID NO: 2318 - RNA, 1752 nt, Artificial Sequence
  mRNA product Design a-1 comprising derived and/or modified sequence from LASV(Z0947-SLE-2011;Clade IV)__AIT17840__GPC (wt)
gggagagucccgcagucggcguccagcggcucugcuuguucgugugugugucguugcaggccuuauucaagcuuaccaugggacaaauagugacauucuuccaggaagugccccaugucauagaagaggugaugaacaucguucucauugcacugucuauacuagcaguguugaaaggucuguacaauuuugcaacauguggccucguuggcuuggucacuuuccuccuguuguguggcaggucuugcacaauuagccuuuacaaggggguuuaugagcuucagacucuggaacuaaacauggaaacacucaauaugaccaugccucucuccuguacaaagaacaacagucaucauuauauaauggugggcaaugagacaggacuagaacugaccuugaccaacacgagcauuauuaaucauaaauuuugcaaucugucugaugcccacaaaaagaaccucuaugaccaugcucuuaugagcauuaucucaacuuuccacuuguccaucccuaacuucaaucaguaugaggcaaugagcugcgauuucaaugggggaaagauuagugugcaguacaaccugagucacagcuaugccggggacgcagccaaccauugugguacuguugcaaaugguguauuacagacuuucaugaggauggcuuggggugggagcuacaucgcucuugacucaggccgugacaggugggacuguauuaugacuaguuaucaauaucugauaauccaaaauacaaccugggaagaucacugccaauucucgagaccaucucccaucgguuaucucgggcuccucucacaaaggaccagagauauuuauauuaguagaaggcuacuaggcacauucacauggacacugucagauucugaaggcaaggacacaccagggggauauugucuaaccagauggaugcuaauugaggcugagcuaaagugcuucgggaacacagccguggcaaaauguaaugagaagcaugaugaggaauuuugugacaugcugagguuguuugacuuuaacaaacaagccauucaaagguugaaagcugaagcacaaaugagcauucaguugaucaacaaagcaguaaaugcuuugauaaaugaccaacuuauaaugaagaaccaucuacgggacaucauggggauuccauacuguaauuacagcaaguauugguaccucaaccacacaacuacuggaaaaacaucacugcccaaguguuggcuuguaucaaaugguucauaccugaacgagacccacuuuucugaugacaucgaacaacaagcugacaacaugaucacugagauguuacagaaggaguauauggagaggcaggggaagacaccauugggucugguugaccucuuuguguucagcacaagcuucuaucucauuagcaucuuccuucaccuaguuaaaauaccaacucauaggcauauuguaggcaagccgugucccaaaccucacagguugaaucauaugggcauuuguuccuguggacucuauaaacagccuggugugccugugaaauggaagagaugaggacuagucccuguucccagagcccacuuuuuuuucuuuuuuugaaauaaaauagccugucuuucagaucuaaaaaaaaaaaaaaaaaaaaaaaaaaaaaaaaaaaaaaaaaaaaaaaaaaaaaaaaaaaaaaaaugcaucccccccccccccccccccccccccccccccaaaggcucuuuucagagccaccagaauu

SEQ ID NO: 2319 - RNA, 1752 nt, Artificial Sequence
  mRNA product Design a-1 comprising derived and/or modified sequence from LASV(Josiah;Clade IV)__NP_694870__GPC (opt1) R7278
gggagagucccgcagucggcguccagcggcucugcuuguucgugugugugucguugcaggccuuauucaagcuuaccaugggccagaucgugaccuucuuccaggaggucccccacgugaucgaggaggugaugaacaucguccugaucgcccucagcgugcuggccgugcugaaggggcucuacaacuucgcgaccugcggccuggucgggcuggugacguuccuccugcugugcggccgcuccugcaccaccagccucuacaaggggguguacgagcugcagacccuggagcucaacauggagacgcugaacaugaccaugccgcuguccugcaccaagaacaacagccaccacuacaucauggucggcaacgagaccggccucgagcugacgcugaccaacaccuccaucaucaaccacaaguucugcaaccucagcgacgcccacaagaagaaccuguacgaccacgcccugauguccaucaucagcaccuuccaccucuccauccccaacuucaaccaguacgaggccaugagcugcgacuucaacgggggcaagaucuccgugcaguacaaccugagccacuccuacgccggggacgcggccaaccacugcggcacgguggccaacgggguccugcagaccuucaugcggauggccuggggcggcagcuacaucgcgcucgacuccgggcgcggcaacugggacugcaucaugaccagcuaccaguaccugaucauccagaacaccacgugggaggaccacugccaguucucccggcccagccccaucggguaccugggccuccugucccagcgcacccgggacaucuacaucagccgccggcugcucggcaccuucaccuggacgcugagcgacuccgaggggaaggacaccccgggcggguacugccugacccgcuggaugcucaucgaggccgagcugaagugcuucggcaacaccgccguggccaagugcaacgagaagcacgacgaggaguucugcgacaugcugcggcuguucgacuucaacaagcaggccauccagcgccugaaggcggaggcccagaugagcauccagcugaucaacaaggccgugaacgcccucaucaacgaccagcugaucaugaagaaccaccuccgggacaucauggggauccccuacugcaacuacuccaaguacugguaccucaaccacacgaccaccggccgcaccagccugcccaagugcuggcuggucuccaacggcagcuaccucaacgagacgcacuucuccgacgacaucgagcagcaggccgacaacaugaucaccgagaugcugcagaaggaguacauggagcggcaggggaagacgccccugggccucguggaccuguucguguucagcaccuccuucuaccugaucagcaucuuccugcaccucgucaagaucccgacccaccgccacaucguggggaaguccugccccaagccccaccggcugaaccacaugggcaucugcagcugcgggcuguacaagcagcccggcgugccggucaaguggaagcgcugaggacuagucccuguucccagagcccacuuuuuuuucuuuuuuugaaauaaaauagccugucuuucagaucuaaaaaaaaaaaaaaaaaaaaaaaaaaaaaaaaaaaaaaaaaaaaaaaaaaaaaaaaaaaaaaaaugcaucccccccccccccccccccccccccccccccaaaggcucuuuucagagccaccagaauu

SEQ ID NO: 2320 - RNA, 1749 nt, Artificial Sequence
  mRNA product Design a-1 comprising derived and/or modified sequence from LASV(LP;Clade I)__AAF86701__GPC (opt1)
gggagagucccgcagucggcguccagcggcucugcuuguucgugugugugucguugcaggccuuauucaagcuuaccaugggccagaucaucaccuucuuccaggaggugccccacgucaucgaggaggugaugaacaucgugcugaucgcccucagccugcuggccauccucaaggggcuguacaacaucgcgaccugcggcaucaucgggcuggucgccuuccucuuccugugcggcaaguccugcagccugacgcucaagggcggguacgagcugcagacccuggagcucaacauggagacccugaacaugaccaugccgcuguccugcacgaagaacagcucccaccacuacauccgcgugggcaacgagaccgggcucgagcugacccugaccaacacgagcaucaucaaccacaaguucugcaaccucuccgacgcccacaagaagaaccuguacgaccacgcccugaugagcaucaucuccaccuuccaccucagcauccccaacuucaaccaguacgaggccauguccugcgacuucaacggcgggaagaucagcgugcaguacaaccugucccacagcuacgcgggcgacgccgccgagcacugcgggaccgucgccaacggcgugcugcagaccuucaugcggauggcguggggcgggcgcuacaucgcccucgacuccggcaaggggaacugggacugcaucaugacgagcuaccaguaccugaucauccagaacaccaccugggaggaccacugccaguucucccggcccagccccaucggcuaccugggccuccugucccagcgcacccgggacaucuacaucagccgccggcugcucgggacguucaccuggacccugagcgacuccgagggcaacgagacccccgggggcuacugccugacgcgcuggaugcucaucgaggccgagcugaagugcuucgggaacaccgccguggccaagugcaacgagaagcacgacgaggaguucugcgacaugcugcggcuguucgacuucaacaagcaggcgauccgccggcugaaggccgaggcccagaugagcauccagcugaucaacaaggccgucaacgcccucaucaacgaccagcugaucaugaagaaccaccuccgcgacaucaugggcauccccuacugcaacuacuccaaguacugguaccucaaccacaccagcuccggccggaccagccugcccaagugcuggcugaucuccaacgggagcuaccucaacgagacgcaguucuccgacgacaucgagcagcaggcggacaacaugaucaccgagaugcugcagaaggaguacaucgagcgccagggcaagaccccgcuggggcucguggacaucuucaucuucagcaccuccuucuaccugaucagcaucuuccugcaccugaucaagaucccgacgcaccggcacaucgugggcaagcccugccccaagccccaccgccucaaccacaugggggucugcuccugcggccuguacaagcacccgggcgugcccaccaaguggaagcggugaggacuagucccuguucccagagcccacuuuuuuuucuuuuuuugaaauaaaauagccugucuuucagaucuaaaaaaaaaaaaaaaaaaaaaaaaaaaaaaaaaaaaaaaaaaaaaaaaaaaaaaaaaaaaaaaaugcaucccccccccccccccccccccccccccccccaaaggcucuuuucagagccaccagaauu

SEQ ID NO: 2321 - RNA, 1749 nt, Artificial Sequence
  mRNA product Design a-1 comprising derived and/or modified sequence from LASV(803213;Clade II)__AAF86703__GPC (opt1)
gggagagucccgcagucggcguccagcggcucugcuuguucgugugugugucguugcaggccuuauucaagcuuaccaugggccagaucaucaccuucuuccaggaggugccccacgucaucgaggaggugaugaacaucgugcugaucgcccucagccugcuggccauccucaaggggaucuacaacgucgcgaccugcggccuguucgggcugaucuccuuccuccugcugugcggccgcagcugcuccgugacguacaaggggguguacgagcuccagacccuggagcugaacauggccaaccucaacaugaccaugccgcugagcugcaccaagaacaacucccaccacuacaucauggucggcaacgagacgggccuggagcucacccugaccaacaccagcaucaucaaccacaaguucugcaaccuguccgacgcccacaagaagaaccucuacgaccacgcccugaugagcaucaucuccacguuccaccugagcauccccaacuucaaccaguacgaggccauguccugcgacuucaacgggggcaagaucagcgugcaguacaaccucucccacagcuucgcgguggacgccgccaaccacugcgggaccaucgccaacggcguccugcagaccuucaugcggauggcguggggcggguccuacaucgcccuggacagcggcaaggggaacugggacugcaucaugaccuccuaccaguaccucaucauccagaacacgaccugggaggaccacugccaguucagccgccccucccccaucggcuaccuggggcugcucagccagcggacccgcgacaucuacaucagccggcgccugcugggcaccuucacguggacccucuccgacagcgagggcaacgaggcccccgggggcuacugccugacccgguggaugcugaucgaggccgagcucaagugcuucgggaacaccgccguggcgaagugcaacgagaagcacgacgaggaguucugcgacaugcugcgccuguucgacuucaacaagcaggccaucaagcggcucaagacggaggcccagauguccauccagcugaucaacaaggccgugaacgcccugaucaacgaccagcucaucaugaagaaccaccuccgcgacaucaugggcauccccuacugcaacuacagccgguacugguaccugaaccacaccgucaccgggaagaccucccugccccgcugcuggcuggugagcaacggcuccuaccugaacgagacgcacuucagcgacgacaucgagcagcaggcggacaacaugaucaccgagaugcuccagaaggaguacauggaccggcagggcaagaccccgcuggggcugguggaccucuucgucuucuccaccagcuucuaccugaucuccaucuuccugcaccuggugaagaucccgacgcaccgccacaucgugggcaagcccugccccaagccccaccggcucaaccacauggggaucugcagcugcggccuguacaagcacccggggguccccgugaaguggaagcgcugaggacuagucccuguucccagagcccacuuuuuuuucuuuuuuugaaauaaaauagccugucuuucagaucuaaaaaaaaaaaaaaaaaaaaaaaaaaaaaaaaaaaaaaaaaaaaaaaaaaaaaaaaaaaaaaaaugcaucccccccccccccccccccccccccccccccaaaggcucuuuucagagccaccagaauu

SEQ ID NO: 2322 - RNA, 1749 nt, Artificial Sequence
  mRNA product Design a-1 comprising derived and/or modified sequence from LASV(GA391;Clade III)__CAA36645__GPC (opt1)
gggagagucccgcagucggcguccagcggcucugcuuguucgugugugugucguugcaggccuuauucaagcuuaccaugggccagaucgugaccuucuuccaggaggucccccacgugaucgaggaggugaugaacaucguccugaucgcccucagcauccuggccauccugaaggggcucuacaacguggcgaccugcggccugaucgggcuggugacguuccuccugcuguccggccgcagcugcucccucaucuacaaggggaccuacgagcugcagacccuggagcucaacauggagacccugaacaugacgaugccgcugagcugcaccaagaacaacucccaccacuacauccgggucggcaacgagaccggccucgagcugacccugacgaacaccagcauccucaaccacaaguucugcaaccuguccgacgcccacaagcgcaaccuguacgaccacagccucauguccaucaucagcaccuuccaccuguccauccccaacuucaaccaguacgaggccaugagcugcgacuucaacgggggcaagaucaccgugcaguacaaccugucccacagcuucgccguggacgccgcggggcacugcggcacgcucgccaacgggguccugcagaccuucaugcggauggccuggggcggcuccuacaucgcccuggacagcgggcgcggcaacugggacugcaucaugaccuccuaccaguaccucaucauccagaacaccacgugggacgaccacugccaguucagccggcccucccccaucggguaccugggccugcucagccagcgcacccgggacaucuacaucagccgccggcugcugggcaccuucaccuggacgcucuccgacagcgaggggaacgagaccccgggcggguacugccugacccgcuggaugcugaucgaggcggagcucaagugcuucggcaacaccgccguggccaagugcaacgagaagcacgacgaggaguucugcgacaugcugcggcuguucgacuucaacaagcaggccauccgccggcucaagacggaggcccagauguccauccagcugaucaacaaggcggugaacgcccugaucaacgaccagcucaucaugaagaaccaccuccgcgacaucauggggauccccuacugcaacuacagccgguacugguaccugaaccacaccuccaccggcaagaccagccugccccgcugcuggcugaucuccaacggcagcuaccugaacgagacgaaguucuccgacgacaucgagcagcaggccgacaacaugaucaccgagaugcuccagaaggaguacaucgaccggcaggggaagacgccccugggccuggucgaccuguucguguucagcaccuccuucuaccucaucagcaucuuccugcaccuggugaagaucccgacccaccgccacaucgucgggaagcccugccccaagccccaccggcucaaccacaugggcaucugcuccugcgggcuguacaagcagccgggcgugcccgugcgcuggaagcggugaggacuagucccuguucccagagcccacuuuuuuuucuuuuuuugaaauaaaauagccugucuuucagaucuaaaaaaaaaaaaaaaaaaaaaaaaaaaaaaaaaaaaaaaaaaaaaaaaaaaaaaaaaaaaaaaaugcaucccccccccccccccccccccccccccccccaaaggcucuuuucagagccaccagaauu

SEQ ID NO: 2323 - RNA, 1752 nt, Artificial Sequence
  mRNA product Design a-1 comprising derived and/or modified sequence from LASV(AV;Clade V)__CCA30314__GPC (opt1)
gggagagucccgcagucggcguccagcggcucugcuuguucgugugugugucguugcaggccuuauucaagcuuaccaugggccagaucgugaccuucuuccaggaggucccccacgugaucgaggaggugaugaacaucguccugaucgcccucagcauccuggccgugcugaaggggcucuacaacaucgcgaccugcggccugaucgggcugaucacguuccuccugcugugcggccgcuccugcagcuccaaccucuacaaggggguguacgagcugcagagccuggaccucaacauggagacccugaacaugaccaugccgcuguccugcaccaagaacaacagccaccacuacauccgggucggcaacgacacgggccucgagcugacccugaccaacaccuccauccucaaccacaaguucugcaaccugagcgacgcccacaagaaggaccuguacgaccacgcccucauguccaucaucagcacguuccaccuguccauccccaacuucaaccaguacgaggccaugagcugcgacuucaacgggggcaagaucuccgugcaguacaaccugagccacuccuacgccaucgacgcggccaaccacugcgggaccguggccaacggcauccuccagaccuucaugcgcauggccuggggcgggagcuacaucgcgcuggacuccggccgggggaacugggacugcaucaugaccagcuaccaguaccugaucauccagaacacgaccugggagaaccacugccaguucucccgccccagccccaucggcuaccucgggcugcugagccagcggacccgcgacaucuacaucucccggcgccuccugggcaccuucacguggacccugagcgacuccgagggcaacgccacccccgggggcuacugccucacccgguggaugcugaucgaggccgagcugaagugcuucgggaacacggccgucgccaagugcaacgagaagcacgacgaggaguucugcgacaugcuccgccuguucgacuucaacaagcaggcgaucagccggcugaaguccgaggcccagaugagcauccagcucaucaacaaggccgugaacgcccugaucaacgaccagcugaucaugaagaaccaccuccgcgacaucaugggcauccccuacugcaacuacuccaaguacugguaccugaaccacaccaucaccgggaagaccagccugcccaagugcuggcucguguccaacggcagcuaccugaacgagacgcacuucuccgacgacaucgagcagcaggccgacaacaugaucaccgagaugcugcagaaggaguacauggagcggcagggcaagaccccgcucgggcuggucgaccuguucguguucagcaccuccuucuaccugaucagcaucuuccuccgccuggugaagaucccgacgcaccggcacaucgucggcaagcccugccccaagccccaccgccugaaccacauggggaucugcuccugcggccucuacaagcagccgggggugcccgugcgguggaagcgcugaggacuagucccuguucccagagcccacuuuuuuuucuuuuuuugaaauaaaauagccugucuuucagaucuaaaaaaaaaaaaaaaaaaaaaaaaaaaaaaaaaaaaaaaaaaaaaaaaaaaaaaaaaaaaaaaaugcaucccccccccccccccccccccccccccccccaaaggcucuuuucagagccaccagaauu

SEQ ID NO: 2324 - RNA, 1749 nt, Artificial Sequence
  mRNA product Design a-1 comprising derived and/or modified sequence from LASV(Togo/2016/7082;Clade VI)__AMR44577__GPC (opt1)
gggagagucccgcagucggcguccagcggcucugcuuguucgugugugugucguugcaggccuuauucaagcuuaccaugggccagaucaucaccuucuuccaggaggugccccacgucaucgaggaggugaugaacaucgugcugaucgcccucagccugcuggccauccucaagggggucuacaacguggcgaccugcggcaucaucgggcuggugacguuccuguuccucugcggccgcuccugcagccugaucuacaagggguccuacgagcugcagacccucgagcugaacauggagacccugaacaugaccaugccgcucagcugcacgaagaacuccagccaccacuacauccgggucggcaacgagaccggccuggagcugacccucaccaacacguccaucaucaaccacaaguucugcaaccugagcgacgcccacaagcgcaaccuguacgaccacgcccucauguccauccugagcaccuuccaccuguccauccccaacuucaaccaguacgaggccaugagcugcgacuucaacgggggcaagaucuccgugcaguacaaccucagccacgccuacgcgguggacgccgccgagcacugcgggaccgucgccaacggcgugcugcagaccuucaugcggauggcguggggcggguccuacaucgcccuggacagcggccgcgggaacugggacugcaucaugacguccuaccaguaccucaucauccagaacaccaccugggaggaccacugccaguucagccggcccucccccaucggcuaccuggggcugcucagccagcgcacccgggacaucuacaucagccgccggcugcugggcacguucaccuggacccucuccgacagcgagggcaacgagacccccgggggcuacugccugacgcgcuggaugcugaucgaggccgagcucaagugcuucgggaacaccgccguggccaagugcaacgagaagcacgacgaggaguucugcgacaugcugcggcuguucgacuucaacaagcaggcgauccagcgccucaaguccgaggcccagaugagcauccagcugaucaacaaggccgucaacgcccugaucaacgaccagcucaucaugaagaaccaccuccgggacaugaugggcauccccuacugcaacuacuccaaguacugguaccugaaccacaccagcuccgggcgcaccagccugcccaagugcuggcugguguccaacggcagcuaccugaacgagacgcacuucuccgacgacaucgagcagcaggccgacaacaugaucaccgagaugcuccagaaggaguacaucgaccggcagggcaagaccccgcuggggcugguggaccucuucgucuucagcaccuccuucuaccugaucagcaucuuccugcaccugaucaagaucccgacgcaccgccacaucgugggcaagcccugccccaagccccaccggcucaaccacauggggaucugcuccugcggccuguacaagcagccgggggugcccacccgcuggaagcggugaggacuagucccuguucccagagcccacuuuuuuuucuuuuuuugaaauaaaauagccugucuuucagaucuaaaaaaaaaaaaaaaaaaaaaaaaaaaaaaaaaaaaaaaaaaaaaaaaaaaaaaaaaaaaaaaaugcaucccccccccccccccccccccccccccccccaaaggcucuuuucagagccaccagaauu

SEQ ID NO: 2325 - RNA, 1749 nt, Artificial Sequence
  mRNA product Design a-1 comprising derived and/or modified sequence from LASV(KAK-428;Clade n.d. (VII))__ANH09740__GPC (opt1)
gggagagucccgcagucggcguccagcggcucugcuuguucgugugugugucguugcaggccuuauucaagcuuaccaugggccagaucgugaccuucuuccaggaggucccccacgugaucgaggaggugaugaacaucguccugaucgcccucagccugcuggccauccucaaggggcuguacaacuucgcgaccugcggcgugaucgggcugaucacguuccuccugcugugcggccgcuccugcagcgccaccuacaaggggcaguacgagcuccagacccuggagcugaacauggagucccucaacaugaccaugccgcugagcugcacgaagaacaacucccaccacuacauccgggccggcaacaacaccggccuggagcucacccugaccaacacgagcaucaucucccacaaguucugcaaccugagcgacgcccacaagaagaaccucuacgaccacacccugauguccaucaucaccaccuuccaccugagcauccccaacuucaaccaguacgaggccauguccugcgacuucaacgggggcaagaucagcauccaguacaaccucucccacagcuacgcgggggacgccgcccagcacugcggcacgguggccaacgggguccugcagaccuucaugcgcauggcguggggcggcuccuaccuggcccucgacagcgggcggcgcggcugggacugcaucaucuccagcuaccaguaccugaucauccagaacaccaccugggacgaccacugccaguucucccggcccagccccaucggguaccugggcuucgugagccagaagacgcgcgacaucuacaucucccggcgccuccugggcaccuucaccuggacccugagcgacuccgaggggcacgacaugccgggcggguacugccucacgcgguggaugcugaucgaggccgaccugaagugcuucggcaacaccgccguggccaagugcaacgagaagcacgacgaggaguucugcgacauguggcgccucuucgacuucaacaagcaggcgauccagcggcugaaggccgaggcccagaugaacauccagcugaucaacaaggccgucaacgcccucaucaacgaccagcugaugaugaagaaccaccuccgcgacaucauggggauccccuacugcaacuacagcaaguucugguaccugaacaacaccaccacgggccggaccucccugccccgcugcuggcugaucagcaacggcuccuaccucaacgagacccacuucagcgacgacaucgagcagcaggcggacaacaugaucaccgagaugcugcagaaggaguacauggaccggcaggggaagacgccccugggccucguggaccuguucguguucuccaccagcuucuaccugaucaccaucuuccuccaccuggucaagaucccgacccaccgccacaucguggggaagcccugccccaagccccaccggcugaaccacaugggcaucugcuccugcgggcuguacaagcagccgggcgugcccguccgcuggaagcggugaggacuagucccuguucccagagcccacuuuuuuuucuuuuuuugaaauaaaauagccugucuuucagaucuaaaaaaaaaaaaaaaaaaaaaaaaaaaaaaaaaaaaaaaaaaaaaaaaaaaaaaaaaaaaaaaaugcaucccccccccccccccccccccccccccccccaaaggcucuuuucagagccaccagaauu

SEQ ID NO: 2326 - RNA, 1749 nt, Artificial Sequence; identical to SEQ ID NO: 2320
  mRNA product Design a-1 comprising derived and/or modified sequence from LASV(Pinneo-NIG-1969;Clade I)__AIT17836__GPC (opt1)

SEQ ID NO: 2327 - RNA, 1749 nt, Artificial Sequence
  mRNA product Design a-1 comprising derived and/or modified sequence from LASV(ISTH0009-NIG-2011;Clade II)__AIT17404__GPC (opt1)
gggagagucccgcagucggcguccagcggcucugcuuguucgugugugugucguugcaggccuuauucaagcuuaccaugggccagaucaucaccuucuuccaggaggugccccacgucaucgaggaggugaugaacaucgugcugaucgcccucagccugcuggccauccucaaggggaucuacaacgucgcgaccugcggccuguucgggcugguguccuuccuccugcugugcggccgcagcugcuccacgaccuacaaggggguguacgagcuccagacccuggagcuggacauggccagccucaacaugaccaugccgcuguccugcacgaagaacaacagccaccacuacaucauggucggcaacgagaccggccuggagcucacccugaccaacacguccaucaucaaccacaaguucugcaaccugagcgacgcccacaagaagaaccucuacgaccacgcccugauguccaucaucagcaccuuccaccuguccauccccaacuucaaccaguacgaggccaugagcugcgacuucaacgggggcaagaucuccgugcaguacaaccucagccacgcguacgccguggacgccgccaaccacugcgggaccaucgcgaacggcguccugcagaccuucaugcggauggccuggggcggguccuacaucgcccuggacagcggcaagggguccugggacugcaucaugacgagcuaccaguaccucaucauccagaacaccaccugggaggaccacugccaguucucccgccccagccccaucggcuaccuggggcugcucagccagcggacccgcgacaucuacaucucccggcgccugcugggcacguucaccuggacccucagcgacuccgagggcaacgagacccccgggggcuacugccugacgcgguggaugcugaucgaggccgagcucaagugcuucgggaacaccgccguggcgaagugcaacgagaagcacgacgaggaguucugcgacaugcugcgccuguucgacuucaacaagcaggccauccggcgccucaagaccgaggcccagaugagcauccagcugaucaacaaggccgugaacgcccugaucaacgaccagcucaucaugaagaaccaccuccgggacaucaugggcaucccguacugcaacuacuccaaguacugguaccugaaccacaccgucacggggaagaccagccugccccgcugcuggcugguguccaacggcagcuaccugaacgagacccacuucuccgacgacaucgagcagcaggcggacaacaugaucaccgagcuccugcagaaggaguacauggaccggcagggcaagacgccccuggggcucguggaccuguucgucuucagcaccuccuucuaccugaucagcaucuuccugcaccucaucaagaucccgacccaccgccacaucaccggcaagcccugccccaagccccaccggcugaaccacauggggaucugcuccugcggccuguacaagcacccgggggugcccgugaaguggaagcgcugaggacuagucccuguucccagagcccacuuuuuuuucuuuuuuugaaauaaaauagccugucuuucagaucuaaaaaaaaaaaaaaaaaaaaaaaaaaaaaaaaaaaaaaaaaaaaaaaaaaaaaaaaaaaaaaaaugcaucccccccccccccccccccccccccccccccaaaggcucuuuucagagccaccagaauu

SEQ ID NO: 2328 - RNA, 1749 nt, Artificial Sequence
  mRNA product Design a-1 comprising derived and/or modified sequence from LASV(ISTH2010-NIG-2012;Clade II)__AIT17482__GPC (opt1)
gggagagucccgcagucggcguccagcggcucugcuuguucgugugugugucguugcaggccuuauucaagcuuaccaugggccagaucaucaccuucuuccaggaggugccccacgucaucgaggaggugaugaacaucgugcugaucgcccucagccugcuggccauccucaaggggaucuacaacgucgcgaccugcggccuguucgggcugguguccuuccuccugcugugcggccgcagcugcuccacgaccuacaaggggguguacgagcuccagacccuggagcuggacauggccagccucaacaugaccaugccgcuguccugcacgaagaacaacagccaccacuacaucauggucggcaacgagaccggccuggagcucacccugaccaacacguccaucaucaaccacaaguucugcaaccugagcgacgcccacaagaagaaccucuacgaccacgcccugauguccaucaucagcaccuuccaccuguccauccccaacuucaaccaguacgaggccaugagcugcgacuucaacgggggcaagaucuccgugcaguacaaccucagccacgcguacgccguggacgccgccaaccacugcgggaccaucgcgaacggcguccugcagaccuucaugcggauggccuggggcggguccuacaucgcccuggacagcggcaagggguccugggacugcaucaugacgagcuaccaguaccucaucauccagaacaucaccugggaggaccacugccaguucucccgccccagccccaucggcuaccuggggcugcucagccagcggacccgcgacaucuacaucucccggcgccugcugggcaccuucacguggacccucagcgacuccgagggcaacgagacccccgggggcuacugccugacccgguggaugcugaucgaggccgagcucaagugcuucgggaacacggccguggcgaagugcaacgagaagcacgacgaggaguucugcgacaugcugcgccuguucgacuucaacaagcaggccauccggcgccucaagaccgaggcccagaugagcauccagcugaucaacaaggccgugaacgcccugaucaacgaccagcucaucaugaagaaccaccuccgggacaucaugggcauccccuacugcaacuacuccaaguacugguaccugaaccacaccgucaccgggaagacgagccugccccgcugcuggcugguguccaacggcagcuaccugaacgagacccacuucuccgacgacaucgagcagcaggcggacaacaugaucaccgagcuccugcagaaggaguacaucgaccggcagggcaagaccccgcuggggcucguggaccuguucgucuucagcacguccuucuaccugaucagcaucuuccugcaccucgugaagaucccgacccaccgccacguggucggcaagcccugccccaagccccaccggcugaaccacauggggaucugcuccugcggccuguacaagcacccgggggugcccgugaaguggaagcgcugaggacuagucccuguucccagagcccacuuuuuuuucuuuuuuugaaauaaaauagccugucuuucagaucuaaaaaaaaaaaaaaaaaaaaaaaaaaaaaaaaaaaaaaaaaaaaaaaaaaaaaaaaaaaaaaaaugcaucccccccccccccccccccccccccccccccaaaggcucuuuucagagccaccagaauu

SEQ ID NO: 2329 - RNA, 1749 nt, Artificial Sequence
  mRNA product Design a-1 comprising derived and/or modified sequence from LASV(Lassa virus/H.sapiens-wt/NGA/2015/ISTH_0543;Clade II)__AVO03639__GPC (opt1)
gggagagucccgcagucggcguccagcggcucugcuuguucgugugugugucguugcaggccuuauucaagcuuaccaugggccagaucaucaccuucuuccaggaggugccccacgucaucgaggaggugaugaacaucgugcugaucgcccucagccugcuggccauccucaaggggaucuacaacgucgcgaccugcggccuguucgggcugguguccuuccuccugcugugcggccgcagcugcuccacgaccuacaaggggguguacgagcuccagacccuggagcuggacauggccaaccucaacaugaccaugccgcugagcugcacgaagaacaacucccaccacuacaucauggucggcaacgagaccggccuggagcucacccugaccaacacgagcaucaucaaccacaaguucugcaaccuguccgacgcccacaagaagaaccucuacgaccacgcccugaugagcaucaucuccaccuuccaccugagcauccccaacuucaaccaguacgaggccauguccugcgacuucaacgggggcaagaucagcgugcaguacaaccucucccacaccuacgcgguggacgccgccaaccacugcgggaccaucgccaacggcguccugcagacguucaugcggauggcguggggcgggagcuacaucgcccuggacuccggcaaggggagcugggacugcaucaugaccuccuaccaguaccucgugauccagaacaccaccugggaggaccacugccaguucagccgccccucccccaucggcuaccuggggcugcucagccagcggacgcgcgacaucuacaucagccggcgccugcugggcaccuucaccuggacccucuccgacagcgagggcaacgagacgcccgggggcuacugccugacccgguggaugcugaucgaggccgagcucaagugcuucgggaacaccgccguggccaagugcaacgagaagcacgacgaggaguucugcgacaugcugcgccuguucgacuucaacaagcaggcgauccggcgccucaagaccgaggcccagauguccauccagcugaucaacaaggccgucaacgcccugaucaacgaccagcucaucaugaagaaccaccuccgggacaucaugggcauccccuacugcaacuacagcaaguacugguaccugaaccacacggugaccgggaagaccucccugccccgcugcuggcuggugagcaacggcuccuaccugaacgagacccacuucagcgacgacaucgagcagcaggccgacaacaugaucacggagcuccugcagaaggaguacaucgaccggcagggcaagaccccgcuggggcucgucgaccuguucguguucuccaccagcuucuaccugaucuccaucuuccugcaccucgugaagaucccgacccaccgccacaucacgggcaagcccugccccaagccccaccggcugaaccacauggggaucugcagcugcggccuguacaagcacccggggguccccgugaaguggaagcgcugaggacuagucccuguucccagagcccacuuuuuuuucuuuuuuugaaauaaaauagccugucuuucagaucuaaaaaaaaaaaaaaaaaaaaaaaaaaaaaaaaaaaaaaaaaaaaaaaaaaaaaaaaaaaaaaaaugcaucccccccccccccccccccccccccccccccaaaggcucuuuucagagccaccagaauu

SEQ ID NO: 2330 - RNA, 1749 nt, Artificial Sequence
  mRNA product Design a-1 comprising derived and/or modified sequence from LASV(Lassa virus/H.sapiens-wt/NGA/2016/ISTH_0009;Clade II)__AVO03571__GPC (opt1)
gggagagucccgcagucggcguccagcggcucugcuuguucgugugugugucguugcaggccuuauucaagcuuaccaugggccagaucaucaccuucuuccaggaggugccccacgucaucgaggaggugaugaacaucgugcugaucgcccucagccugcuggccauccucaaggggaucuacaacgucgcgaccugcggccugcuggggcucguguccuuccugcugcucugcggccgcagcugcuccacgaccuacaaggggguguacgagcugcagacccuggagcucgacauggccagccugaacaugaccaugccgcuguccugcacgaagaacaacagccaccacuacaucauggucggcaacgagaccggccucgagcugacccugaccaacacguccaucaucaaccacaaguucugcaaccucagcgacgcccacaagaagaaccuguacgaccacgcccugauguccaucaucagcaccuuccaccucuccauccccaacuucaaccaguacgaggccaugagcugcgacuucaacgggggccggaucuccgugcaguacaaccugagccacuccuacgcgguggacgccgccaaccacugcgggaccaucgccaacggcguccugcagaccuucaugcgcauggcguggggcgggagcuacaucgcccucgacuccggcaaggggagcugggacugcaucaugacguccuaccaguaccugaucauccagaacaccaccugggaggaccacugccaguucagccggcccagccccaucggcuaccuggggcuccugucccagcgcacccgggacaucuacaucagccgccggcugcucggcacguucaccuggacccuguccgacagcgagggcaacgagacccccgggggcuacugccugacgcgcuggaugcucaucgaggccgagcugaagugcuucgggaacaccgccguggccaagugcaacgagaagcacgacgaggaguucugcgacaugcugcggcuguucgacuucaacaagcaggcgauccgccggcugaagaccgaggcccagauguccauccagcugaucaacaaggccgugaacgcccucaucaacgaccagcugaucaugaagaaccaccuccgcgacaucaugggcaucccguacugcaacuacagcaaguacugguaccucaaccacaccgucacggggaagaccucccugccccggugcuggcuggugagcaacggcuccuaccucaacgagacccacuucagcgacgacaucgagcagcaggccgacaacaugaucaccgagcugcugcagaaggaguacaucgaccgccagggcaagacgccccucgggcugguggaccuguucgucuucuccaccagcuucuaccugaucuccaucuuccuccaccuggugaagaucccgacccaccggcacaucaccggcaagcccugccccaagccccaccgccugaaccacauggggaucugcagcugcggccucuacaaccacccgggggugcccgucaaguggaagcggugaggacuagucccuguucccagagcccacuuuuuuuucuuuuuuugaaauaaaauagccugucuuucagaucuaaaaaaaaaaaaaaaaaaaaaaaaaaaaaaaaaaaaaaaaaaaaaaaaaaaaaaaaaaaaaaaaugcaucccccccccccccccccccccccccccccccaaaggcucuuuucagagccaccagaauu

SEQ ID NO: 2331 - RNA, 1749 nt, Artificial Sequence
  mRNA product Design a-1 comprising derived and/or modified sequence from LASV(Lassa virus/H.sapiens-wt/NGA/2016/ISTH_0017;Clade II)__AVO03567__GPC (opt1)
gggagagucccgcagucggcguccagcggcucugcuuguucgugugugugucguugcaggccuuauucaagcuuaccaugggccagaucaucaccuucuuccaggaggugccccacgucaucgaggaggugaugaacaucgugcugaucgcccucagccugcuggccauccucaaggggaucuacaacgucgcgaccugcggccuguucgggcugguguccuuccuccugcugugcggccgcagcugcuccacgaccuacaaggggguguacgagcuccagacccuggagcuggacauggccagccucaacaugaccaugccgcuguccugcacgaagaacaacagccaccacuacaucauggucggcaacgagaccggccuggagcucacccugaccaacacguccaucaucaaccacaaguucugcaaccugagcgacgcccacaagaagaaccucuacgaccacgcccugauguccaucaucagcaccuuccaccuguccauccccaacuucaaccaguacgaggccaugagcugcgacuucaacgggggcaagaucuccgugcaguacaaccucagccacaccuacgcgaucgacgccgccaaccacugcgggaccaucgccaacggcgugcugcagacguucaugcggauggcguggggcggguccuacaucgcccuggacagcggcaagggguccugggacugcaucaugaccagcuaccaguaccucaucauccagaacaccaccugggaggaccacugccaguucucccgccccagccccaucggcuaccuggggcugcucagccagcggacgcgcgacaucuacaucucccggcgccugcugggcaccuucaccuggacccucagcgacuccgagggcaacgagacgcccgggggcuacugccugacccgguggaugcugaucgaggccgagcucaagugcuucgggaacaccgccgucgccaagugcaacgagaagcacgacgaggaguucugcgacaugcugcgccuguucgacuucaacaagcaggcgauccggcgccucaagaccgaggcccagaugagcauccagcugaucaacaaggccgugaacgcccugaucaacgaccagcucaucaugaagaaccaccuccgggacaucaugggcauccccuacugcaacuacuccaaguacugguaccugaaccacacggugaccgggaagaccagccugccccgcugcuggcuggucuccaacggcagcuaccugaacgagacccacuucuccgacgacaucgagcagcaggccgacaacaugaucacggagcuccugcagaaggaguacauggaccggcagggcaagaccccgcuggggcucguggaccuguucguguucagcaccuccuucuaccugaucagcaucuuccugcaccucguccgcaucccgacccaccggcacgugaucggcaagcccugccccaagccccaccgccugaaccacauggggaucugcuccugcggccuguacaagcacccgggggugcccgucaaguggaagcggugaggacuagucccuguucccagagcccacuuuuuuuucuuuuuuugaaauaaaauagccugucuuucagaucuaaaaaaaaaaaaaaaaaaaaaaaaaaaaaaaaaaaaaaaaaaaaaaaaaaaaaaaaaaaaaaaaugcaucccccccccccccccccccccccccccccccaaaggcucuuuucagagccaccagaauu

SEQ ID NO: 2332 - RNA, 1749 nt, Artificial Sequence
  mRNA product Design a-1 comprising derived and/or modified sequence from LASV(Lassa virus/H.sapiens-wt/NGA/2018/ISTH_0959;Clade II)__AVV65099__GPC (opt1)
gggagagucccgcagucggcguccagcggcucugcuuguucgugugugugucguugcaggccuuauucaagcuuaccaugggccagaucaucaccuucuuccaggaggugccccacgucaucgaggaggugaugaacaucgugcugaucgcccucagccugcuggccauccucaaggggaucuacaacgucgugaccugcggccuguucgggcugguguccuuccuccugcugugcggccgcagcugcuccacgaccuacaagggggucuacgagcuccagacccuggagcuggacauggcgagccucaacaugaccaugccgcuguccugcacgaagaacaacagccaccacuacaucauggugggcaacgagaccggccuggagcucacccugaccaacacguccaucaucaaccacaaguucugcaaccugagcgacgcccacaagaagaaccucuacgaccacgcccugauguccaucaucagcaccuuccaccuguccauccccaacuucaaccaguacgaggccaugagcugcgacuucaacgggggcaagaucuccgugcaguacaaccucagccacgccuacgcgaucgacgccgccaaccacugcgggaccaucgccaacggcguccugcagaccuucaugcggauggcguggggcggguccuacaucgcccuggacagcggcaagggguccugggacugcaucaugacgagcuaccaguaccucaucauccagaacaccaccugggaggaccacugccaguucucccgccccagccccaucggcuaccuggggcugcucagccagcggacccgcgacaucuacaucucccggcgccugcugggcacguucaccuggacccucagcgacuccgagggcaacgagacccccgggggcuacugccugacgcgguggaugcugaucgaggccgagcucaagugcuucgggaacaccgccguggccaagugcaacgagaagcacgacgaggaguucugcgacaugcugcgccuguucgacuucaacaagcaggcgauccggcgccucaagaccgaggcccagaugagcauccagcugaucaacaaggccgugaacgcccugaucaacgaccagcucaucaugaagaaccaccuccgggacaucaugggcaucccguacugcaacuacuccaaguacugguaccugaaccacaccgucacggggaagaccagccugccccgcugcuggcugguguccaacggcagcuaccugaacgagacccacuucuccgacgacaucgagcagcaggccgacaacaugaucaccgagcuccugcagaaggaguacaucgaccggcagggcaagacgccccuggggcucguggaccuguucgucuucagcaccuccuucuaccugaucagcaucuuccugcaccucgugaagaucccgacccaccgccacgugaucggcaagcccugccccaagccccaccggcugaaccacauggggaucugcuccugcggccuguacaagcacccggggguccccgugaaguggaagcgcugaggacuagucccuguucccagagcccacuuuuuuuucuuuuuuugaaauaaaauagccugucuuucagaucuaaaaaaaaaaaaaaaaaaaaaaaaaaaaaaaaaaaaaaaaaaaaaaaaaaaaaaaaaaaaaaaaugcaucccccccccccccccccccccccccccccccaaaggcucuuuucagagccaccagaauu

SEQ ID NO: 2333 - RNA, 1749 nt, Artificial Sequence
  mRNA product Design a-1 comprising derived and/or modified sequence from LASV(LASV003-NIG-2008;Clade II)__AIT17580__GPC (opt1)
gggagagucccgcagucggcguccagcggcucugcuuguucgugugugugucguugcaggccuuauucaagcuuaccaugggccagaucaucaccuucuuccaggaggugccccacgucaucgaggaggugaugaacaucgugcugaucgcccucagccugcuggccauccucaaggggaucuacaacgucgcgaccugcggccuguucgggcugguguccuuccuccugcugugcggccgcagcugcuccacgaccuacaaggggguguacgagcuccagacccuggagcuggacauggccagccucaacaugaccaugccgcuguccugcacgaagaacaacagccaccacuacaucauggucggcaacgagaccggccuggagcucacccugaccaacacguccaucaucaaccacaaguucugcaaccugagcgacgcccacaagaagaaccucuacgaccacgcccugauguccaucaucagcaccuuccaccuguccauccccaacuucaaccaguacgaggccaugagcugcgacuucaacgggggcaagaucuccgugcaguacaaccucagccacaccuacgcgguggacgccgccaaccacugcgggaccaucgccaacggcguccugcagacguucaugcggauggcguggggcggguccuacaucgcccuggacagcggcaagggguccugggacugcaucaugaccagcuaccaguaccucaucauccagaacaccaccugggaggaccacugccaguucucccgccccagccccaucggcuaccuggggcugcucagccagcggacgcgcgacaucuacaucucccggcgccugcugggcaccuucaccuggacccucagcgacuccgagagcaacgagacgccgggcggguacugccugacccgguggaugcugaucgaggccgagcucaagugcuucggcaacaccgccguggccaagugcaacgagaagcacgacgaggaguucugcgacaugcugcgccuguucgacuucaacaagcaggcgauccggcgccucaaggccgaggcccagauguccauccagcugaucaacaaggccgugaacgcccugaucaacgaccagcucaucaugaagaaccaccuccgggacaucauggggauccccuacugcaacuacagcaaguacugguaccugaaccacaccgucacgggccgcaccucccugccccggugcuggcuggugagcaacggguccuaccugaacgagacccacuucagcgacgacaucgagcagcaggcggacaacaugaucaccgagcuccugcagaaggaguacauggaccgccagggcaagacgccccugggccucguggaccuguucgucuucuccaccagcuucuaccugaucuccaucuuccugcaccucgugaagaucccgacccaccggcacgugaucgggaagcccugccccaagccccaccgccugaaccacaugggcaucugcagcugcgggcuguacaagcacccgggcguccccgugaaguggaagcggugaggacuagucccuguucccagagcccacuuuuuuuucuuuuuuugaaauaaaauagccugucuuucagaucuaaaaaaaaaaaaaaaaaaaaaaaaaaaaaaaaaaaaaaaaaaaaaaaaaaaaaaaaaaaaaaaaugcaucccccccccccccccccccccccccccccccaaaggcucuuuucagagccaccagaauu

SEQ ID NO: 2334 - RNA, 1749 nt, Artificial Sequence
  mRNA product Design a-1 comprising derived and/or modified sequence from LASV(LASV035-NIG-2009;Clade II)__AIT17588__GPC (opt1)
gggagagucccgcagucggcguccagcggcucugcuuguucgugugugugucguugcaggccuuauucaagcuuaccaugggccagaucaucaccuucuuccaggaggugccccacgucaucgaggaggugaugaacaucgugcugaucgcccucagccugcuggccauccucaaggggaucuacaacgucgcgaccugcggccuguucgggcugguguccuuccuccugcugugcggccgcagcugcuccacgaccuacaaggggguguacgagcuccagacccuggagcuggacauggccagccucaacaugaccaugccgcuguccugcacgaagaacaacagccaccacuacaucauggucggcaacgagaccggccuggagcucacccugaccaacacguccaucaucaaccacaaguucugcaaccugagcgacgcccacaagaagaaccucuacgaccacgcccugauguccaucaucagcaccuuccaccuguccauccccaacuucaaccaguacgaggccaugagcugcgacuucaacgggggcaagaucuccgugcaguacaaccucagccacgcguacgccguggacgccgccaaccacugcgggaccaucgcgaacggcguccugcagaccuucaugcggauggccuggggcggguccuacaucgcccuggacagcggcaagggguccugggacugcaucaugacgagcuaccaguaccucaucauccagaacaccaccugggaggaccacugccaguucucccgccccagccccaucggcuaccuggggcugcucagccagcggacccgcgacaucuacaucucccggcgccugcugggcacguucaccuggacccucagcgacuccgagggcaacgagacccccgggggcuacugccugacgcgguggaugcugaucgaggccgagcucaagugcuucgggaacaccgccguggcgaagugcaacgagaagcacgacgaggaguucugcgacaugcugcgccuguucgacuucaacaagcaggccauccggcgccucaaggccgaggcccagaugagcauccagcugaucaacaaggccgugaacgcgcugaucaacgaccagcucaucaugaagaaccaccuccgggacaucaugggcauccccuacugcaacuacuccaaguacugguaccugaaccacaccgucaccgggaagacgagccugccccgcugcuggcugguguccaacggcagcuaccugaacgagacccacuucuccgacgacaucgagcagcaggccgacaacaugaucaccgagcuccugcagaaggaguacaucgaccggcagggcaagaccccgcuggggcucguggaccuguucgucuucagcacguccuucuaccugaucagcaucuuccugcaccucgugaagaucccgacccaccgccacgugaucggcaagcccugccccaagccccaccggcugaaccacauggggaucugcuccugcggccuguacaagcacccggggguccccgugaaguggaagcgcugaggacuagucccuguucccagagcccacuuuuuuuucuuuuuuugaaauaaaauagccugucuuucagaucuaaaaaaaaaaaaaaaaaaaaaaaaaaaaaaaaaaaaaaaaaaaaaaaaaaaaaaaaaaaaaaaaugcaucccccccccccccccccccccccccccccccaaaggcucuuuucagagccaccagaauu

SEQ ID NO: 2335 - RNA, 1749 nt, Artificial Sequence
  mRNA product Design a-1 comprising derived and/or modified sequence from LASV(LASV1000-NIG-2009;Clade II)__AIT17782__GPC (opt1)
gggagagucccgcagucggcguccagcggcucugcuuguucgugugugugucguugcaggccuuauucaagcuuaccaugggccagaucaucaccuucuuccaggaggugccccacgucaucgaggaggugaugaacaucgugcugaucgcccucagccugcuggccauccucaaggggaucuacaacgucgcgaccugcggccuguucgggcugguguccuuccuccugcugugcggccgcagcugcuccacgaccuacaaggggguguacgagcuccagacccuggagcuggacauggccagccucaacaugaccaugccgcuguccugcacgaagaacaacagccaccacuacaucauggucggcaacgagaccggccuggagcucacccugaccaacacguccaucaucaaccacaaguucugcaaccugagcgacgcccacaagaagaaccucuacgaccacgcccugauguccaucaucagcaccuuccaccuguccauccccaacuucaaccaguacgaggccaugagcugcgacuucaacgggggcaagaucuccgugcaguacaaccucagccacaccuacgcgguggacgccgccaaccacugcgggaccaucgccaacggcguccugcagacguucaugcggauggcguggggcggguccuacaucgcccuggacagcggcaagggguccugggacugcaucaugaccagcuaccaguaccucaucauccagaacaccaccugggaggaccacugccaguucucccgccccagccccaucggcuaccuggggcugcucagccagcggacgcgcgacaucuacaucucccggcgccugcugggcaccuucaccuggacccucagcgacuccgagggcaacgagacgcccgggggcuacugccugacccgguggaugcugaucgaggccgagcucaagugcuucgggaacaccgccguggccaagugcaacgagaagcacgacgaggaguucugcgacaugcugcgccuguucgacuucaacaagcaggcgaucaagcggcucaagaccgaggcccagaugagcauccagcugaucaacaaggccgugaacgcccugaucaacgaccagcucaucaugaagaaccaccuccgcgacaucaugggcauccccuacugcaacuacuccaaguacugguaccugaaccacacggucaccgggaagaccagccugccccggugcuggcugguguccaacggcagcuaccugaacgagacccacuucuccgacgacaucgagcagcaggccgacaacaugaucacggagcuccugcagaaggaguacaucgaccgccagggcaagaccccgcuggggcucguggaccuguucgucuucagcaccuccuucuaccugaucagcaucuuccugcaccucgugaagaucccgacccaccggcacguggucggcaagcccugccccaagccccaccgccugaaccacauggggaucugcuccugcggccuguacaagcacccgggggugcccgugaaguggaagcggugaggacuagucccuguucccagagcccacuuuuuuuucuuuuuuugaaauaaaauagccugucuuucagaucuaaaaaaaaaaaaaaaaaaaaaaaaaaaaaaaaaaaaaaaaaaaaaaaaaaaaaaaaaaaaaaaaugcaucccccccccccccccccccccccccccccccaaaggcucuuuucagagccaccagaauu

SEQ ID NO: 2336 - RNA, 1749 nt, Artificial Sequence
  mRNA product Design a-1 comprising derived and/or modified sequence from LASV(LASV221-NIG-2010;Clade II)__AIT17624__GPC (opt1)
gggagagucccgcagucggcguccagcggcucugcuuguucgugugugugucguugcaggccuuauucaagcuuaccaugggccagaucaucaccuucuuccaggaggugccccacgucaucgaggaggugaugaacaucgugcugaucgcccucagccugcuggccauccucaaggggaucuacaacgucgcgaccugcggccuguucgggcugguguccuuccuccugcugugcggccgcagcugcuccacgaccuacaaggggguguacgagcuccagacccuggagcuggacauggccagccucaacaugaccaugccgcuguccugcacgaagaacaacagccaccacuacaucauggucggcaacgagaccggccuggagcucacccugaccaacacguccaucaucaaccacaaguucugcaaccugagcgacgcccacaagaagaaccucuacgaccacgcccugauguccaucaucagcaccuuccaccuguccauccccaacuucaaccaguacgaggccaugagcugcgacuucaacgggggcaagaucuccgugcaguacaaccucagccacaccuacgcgaucgacgccgccaaccacugcgggaccaucgccaacggcgugcugcagacguucaugcggauggcguggggcggguccuacaucgcccuggacagcggcaagggguccugggacugcaucaugaccagcuaccaguaccucaucauccagaacaccaccugggaggaccacugccaguucucccgccccagccccaucggcuaccuggggcugcucagccagcggacgcgcgacaucuacaucucccggcgccugcugggcaccuucaccuggacccucagcgacuccgagggcaacgagacgcccgggggcuacugccugacccgguggaugcugaucgaggccgagcucaagugcuucgggaacaccgccgucgccaagugcaacgagaagcacgacgaggaguucugcgacaugcugcgccuguucgacuucaacaagcaggcgauccggcgccucaagaccgaggcccagaugagcauccagcugaucaacaaggccgugaacgcccugaucaacgaccagcucaucaugaagaaccaccuccgggacaucaugggcauccccuacugcaacuacuccaaguacugguaccugaaccacacggugaccgggaagaccagccugccccgcugcuggcuggucuccaacggcagcuaccugaacgagacccacuucuccgacgacaucgagcagcaggccgacaacaugaucacggagaugcuccagaaggaguacauggaccggcagggcaagaccccgcuggggcugguggaccucuucguguucagcaccuccuucuaccugaucagcaucuuccugcaccuggucaagaucccgacccaccgccacgugaucggcaagcccugccccaagccccaccggcucaaccacauggggaucugcuccugcggccuguacaagcacccgggggugcccgucaaguggaagcgcugaggacuagucccuguucccagagcccacuuuuuuuucuuuuuuugaaauaaaauagccugucuuucagaucuaaaaaaaaaaaaaaaaaaaaaaaaaaaaaaaaaaaaaaaaaaaaaaaaaaaaaaaaaaaaaaaaugcaucccccccccccccccccccccccccccccccaaaggcucuuuucagagccaccagaauu

SEQ ID NO: 2337 - RNA, 1749 nt, Artificial Sequence
  mRNA product Design a-1 comprising derived and/or modified sequence from LASV(LASV237-NIG-2010;Clade II)__AIT17638__GPC (opt1)
gggagagucccgcagucggcguccagcggcucugcuuguucgugugugugucguugcaggccuuauucaagcuuaccaugggccagaucaucaccuucuuccaggaggugccccacgucaucgaggaggugaugaacaucgugcugaucgcccucagccugcuggccauccucaaggggaucuacaacgucgcgaccugcggccuguucgggcugguguccuuccuccugcugugcggccgcagcugcuccacgaccuacaaggggguguacgagcuccagacccuggagcuggacauggccagccucaacaugaccaugccgcuguccugcacgaagaacaacagccaccacuacaucauggucggcaacgagaccggccuggagcucacccugaccaacacguccaucaucaaccacaaguucugcaaccugagcgacgcccacaagaaggaccucuacgaccacgcccugauguccaucaucagcaccuuccaccuguccauccccaacuucaaccaguacgaggccaugagcugcgacuucaacgggggcaagaucuccgugcaguacaaccucagccacaccuacgcgguggacgccgccaaccacugcgggaccaucgccaacggcguccugcagacguucaugcggauggcguggggcggguccuacaucgcccuggacagcggcaagggguccugggacugcaucaugaccagcuaccaguaccucaucauccagaacaccaccugggaggaccacugccaguucucccgccccagccccaucggcuaccuggggcugcucagccagcggacgcgcgacaucuacaucucccggcgccugcugggcaccuucaccuggacccucagcgacuccgagggcaacgagacgcccgggggcuacugccugacccgguggaugcugaucgaggccgagcucaagugcuucgggaacaccgccguggccaagugcaacgagaagcacgacgaggaguucugcgacaugcugcgccuguucgacuucaacaagcaggcgauccggcgccucaagaccgaggcccagaugagcauccagcugaucaacaaggccgugaacgcccugaucaacgaccagcucaucaugaagaaccaccuccgggacaucaugggcauccccuacugcaacuacuccaaguacugguaccugaaccacacggucaccgggaagaccagccugccccgcugcuggcugguguccaacggcagcuaccugaacgagacccacuucuccgacgacaucgagcagcaggccgacaacaugaucacggagcuccugcagaaggaguacauggaccggcagggcaagaccccgcuggggcucguggaccuguucgucuucagcaccuccuucuaccugaucagcaucuuccugcaccucaucaagaucccgacccaccgccacaucacgggcaagcccugccccaagccccaccggcugaaccacauggggaucugcuccugcggccuguacaagcacccgggggugcccgugaaguggaagcgcugaggacuagucccuguucccagagcccacuuuuuuuucuuuuuuugaaauaaaauagccugucuuucagaucuaaaaaaaaaaaaaaaaaaaaaaaaaaaaaaaaaaaaaaaaaaaaaaaaaaaaaaaaaaaaaaaaugcaucccccccccccccccccccccccccccccccaaaggcucuuuucagagccaccagaauu

SEQ ID NO: 2338 - RNA, 1749 nt, Artificial Sequence
  mRNA product Design a-1 comprising derived and/or modified sequence from LASV(LASV253-NIG-2011;Clade II)__AIT17670__GPC (opt1)
gggagagucccgcagucggcguccagcggcucugcuuguucgugugugugucguugcaggccuuauucaagcuuaccaugggccagaucaucaccuucuuccaggaggugccccacgucaucgaggaggugaugaacaucgugcugaucgcccucagccugcuggccauccucaaggggaucuacaacgucgcgaccugcggccuguucgggcugguguccuuccuccugcugugcggccgcagcugcuccacgaccuacaaggggguguacgagcuccagacccuggagcuggacauggccagccucaacaugaccaugccgcuguccugcacgaagaacaacagccaccacuacaucauggucggcaacgagaccggccuggagcucacccugaccaacacguccaucaucaaccacaaguucugcaaccugagcgacgcccacaagaagaaccucuacgaccacgcccugauguccaucaucagcaccuuccaccuguccauccccaacuucaaccaguacgaggccaugagcugcgacuucaacgggggcaagaucuccgugcaguacaaccucagccacaccuacgcgguggacgccgccaaccacugcgggaccaucgccaacggcguccugcagacguucaugcggauggcguggggcggguccuacaucgcccuggacagcggcaagggguccugggacugcaucaugaccagcuaccaguaccucaucauccagaacaccaccugggaggaccacugccaguucucccgccccagccccaucggcuaccuggggcugcucagccagcggacgcgcgacaucuacaucucccggcgccugcugggcaccuucaccuggacccucagcgacuccgagggcaacgagacgcccgggggcuacugccugacccgguggaugcugaucgaggccgagcucaagugcuucgggaacaccgccguggccaagugcaacgagaagcacgacgaggaguucugcgacaugcugcgccuguucgacuucaacaagcaggcgauccggcgccucaaggccgaggcccagaugagcauccagcugaucaacaaggccgugaacgcccugaucaacgaccagcucaucaugaagaaccaccuccgggacaucaugggcaucccguacugcaacuacuccaaguacugguaccugaaccacaccgucacggggcgcaccagccugccccggugcuggcugguguccaacggcagcuaccugaacgagacccacuucuccgacgacaucgagcagcaggcggacaacaugaucaccgagcuccugcagaaggaguacaucgaccgccagggcaagacgccccuggggcucguggaccuguucgucuucagcaccuccuucuaccugaucagcaucuuccugcaccucgugaagaucccgacccaccggcacaucaucggcaagcccugccccaagccccaccgccugaaccacauggggaucugcuccugcggccuguacaagcacccgggggugcccgucaaguggaagcggugaggacuagucccuguucccagagcccacuuuuuuuucuuuuuuugaaauaaaauagccugucuuucagaucuaaaaaaaaaaaaaaaaaaaaaaaaaaaaaaaaaaaaaaaaaaaaaaaaaaaaaaaaaaaaaaaaugcaucccccccccccccccccccccccccccccccaaaggcucuuuucagagccaccagaauu

SEQ ID NO: 2339 - RNA, 1749 nt, Artificial Sequence
  mRNA product Design a-1 comprising derived and/or modified sequence from LASV(LASV254-NIG-2011;Clade II)__AIT17674__GPC (opt1)
gggagagucccgcagucggcguccagcggcucugcuuguucgugugugugucguugcaggccuuauucaagcuuaccaugggccagaucaucaccuucuuccaggaggugccccacgucaucgaggaggugaugaacaucgugcugaucgcccucagccugcuggccauccucaaggggaucuacaacgucgcgaccugcggccuguucgggcugguguccuuccuccugcugugcggccgcagcugcuccacgaccuacaaggggguguacgagcuccagacccuggagcuggacaugaccaaccucaacaugacgaugccgcugagcugcaccaagaacaacucccaccacuacaucauggucggcaacgagaccggccuggagcucacccugacgaacaccagcaucaucaaccacaaguucugcaaccuguccgacgcccacaagaagaaccucuacaaccacgcccugaugagcaucaucuccaccuuccaccugagcauccccaacuucaaccaguacgaggccauguccugcgacuucaacgggggcaagaucagcgugcaguacaaccucucccacagcuacgccguggacgcggccaaccacugcgggaccaucgccaacggcguccugcagacguucaugcggauggccuggggcggguccuacaucgcgcuggacagcggcaaggggaacugggacugcaucaugaccuccuaccaguaccucaucauccagaacaccaccugggaggaccacugccaguucagccgccccucccccaucggcuaccuggggcugcucagccagcggacgcgcgacaucuacaucagccggcgccugcugggcaccuucaccuggacccucuccgacagcgagggcaacgagacgcccgggggcuacugccugacccgguggaugcugaucgaggccgagcucaagugcuucgggaacaccgccguggccaagugcaacgagaagcacgacgaggaguucugcgacaugcugcgccuguucgacuucaacaagcaggccauccggcgccucaagaccgaggcgcaggccaacauccagcugaucaacaaggccgugaacgcccugaucaacgaccagcucaucaugaagaaccaccuccgggacaucaugggcauccccuacugcaacuacuccaaguacugguaccugaaccacacggucaccgggaagaccagccugccccgcugcuggcugguguccaacggcagcuaccugaacgagacccacuucuccgacgacaucgagcagcaggccgacaacaugaucacggagcuccugcagaaggaguacauggaccggcagggcaagaccccgcuggggcucguggaccuguucgucuucagcaccuccuucuaccugaucagcaucuuccugcaccucgugaagaucccgacccaccgccacgugaucggcaagcccugccccaagccccaccggcugaaccacauggggaucugcuccugcggccuguacaagcacccggggguccccgugaaguggaagcgcugaggacuagucccuguucccagagcccacuuuuuuuucuuuuuuugaaauaaaauagccugucuuucagaucuaaaaaaaaaaaaaaaaaaaaaaaaaaaaaaaaaaaaaaaaaaaaaaaaaaaaaaaaaaaaaaaaugcaucccccccccccccccccccccccccccccccaaaggcucuuuucagagccaccagaauu

SEQ ID NO: 2340 - RNA, 1749 nt, Artificial Sequence
  mRNA product Design a-1 comprising derived and/or modified sequence from LASV(Nig08-A19;Clade III)__ADU56618__GPC (opt1)
gggagagucccgcagucggcguccagcggcucugcuuguucgugugugugucguugcaggccuuauucaagcuuaccaugggccagaucgugaccuucuuccaggaggucccccacgugaucgaggaggugaugaacaucguccugaucgcccucagcauccuggccauccugaaggggcucuacaacaucgcgaccugcggccugaucgggcuggugacguuccuccugcuguccggccgcagcugcuccaugaccuacaaggggguguacgagcuccagacccuggagcugaacaugaacacccucaacaugacgaugccgcugagcugcaccaagaacaacucccaccacuacaucauggucggcaacgagaccggccuggagcucacccugacgaacaccagccugcuccaccacaaguucugcaaccuguccgacgcccacaagaagaaccuguacgaccacacccucaugagcaucaucuccaccuuccaccugagcauccccaacuucaaccaguacgaggccauguccugcgacuucaacgggggcaagaucacggugcaguacaaccugagccacuccuacgccaucgacgccgcgaaccacugcgggaccguggccaacggcguccuccagaccuucaugcggauggccuggggcgggagcuacaucgcccuggacuccggccgcgggaagugggacugcaucaugaccagcuaccaguaccugaucauccagaacacgaccugggaggaccacugccaguucucccggcccagccccaucggcuaccucgggcugcugucccagcgcacccgggacaucuacaucagccgccggcuccugggcaccuucacguggacccugagcgacuccgagggcaacgagacccccgggggcuacugccucacccgcuggaugcugaucgaggcggagcugaagugcuucgggaacacggccguggccaagugcaacgagaagcacgacgaggaguucugcgacaugcuccggcuguucgacuucaacaagcaggccauccgccggcugaaggccgaggcgcagaugagcauccagcucaucaacaaggccgugaacgcccugaucaacgaccagcugaucaugaagaaccaccuccgcgacaucaugggcauccccuacugcaacuacuccaaguacugguaccugaaccacaccagcaccgggcggaccucccugccccgcugcuggcucgucagcaacggcuccuaccugaacgagacgcacuucagcgacgacaucgagcagcaggccgacaacaugaucaccgagaugcugcagaaggaguaccucgaccggcagggcaagaccccgcuggggcugguggaccuguucguguucuccaccagcuucuaccucaucuccaucuuccugcaccuggucaagaucccgacgcaccgccacaucgugggcaagcccugccccaagccccaccggcucaaccacauggggaucugcagcugcggccuguacaagcagccgggggugcccguccgcuggaagcggugaggacuagucccuguucccagagcccacuuuuuuuucuuuuuuugaaauaaaauagccugucuuucagaucuaaaaaaaaaaaaaaaaaaaaaaaaaaaaaaaaaaaaaaaaaaaaaaaaaaaaaaaaaaaaaaaaugcaucccccccccccccccccccccccccccccccaaaggcucuuuucagagccaccagaauu

SEQ ID NO: 2341 - RNA, 1752 nt, Artificial Sequence
  mRNA product Design a-1 comprising derived and/or modified sequence from LASV(G1180-SLE-2010;Clade IV)__AIT17168__GPC (opt1)
gggagagucccgcagucggcguccagcggcucugcuuguucgugugugugucguugcaggccuuauucaagcuuaccaugggccagaucgugaccuucuuccaggaggucccccacgugaucgaggaggugaugaacaucguccugaucgcccucagcauccuggccgugcugaaggggcucuacaacuucgcgaccugcggccugguggggcugcucaccuuccugcugcucugcggccgcuccugcaccgccagccgguacaagggggucuacgagcugcagacccuggagcucaacauggagacccugaacaugacgaugccgcuguccugcaccaagaacaacagccaccacuacaucauggugggcaacgagaccggccucgagcugacccugacgaacaccuccaucaucaaccacaaguucugcaaccucagcgacgcccacaagaagaaccuguacgaccacgcccugauguccaucaucagcaccuuccaccucuccauccccaacuucaaccaguacgaggccaugagcugcgacuucaacgggggcaagaucuccgugcaguacaaccugagccacuccuacgcgggggacgccgccaaccacugcggcaccgucgccaacggggugcugcagacguucaugcgcauggcguggggcggcagcuacaucgcccucgacuccgggcacggcagcugggacugcaucaugaccuccuaccaguaccugaucauccagaacaccaccugggaggaccacugccaguucagccggcccucccccaucggguaccugggccuccugagccagcgcacgcgggacaucuacaucagccgccggcugcucggcaccuucaccuggacccuguccgacagcgaggggaaggacacgccgggcggguacugccugacccgcuggaugcucaucgaggccgagcugaagugcuucggcaacaccgccguggccaagugcaacgagaagcacgacgaggaguucugcgacaugcugcggcuguucgacuucaacaagcaggcgauccagcgccugaaggccgaggcccagauguccauccagcugaucaacaaggccgucaacgcccucaucaacgaccagcugaucaugaagaaccaccuccgggacaucauggggauccccuacugcaacuacagcaaguacugguaccucaaccacaccacgaccggcaagaccucccugcccaagugcuggcuggugagcaacggcuccuaccucaacgagacccacuucagcgacgacaucgagcagcaggcggacaacaugaucacggagaugcugcagaaggaguacauggagcgccaggggaagacgccccugggccucguggaccuguucgucuucuccaccagcuucuaccugaucuccaucuuccugcaccucgugaagaucccgacccaccggcacaucgugggcaagagcugccccaagccccaccgccugaaccacauggggaucugcuccugcgggcuguacaagcagcccggcgucccggugaaguggaagcggugaggacuagucccuguucccagagcccacuuuuuuuucuuuuuuugaaauaaaauagccugucuuucagaucuaaaaaaaaaaaaaaaaaaaaaaaaaaaaaaaaaaaaaaaaaaaaaaaaaaaaaaaaaaaaaaaaugcaucccccccccccccccccccccccccccccccaaaggcucuuuucagagccaccagaauu

SEQ ID NO: 2342 - RNA, 1752 nt, Artificial Sequence
  mRNA product Design a-1 comprising derived and/or modified sequence from LASV(G1442-SLE-2011;Clade IV)__AIT17180__GPC (opt1)
gggagagucccgcagucggcguccagcggcucugcuuguucgugugugugucguugcaggccuuauucaagcuuaccaugggccagaucgugaccuucuuccaggaggucccccacgugaucgaggaggugaugaacaucguccugaucgcccucagcauccuggccgugcugaaggggcucuacaacguggcgaccugcggccugaucgggcuggucacguuccuccugcugugcggccgcuccugcaccaccacccucuacaaggggguguacgagcugcagacgcuggagcucaacauggagacccugaacaugaccaugccgcugagcugcaccaagaacaacucccaccacuacauccgggugggcaacgagacgggccucgagcugacccugaccaacaccagcaucaucaaccacaaguucugcaaccucuccgacgcccacaagaagaaccuguacgaccacgcccugaugagcaucaucuccacguuccaccucagcauccccaacuucaaccaguacgaggccauguccugcgacuucaacgggggcaagaucagcguccaguacaaccugucccacagcuacgccggggacgcggccaaccacugcggcaccguggccaacggggugcugcagaccuucaugcgcauggccuggggcggcuccuacaucgcgcucgacagcgggcggggcaacugggacugcaucaugaccuccuaccaguaccugaucauccagaacacgaccugggacgaccacugccaguucagccgccccucccccaucggguaccugggccuccugagccagcggacccgcgacgucuacaucucccggcgccugcucggcaccuucacguggacccugagcgacagcgaggggaaggacaccccgggcggguacugccugacccgguggaugcucaucgaggccgagcugaagugcuucggcaacacggccguggccaagugcaacgagaagcacgacgaggaguucugcgacaugcugcgccucuucgacuucaacaagcaggccauccagcggcugaaggcggaggcccagauguccauccagcugaucaacaaggccgugaacgcccucaucaacgaccagcugaucaugaagaaccaccuccgcgacaucauggggauccccuacugcaacuacagcaaguacugguaccugaacaacaccgccaccggcaagaccucccugcccaagugcuggcugaucagcaacggcuccuaccucaacgagacgcacuucagcgacgacaucgagcaggaggcggacaacaugaucaccgagaugcugcagaaggaguacauggagcggcaggggaagacgccccugggccucgucgaccuguucguguucuccaccagcuucuaccugaucuccaucuuccugcaccucgugaagaucccgacccaccgccacaucgucggcaagagcugccccaagccccaccggcugaaccacauggggaucugcuccugcgggcuguacaagcagcccggcgugccggugcgcuggaagcggugaggacuagucccuguucccagagcccacuuuuuuuucuuuuuuugaaauaaaauagccugucuuucagaucuaaaaaaaaaaaaaaaaaaaaaaaaaaaaaaaaaaaaaaaaaaaaaaaaaaaaaaaaaaaaaaaaugcaucccccccccccccccccccccccccccccccaaaggcucuuuucagagccaccagaauu

SEQ ID NO: 2343 - RNA, 1752 nt, Artificial Sequence
  mRNA product Design a-1 comprising derived and/or modified sequence from LASV(G3010-SLE-2013;Clade IV)__AIT17344__GPC (opt1)
gggagagucccgcagucggcguccagcggcucugcuuguucgugugugugucguugcaggccuuauucaagcuuaccaugggccagaucgugaccuucuuccaggaggucccccacgugaucgaggaggugaugaacaucguccugaucgcccucagcauccuggccgugcugaaggggcucuacaacuucgcgaccugcggccugguggggcuggucacguuccuccugcugugcggccgcuccugcaccaccagccucuacaaggggguguacgagcugcagacccuggagcucaacauggagacgcugaacaugaccaugccgcuguccugcaccaagaacaacagccaccacuacaucauggugggcaacgagaccggccucgagcugacgcugaccaacaccuccaucaucaaccacaaguucugcaaccucagcgacgcccacaagaagaaccuguacaaccacgcccugauguccaucaucagcaccuuccaccucuccauccccaacuucaaccaguacgaggccaugagcugcgacuucaacgggggcaagaucuccguccaguacaaccugagccacuccuacgccggggacgcggccagccacugcggcacgguggccaacggggugcugcagaccuucaugcggauggccuggggcggcuccuacaucgcgcucgacagcggguacggcaagugggacugcaucaugaccuccuaccaguaccugaucauccagaacaccacgugggaggaccacugccaguucagccgccccucccccaucggguaccugggccuccugagccagcggacccgcgacaucuacaucagccggcgccugcucggcaccuucaccuggacgcuguccgacagcgaggggaaggacaccccgggcggguacugccugacccgguggaugcucaucgaggccgagcugaagugcuucggcaacaccgccgucgccaagugcaacgagaagcacgacgaggaguucugcgacaugcugcgccucuucgacuucaacaagcaggccauccagcggcugaagacggaggcgcagauguccauccagcugaucaacaaggccgugaacgcccucaucaacgaccagcugaucaugaagaaccaccuccgcgacaucauggggauccccuacugcaacuacagcaaguacugguaccugaaccacaccaccaccggcaagacgucccugcccaagugcuggcuggugagcaacggcuccuaccucaacgagacccacuucagcgacgacaucgagcagcaggccgacaacaugaucaccgagaugcugcagaaggaguacauggagcggcaggggaagacgccccugggccucgucgaccuguucguguucuccaccagcuucuaccugaucuccaucuuccugcaccucgugaagaucccgacccaccgccacaucgucggcaagagcugccccaagccccaccggcugaaccacauggggaucugcuccugcgggcuguacaagcagcccggcgugccggugcgcuggaagcggugaggacuagucccuguucccagagcccacuuuuuuuucuuuuuuugaaauaaaauagccugucuuucagaucuaaaaaaaaaaaaaaaaaaaaaaaaaaaaaaaaaaaaaaaaaaaaaaaaaaaaaaaaaaaaaaaaugcaucccccccccccccccccccccccccccccccaaaggcucuuuucagagccaccagaauu

SEQ ID NO: 2344 - RNA, 1752 nt, Artificial Sequence
  mRNA product Design a-1 comprising derived and/or modified sequence from LASV(G502-SLE-2009;Clade IV)__AIT17126__GPC (opt1)
gggagagucccgcagucggcguccagcggcucugcuuguucgugugugugucguugcaggccuuauucaagcuuaccaugggccagaucgugaccuucuuccaggaggucccccacgugaucgaggaggugaugaacaucguccugaucgcccucagcauccuggccgugcugaaggggcucuacaacuucgcgaccugcggccugguggggcugcucacguuccugcugcucugcggccgcuccugcaccaccgggcuguacaagggcgucuacgagcugcagacccucgagcugaacauggagacgcugaacaugaccaugccgcucagcugcaccaagaacaacucccaccacuacaucauggugggcaacgagaccgggcuggagcugacgcucaccaacaccagcaucaucaaccacaaguucugcaaccuguccgacgcccacaagaagaaccuguacgaccacgcccucaugagcaucaucuccaccuuccaccugagcauccccaacuucaaccaguacgaggccauguccugcgacuucaacggcgggaagaucagcgugcaguacaaccugucccacagcuacgccggcgacgcggccgaccacugcgggacggucgccaacggcgugcuccagaccuucaugcggauggccuggggcggguccuacaucgcgcuggacagcggccgcgggcggugggacugcaucaugaccuccuaccaguaccugaucauccagaacaccacgugggaggaccacugccaguucagccgccccucccccaucggcuaccucggccugcugagccagcggacccgcgacaucuacaucucccggcgccuccuggggaccuucaccuggacgcugagcgacagcgagggcaaggacacccccgggggcuacugccucacccgguggaugcugaucgaggccgagcugaagugcuucgggaacaccgccguggccaagugcaacgagaagcacgacgaggaguucugcgacaugcuccgccuguucgacuucaacaagcaggccauccagcggcugaaggcggaggcccagauguccauccagcucaucaacaaggccgucaacgcccugaucaacgaccagcuggugaugaagaaccaccuccgcgacaucaugggcauccccuacugcaacuacagccgguacugguaccugaaccacacgaccaccggccgcaccucccugcccaagugcuggcucgugagcaacggguccuaccugaacgagacgcacuucagcgacgacaucgagcagcaggccgacaacaugaucaccgagaugcugcagaaggaguacauggagcggcagggcaagaccccgcucgggcuggucgaccuguucguguucuccaccagcuucuaccugaucuccaucuuccuccaccuggugaagaucccgacgcaccgccacaucgucggcaagagcugccccaagccccaccggcugaaccacauggggaucugcuccugcggccucuacaagcagcccggcgugccggugaaguggaagcgcugaggacuagucccuguucccagagcccacuuuuuuuucuuuuuuugaaauaaaauagccugucuuucagaucuaaaaaaaaaaaaaaaaaaaaaaaaaaaaaaaaaaaaaaaaaaaaaaaaaaaaaaaaaaaaaaaaugcaucccccccccccccccccccccccccccccccaaaggcucuuuucagagccaccagaauu

SEQ ID NO: 2345 - RNA, 1752 nt, Artificial Sequence
  mRNA product Design a-1 comprising derived and/or modified sequence from LASV(G733-SLE-2010;Clade IV)__AIT17154__GPC (opt1)
gggagagucccgcagucggcguccagcggcucugcuuguucgugugugugucguugcaggccuuauucaagcuuaccaugggccagaucgugaccuucuuccaggaggucccccacgugaucgaggaggugaugaacaucguccugaucgcccucagcauccuggccgugcugaaggggcucuacaacuucgcgaccugcggcaucguggggcuggucuccuuccugcuccugugcggccgcagcugcacgaccucccuguacaaggggguguacgagcuccagacccuggagcugaacauggagacccucaacaugacgaugccgcugagcugcaccaagaacaacucccaccacuacaucauggugggcaacgagaccggccuggagcucacccugacgaacaccagcaucaucaaccacaaguucugcaaccuguccgacgcccacaagaagaaccucuacgaccacgcccugaugagcaucaucuccaccuuccaccugagcauccccaacuucaaccaguacgaggccauguccugcgacuucaacgggggcaagaucagcguccaguacaaccucucccacagcuacgccggggacgcggccaaccacugcggcaccaucgccaacggggugcugcagacguucaugcggauggccuggggcggcuccuacaucgcgcuggacagcgggcgcgaccggugggacugcaucaugaccuccuaccaguaccucaucauccagaacaccaccugggaggaccacugccaguucagccgccccucccccaucggcuaccuggggcugcucagccagcggacgcgcgacaucuacaucagccggcgccugcugggcaccuucaccuggacccucuccgacagcgagggcaaggacacgcccgggggcuacugccugacccgguggaugcugaucgaggccgagcucaagugcuucgggaacaccgccguggccaagugcaacgagaagcacgacgaggaguucugcgacaugcugcgccuguucgacuucaacaagcaggccauccagcggcucaaggcggaggcccagauguccauccagcugaucaacaaggccgucaacgcccugaucaacgaccagcucaucaugaagaaccaccuccgcgacaucaugggcauccccuacugcaacuacagcaaguacugguaccugaaccacaccacgaccgggaagaccucccugcccaagugcuggcuggugagcaacggcuccuaccugaacgagacccacuucagcgacgacaucgagcagcaggccgacaacaugaucacggagaugcuccagaaggaguacauggagcggcagggcaagaccccgcuggggcugguggaccucuucgucuucuccaccagcuucuaccugaucuccaucuuccugcaccuggugaagaucccgacccaccgccacguggucggcaagagcugccccaagccccaccggcucaaccacauggggaucugcuccugcggccuguacgggcagcccggcgugccggugaaguggaagcgcugaggacuagucccuguucccagagcccacuuuuuuuucuuuuuuugaaauaaaauagccugucuuucagaucuaaaaaaaaaaaaaaaaaaaaaaaaaaaaaaaaaaaaaaaaaaaaaaaaaaaaaaaaaaaaaaaaugcaucccccccccccccccccccccccccccccccaaaggcucuuuucagagccaccagaauu

SEQ ID NO: 2346 - RNA, 1752 nt, Artificial Sequence
  mRNA product Design a-1 comprising derived and/or modified sequence from MOPV/LASV reassortant(IGS-1;Clade IV)__AFY05576__GPC (opt1)
gggagagucccgcagucggcguccagcggcucugcuuguucgugugugugucguugcaggccuuauucaagcuuaccaugggccagaucgugaccuucuuccaggaggucccccacgugaucgaggaggugaugaacaucguccugaucgcccucagcgugcuggccgugcugaaggggcucuacaacuucgcgaccugcggccuggucgggcuggugacguuccuccugcugugcggccgcuccugcaccaccagccucuacaaggggguguacgagcugcagacccuggagcucaacauggagacgcugaacaugaccaugccgcuguccugcaccaagaacaacagccaccacuacaucauggucggcaacgagaccggccucgagcugacgcugaccaacaccuccaucaucaaccacaaguucugcaaccucagcgacgcccacaagaagaaccuguacgaccacgcccugauguccaucaucagcaccuuccaccucuccauccccaacuucaaccaguacgaggccaugagcugcgacuucaacgggggcaagaucuccgugcaguacaaccugagccacuccuacgccggggacgcggccaaccacugcggcacgguggccaacgggguccugcagaccuucaugcggauggccuggggcggcagcuacaucgcgcucgacuccgggcgcggcaacugggacugcaucaugaccagcuaccaguaccugaucauccagaacaccacgugggaggaccacugccaguucucccggcccagccccaucggguaccugggccuccugucccagcgcacccgggacaucuacaucagccgccggcugcucggcaccuucaccuggacgcugagcgacuccgagggggaggacaccccgggcggguacugccugacccgcuggaugcucaucgaggccgagcugaagugcuucggcaacaccgccguggccaagugcaacgagaagcacgacgaggaguucugcgacaugcugcggcuguucgacuucaacaagcaggccauccagcgccugaaggcggaggcccagaugagcauccagcugaucaacaaggccgugaacgcccucaucaacgaccagcugaucaugaagaaccaccuccgggacaucauggggauccccuacugcaacuacuccaaguacugguaccucaaccacacgaccaccggccgcaccagccugcccaagugcuggcuggucuccaacggcagcuaccucaacgagacgcacuucuccgacgacaucgagcagcaggccgacaacaugaucaccgagaugcugcagaaggaguacauggagcggcaggggaagacgccccugggccucguggaccuguucguguucagcaccuccuucuaccugaucagcaucuuccugcaccucgucaagaucccgacccaccgccacaucguggggaaguccugccccaagccccaccggcugaaccacaugggcaucugcagcugcgggcuguacaagcagcccggcgugccggucaaguggaagcgcugaggacuagucccuguucccagagcccacuuuuuuuucuuuuuuugaaauaaaauagccugucuuucagaucuaaaaaaaaaaaaaaaaaaaaaaaaaaaaaaaaaaaaaaaaaaaaaaaaaaaaaaaaaaaaaaaaugcaucccccccccccccccccccccccccccccccaaaggcucuuuucagagccaccagaauu

SEQ ID NO: 2347 - RNA, 1752 nt, Artificial Sequence
  mRNA product Design a-1 comprising derived and/or modified sequence from LASV(LM765-SLE-2012;Clade IV)__AIT17814__GPC (opt1)
gggagagucccgcagucggcguccagcggcucugcuuguucgugugugugucguugcaggccuuauucaagcuuaccaugggccagaucgugaccuucuuccaggaggucccccacgugaucgaggaggugaugaacaucguccugaucgcccucagcauccuggccgugcugaaggggcucuacaacuucgcgaccugcggccugguggggcuggucacguuccuccugcugugcggccgcuccugcaccaccagccucuacaaggggguguacgagcugcagacccuggagcucaacauggagacgcugaacaugaccaugccgcuguccugcaccaagaacaacagccaccacuacaucauggugggcaacgagaccggccucgagcugacgcugaccaacaccuccaucaucgaccacaaguucugcaaccucagcgacgcccaccggaagaaccuguacgaccacgcccugauguccaucaucagcaccuuccaccucuccauccccaacuucaaccaguacgaggccaugagcugcgacuucaacgggggcaagaucuccguccaguacaaccugagccacuccuacgccaaggacgcggccgaccacugcgggacgguggccaacggcgugcugcagaccuucaugcgcauggccuggggcgggagcuacaucgcgcucgacuccggccgggggcgcugggacugcaucaugaccagcuaccaguaccugaucauccagaacaccacgugggaggaccacugccaguucucccggcccagccccaucggcuaccuggggcuccugucccagcgcacccgggacaucuacaucagccgccggcugcucggcaccuucaccuggacgcugagcgacuccgagggcaaggacacccccgggggcuacugccugacccgcuggaugcucaucgaggccgagcugaagugcuucgggaacaccgccgucgccaagugcaacgagaagcacgacgaggaguucugcgacaugcugcggcuguucgacuucaacaagcaggccauccagcgccugaaggcggaggcccagaugagcauccagcugaucaacaaggccgugaacgcccucaucaacgaccagcugaucaugaagaaccaccuccgggacaucaugggcauccccuacugcaacuacuccaaguacugguaccucaaccacacgaccaccgggaagaccagccugcccaagugcuggcugguguccaacggcagcuaccucaacgagacgcacuucuccgacgacaucgagcagcaggccgacaacaugaucaccgagaugcugcagaaggaguacauggagcgccagggcaagaccccgcuggggcucgucgaccuguucguguucagcaccuccuucuaccugaucagcaucuuccugcaccucgugaagaucccgacgcaccggcacaucgucggcaagcccugccccaagccccaccgccugaaccacauggggaucugcuccugcggccuguacaagcagccgggggugcccgugaaguggaagcggugaggacuagucccuguucccagagcccacuuuuuuuucuuuuuuugaaauaaaauagccugucuuucagaucuaaaaaaaaaaaaaaaaaaaaaaaaaaaaaaaaaaaaaaaaaaaaaaaaaaaaaaaaaaaaaaaaugcaucccccccccccccccccccccccccccccccaaaggcucuuuucagagccaccagaauu

SEQ ID NO: 2348 - RNA, 1752 nt, Artificial Sequence
  mRNA product Design a-1 comprising derived and/or modified sequence from LASV(LM776-SLE-2012;Clade IV)__AIT17824__GPC (opt1)
gggagagucccgcagucggcguccagcggcucugcuuguucgugugugugucguugcaggccuuauucaagcuuaccaugggccagaucgugaccuucuuccaggaggucccccacgugaucgaggaggugaugaacaucguccugaucgcccucagcauccuggccgugcugaaggggcucuacaacuucgcgaccugcggccugguggggcuggucacguuccuccugcugugcggccgcuccugcaccaccagcguguacaaggggguguacgagcuccagacccuggagcugaacauggagacgcucaacaugaccaugccgcuguccugcaccaagaacaacagccaccacuacaucauggucggcaacgagaccggccuggagcucacgcugaccaacaccuccaucaucaaccacaaguucugcaaccugagcgacgcccacaagaagaaccucuacgaccacgcccugauguccaucaucagcaccuuccaccuguccauccccaacuucaaccaguacgaggccaugagcugcgacuucaacgggggcaagaucuccgugcaguacaaccucagccacuccuacgccggggacgcggccaaccacugcggcacgguggccaacgggguccugcagaccuucaugcggauggccuggggcggcagcuacaucgcgcuggacuccgggcacggcaagugggacugcaucaugaccagcuaccaguaccucaucauccagaacaccacgugggaggaccacugccaguucucccgccccagccccaucggguaccugggccugcucucccagcggacccgcgacaucuacaucagccggcgccugcugggcaccuucaccuggacgcucagcgacuccgaggggaaggacaccccgggcggguacugccugacccgguggaugcugaucgaggccgagcucaagugcuucggcaacaccgccguggccaagugcaacgagaagcacgacgaggaguucugcgacaugcugcgccuguucgacuucaacaagcaggccauccagcggcucaaggcggaggcccagaugagcauccagcugaucaacaaggccgugaacgcccugaucaacgaccagcucaucaugaagaaccaccuccgcgacaucauggggauccccuacugcaacuacuccaaguacugguaccugaaccacacgaccaccggcaagaccagccugcccaagugcuggcuggucuccaacggcagcuaccugaacgagacgcacuucuccgacgacaucgagcagcaggccgacaacaugaucaccgagaugcuccagaaggaguacauggagcggcaggggaagacgccccugggccugguggaccucuucguguucagcaccuccuucuaccugaucagcaucuuccugcaccuggucaagaucccgacccaccgccacaucguggggaaguccugccccaagccccaccggcucaaccacaugggcaucugcagcugcgggcuguacaagcagcccggcgugccgguccgcuggaagcggugaggacuagucccuguucccagagcccacuuuuuuuucuuuuuuugaaauaaaauagccugucuuucagaucuaaaaaaaaaaaaaaaaaaaaaaaaaaaaaaaaaaaaaaaaaaaaaaaaaaaaaaaaaaaaaaaaugcaucccccccccccccccccccccccccccccccaaaggcucuuuucagagccaccagaauu

SEQ ID NO: 2349 - RNA, 1752 nt, Artificial Sequence
  mRNA product Design a-1 comprising derived and/or modified sequence from LASV(Mad39;Clade IV)__ANH09722__GPC (opt1)
gggagagucccgcagucggcguccagcggcucugcuuguucgugugugugucguugcaggccuuauucaagcuuaccaugggccagaucgugaccuucuuccaggaggucccccacgugaucgaggaggugaugaacaucguccugaucgcccucagcauccuggccgugcugaaggggcucuacaacguggcgaccugcggccugaucgggcuggucacguuccuccugcugugcggccgcuccugcaccaccacccucuacaaggggguguacgagcugcaggcccuggagcucaacauggagacgcugaacaugaccaugccgcugagcugcaccaagaacaacucccaccacuacauccgggugggcaacgagaccggccucgagcugacgcugaccaacaccagccucaucaaccacaaguucugcaaccuguccgacgcccacaagaagaaccuguacgaccacgcccucaugagcaucaucuccaccuuccaccugagcauccccaacuucaaccaguacgaggccauguccugcgacuucaacgacgggaagaucagcguccaguacaaccugucccacacguacgcgggcgacaccgccaaccacugcgggaccguggccaacggcgugcuccagaccuucaugcgcauggccuggggcgggagcuacaucgcgcuggacuccggccgcgggggcugggacugcaucaugacgagcuaccaguaccugaucauccagaacaccaccugggaggaccacugccaguucucccggcccagccccaucggguaccucggccugcugucccagcggacccgcgacaucuacaucagccggcgccuccugggcacguucaccuggacccuguccgacagcgaggggaaggacaccccgggcggguacugccucacgcgguggaugcugaucgaggccgagcugaagugcuucggcaacaccgccgucgccaagugcaacgagaagcacgacgaggaguucugcgacaugcuccgccuguucgacuucaacaagcaggccauccagcggcugaaggcggaggcccagaugagcauccagcucaucaacaaggccgugaacgcccugaucaacgaccagcugaucaugaagaaccaccuccgcgacaucauggggauccccuacugcaacuacuccaaguacugguaccugaaccacaccgugaccggcaagacgagccugcccaagugcuggcucgucuccaacggcagcuaccugaacgagacccacuucuccgacgacaucgagcagcaggccgacaacaugaucaccgagaugcugcagaaggaguacauggagcggcaggggaagacgccccucggccugguggaccuguucguguucagcaccuccuucuaccugaucagcaucuuccuccaccuggucaagaucccgacccaccgccacgugguggggaagcccugccccaagccccaccggcugaaccacaugggcaucugcuccugcggguucuacaagcagccgggcguccccgugcgcuggaagcggugaggacuagucccuguucccagagcccacuuuuuuuucuuuuuuugaaauaaaauagccugucuuucagaucuaaaaaaaaaaaaaaaaaaaaaaaaaaaaaaaaaaaaaaaaaaaaaaaaaaaaaaaaaaaaaaaaugcaucccccccccccccccccccccccccccccccaaaggcucuuuucagagccaccagaauu

SEQ ID NO: 2350 - RNA, 1752 nt, Artificial Sequence
  mRNA product Design a-1 comprising derived and/or modified sequence from LASV(Z0947-SLE-2011;Clade IV)__AIT17840__GPC (opt1)
gggagagucccgcagucggcguccagcggcucugcuuguucgugugugugucguugcaggccuuauucaagcuuaccaugggccagaucgugaccuucuuccaggaggucccccacgugaucgaggaggugaugaacaucguccugaucgcccucagcauccuggccgugcugaaggggcucuacaacuucgcgaccugcggccugguggggcuggucacguuccuccugcugugcggccgcuccugcaccaucagccucuacaaggggguguacgagcugcagacccuggagcucaacauggagacccugaacaugacgaugccgcuguccugcaccaagaacaacagccaccacuacaucauggugggcaacgagaccggccucgagcugacccugacgaacaccuccaucaucaaccacaaguucugcaaccucagcgacgcccacaagaagaaccuguacgaccacgcccugauguccaucaucagcaccuuccaccucuccauccccaacuucaaccaguacgaggccaugagcugcgacuucaacgggggcaagaucuccguccaguacaaccugagccacuccuacgccggggacgcggccaaccacugcggcaccguggccaacggggugcugcagacguucaugcggauggccuggggcggcagcuacaucgcgcucgacuccgggcgcgaccggugggacugcaucaugaccagcuaccaguaccugaucauccagaacaccaccugggaggaccacugccaguucucccgccccagccccaucggcuaccuggggcuccugucccagcggacgcgcgacaucuacaucagccggcgccugcucggcaccuucaccuggacccugagcgacuccgagggcaaggacacgcccgggggcuacugccugacccgguggaugcucaucgaggccgagcugaagugcuucgggaacaccgccgucgccaagugcaacgagaagcacgacgaggaguucugcgacaugcugcgccucuucgacuucaacaagcaggccauccagcggcugaaggcggaggcccagaugagcauccagcugaucaacaaggccgugaacgcccucaucaacgaccagcugaucaugaagaaccaccuccgcgacaucaugggcauccccuacugcaacuacuccaaguacugguaccugaaccacaccacgaccgggaagaccagccugcccaagugcuggcugguguccaacggcagcuaccucaacgagacccacuucuccgacgacaucgagcagcaggccgacaacaugaucacggagaugcugcagaaggaguacauggagcggcagggcaagaccccgcuggggcucgucgaccuguucguguucagcaccuccuucuaccugaucagcaucuuccugcaccucgugaagaucccgacccaccgccacaucgucggcaagcccugccccaagccccaccggcugaaccacauggggaucugcuccugcggccuguacaagcagccgggggugcccgugaaguggaagcgcugaggacuagucccuguucccagagcccacuuuuuuuucuuuuuuugaaauaaaauagccugucuuucagaucuaaaaaaaaaaaaaaaaaaaaaaaaaaaaaaaaaaaaaaaaaaaaaaaaaaaaaaaaaaaaaaaaugcaucccccccccccccccccccccccccccccccaaaggcucuuuucagagccaccagaauu

SEQ ID NO: 2351 - RNA, 1752 nt, Artificial Sequence
  mRNA product Design a-1 comprising derived and/or modified sequence from LASV(Josiah;Clade IV)__NP_694870__GPC (opt2)
gggagagucccgcagucggcguccagcggcucugcuuguucgugugugugucguugcaggccuuauucaagcuuaccaugggccagaucgucaccuucuuccaggaggucccccacgucaucgaggaggucaugaacaucguccucaucgcccucuccguccucgccguccucaagggccucuacaacuucgccaccugcggccucgucggccucgucaccuuccuccuccucugcggccgcuccugcaccaccucccucuacaagggcgucuacgagcuccagacccucgagcucaacauggagacccucaacaugaccaugccccucuccugcaccaagaacaacucccaccacuacaucauggucggcaacgagaccggccucgagcucacccucaccaacaccuccaucaucaaccacaaguucugcaaccucuccgacgcccacaagaagaaccucuacgaccacgcccucauguccaucaucuccaccuuccaccucuccauccccaacuucaaccaguacgaggccauguccugcgacuucaacggcggcaagaucuccguccaguacaaccucucccacuccuacgccggcgacgccgccaaccacugcggcaccgucgccaacggcguccuccagaccuucaugcgcauggccuggggcggcuccuacaucgcccucgacuccggccgcggcaacugggacugcaucaugaccuccuaccaguaccucaucauccagaacaccaccugggaggaccacugccaguucucccgccccucccccaucggcuaccucggccuccucucccagcgcacccgcgacaucuacaucucccgccgccuccucggcaccuucaccuggacccucuccgacuccgagggcaaggacacccccggcggcuacugccucacccgcuggaugcucaucgaggccgagcucaagugcuucggcaacaccgccgucgccaagugcaacgagaagcacgacgaggaguucugcgacaugcuccgccucuucgacuucaacaagcaggccauccagcgccucaaggccgaggcccagauguccauccagcucaucaacaaggccgucaacgcccucaucaacgaccagcucaucaugaagaaccaccuccgcgacaucaugggcauccccuacugcaacuacuccaaguacugguaccucaaccacaccaccaccggccgcaccucccuccccaagugcuggcucgucuccaacggcuccuaccucaacgagacccacuucuccgacgacaucgagcagcaggccgacaacaugaucaccgagaugcuccagaaggaguacauggagcgccagggcaagaccccccucggccucgucgaccucuucgucuucuccaccuccuucuaccucaucuccaucuuccuccaccucgucaagauccccacccaccgccacaucgucggcaaguccugccccaagccccaccgccucaaccacaugggcaucugcuccugcggccucuacaagcagcccggcguccccgucaaguggaagcgcugaggacuagucccuguucccagagcccacuuuuuuuucuuuuuuugaaauaaaauagccugucuuucagaucuaaaaaaaaaaaaaaaaaaaaaaaaaaaaaaaaaaaaaaaaaaaaaaaaaaaaaaaaaaaaaaaaugcaucccccccccccccccccccccccccccccccaaaggcucuuuucagagccaccagaauu

SEQ ID NO: 2352 - RNA, 1749 nt, Artificial Sequence
  mRNA product Design a-1 comprising derived and/or modified sequence from LASV(LP;Clade I)__AAF86701__GPC (opt2)
gggagagucccgcagucggcguccagcggcucugcuuguucgugugugugucguugcaggccuuauucaagcuuaccaugggccagaucaucaccuucuuccaggaggucccccacgucaucgaggaggucaugaacaucguccucaucgcccucucccuccucgccauccucaagggccucuacaacaucgccaccugcggcaucaucggccucgucgccuuccucuuccucugcggcaaguccugcucccucacccucaagggcggcuacgagcuccagacccucgagcucaacauggagacccucaacaugaccaugccccucuccugcaccaagaacuccucccaccacuacauccgcgucggcaacgagaccggccucgagcucacccucaccaacaccuccaucaucaaccacaaguucugcaaccucuccgacgcccacaagaagaaccucuacgaccacgcccucauguccaucaucuccaccuuccaccucuccauccccaacuucaaccaguacgaggccauguccugcgacuucaacggcggcaagaucuccguccaguacaaccucucccacuccuacgccggcgacgccgccgagcacugcggcaccgucgccaacggcguccuccagaccuucaugcgcauggccuggggcggccgcuacaucgcccucgacuccggcaagggcaacugggacugcaucaugaccuccuaccaguaccucaucauccagaacaccaccugggaggaccacugccaguucucccgccccucccccaucggcuaccucggccuccucucccagcgcacccgcgacaucuacaucucccgccgccuccucggcaccuucaccuggacccucuccgacuccgagggcaacgagacccccggcggcuacugccucacccgcuggaugcucaucgaggccgagcucaagugcuucggcaacaccgccgucgccaagugcaacgagaagcacgacgaggaguucugcgacaugcuccgccucuucgacuucaacaagcaggccauccgccgccucaaggccgaggcccagauguccauccagcucaucaacaaggccgucaacgcccucaucaacgaccagcucaucaugaagaaccaccuccgcgacaucaugggcauccccuacugcaacuacuccaaguacugguaccucaaccacaccuccuccggccgcaccucccuccccaagugcuggcucaucuccaacggcuccuaccucaacgagacccaguucuccgacgacaucgagcagcaggccgacaacaugaucaccgagaugcuccagaaggaguacaucgagcgccagggcaagaccccccucggccucgucgacaucuucaucuucuccaccuccuucuaccucaucuccaucuuccuccaccucaucaagauccccacccaccgccacaucgucggcaagcccugccccaagccccaccgccucaaccacaugggcgucugcuccugcggccucuacaagcaccccggcguccccaccaaguggaagcgcugaggacuagucccuguucccagagcccacuuuuuuuucuuuuuuugaaauaaaauagccugucuuucagaucuaaaaaaaaaaaaaaaaaaaaaaaaaaaaaaaaaaaaaaaaaaaaaaaaaaaaaaaaaaaaaaaaugcaucccccccccccccccccccccccccccccccaaaggcucuuuucagagccaccagaauu

SEQ ID NO: 2353 - RNA, 1749 nt, Artificial Sequence
  mRNA product Design a-1 comprising derived and/or modified sequence from LASV(803213;Clade II)__AAF86703__GPC (opt2)
gggagagucccgcagucggcguccagcggcucugcuuguucgugugugugucguugcaggccuuauucaagcuuaccaugggccagaucaucaccuucuuccaggaggucccccacgucaucgaggaggucaugaacaucguccucaucgcccucucccuccucgccauccucaagggcaucuacaacgucgccaccugcggccucuucggccucaucuccuuccuccuccucugcggccgcuccugcuccgucaccuacaagggcgucuacgagcuccagacccucgagcucaacauggccaaccucaacaugaccaugccccucuccugcaccaagaacaacucccaccacuacaucauggucggcaacgagaccggccucgagcucacccucaccaacaccuccaucaucaaccacaaguucugcaaccucuccgacgcccacaagaagaaccucuacgaccacgcccucauguccaucaucuccaccuuccaccucuccauccccaacuucaaccaguacgaggccauguccugcgacuucaacggcggcaagaucuccguccaguacaaccucucccacuccuucgccgucgacgccgccaaccacugcggcaccaucgccaacggcguccuccagaccuucaugcgcauggccuggggcggcuccuacaucgcccucgacuccggcaagggcaacugggacugcaucaugaccuccuaccaguaccucaucauccagaacaccaccugggaggaccacugccaguucucccgccccucccccaucggcuaccucggccuccucucccagcgcacccgcgacaucuacaucucccgccgccuccucggcaccuucaccuggacccucuccgacuccgagggcaacgaggcccccggcggcuacugccucacccgcuggaugcucaucgaggccgagcucaagugcuucggcaacaccgccgucgccaagugcaacgagaagcacgacgaggaguucugcgacaugcuccgccucuucgacuucaacaagcaggccaucaagcgccucaagaccgaggcccagauguccauccagcucaucaacaaggccgucaacgcccucaucaacgaccagcucaucaugaagaaccaccuccgcgacaucaugggcauccccuacugcaacuacucccgcuacugguaccucaaccacaccgucaccggcaagaccucccucccccgcugcuggcucgucuccaacggcuccuaccucaacgagacccacuucuccgacgacaucgagcagcaggccgacaacaugaucaccgagaugcuccagaaggaguacauggaccgccagggcaagaccccccucggccucgucgaccucuucgucuucuccaccuccuucuaccucaucuccaucuuccuccaccucgucaagauccccacccaccgccacaucgucggcaagcccugccccaagccccaccgccucaaccacaugggcaucugcuccugcggccucuacaagcaccccggcguccccgucaaguggaagcgcugaggacuagucccuguucccagagcccacuuuuuuuucuuuuuuugaaauaaaauagccugucuuucagaucuaaaaaaaaaaaaaaaaaaaaaaaaaaaaaaaaaaaaaaaaaaaaaaaaaaaaaaaaaaaaaaaaugcaucccccccccccccccccccccccccccccccaaaggcucuuuucagagccaccagaauu

SEQ ID NO: 2354 - RNA, 1749 nt, Artificial Sequence
  mRNA product Design a-1 comprising derived and/or modified sequence from LASV(GA391;Clade III)__CAA36645__GPC (opt2)
gggagagucccgcagucggcguccagcggcucugcuuguucgugugugugucguugcaggccuuauucaagcuuaccaugggccagaucgucaccuucuuccaggaggucccccacgucaucgaggaggucaugaacaucguccucaucgcccucuccauccucgccauccucaagggccucuacaacgucgccaccugcggccucaucggccucgucaccuuccuccuccucuccggccgcuccugcucccucaucuacaagggcaccuacgagcuccagacccucgagcucaacauggagacccucaacaugaccaugccccucuccugcaccaagaacaacucccaccacuacauccgcgucggcaacgagaccggccucgagcucacccucaccaacaccuccauccucaaccacaaguucugcaaccucuccgacgcccacaagcgcaaccucuacgaccacucccucauguccaucaucuccaccuuccaccucuccauccccaacuucaaccaguacgaggccauguccugcgacuucaacggcggcaagaucaccguccaguacaaccucucccacuccuucgccgucgacgccgccggccacugcggcacccucgccaacggcguccuccagaccuucaugcgcauggccuggggcggcuccuacaucgcccucgacuccggccgcggcaacugggacugcaucaugaccuccuaccaguaccucaucauccagaacaccaccugggacgaccacugccaguucucccgccccucccccaucggcuaccucggccuccucucccagcgcacccgcgacaucuacaucucccgccgccuccucggcaccuucaccuggacccucuccgacuccgagggcaacgagacccccggcggcuacugccucacccgcuggaugcucaucgaggccgagcucaagugcuucggcaacaccgccgucgccaagugcaacgagaagcacgacgaggaguucugcgacaugcuccgccucuucgacuucaacaagcaggccauccgccgccucaagaccgaggcccagauguccauccagcucaucaacaaggccgucaacgcccucaucaacgaccagcucaucaugaagaaccaccuccgcgacaucaugggcauccccuacugcaacuacucccgcuacugguaccucaaccacaccuccaccggcaagaccucccucccccgcugcuggcucaucuccaacggcuccuaccucaacgagaccaaguucuccgacgacaucgagcagcaggccgacaacaugaucaccgagaugcuccagaaggaguacaucgaccgccagggcaagaccccccucggccucgucgaccucuucgucuucuccaccuccuucuaccucaucuccaucuuccuccaccucgucaagauccccacccaccgccacaucgucggcaagcccugccccaagccccaccgccucaaccacaugggcaucugcuccugcggccucuacaagcagcccggcguccccguccgcuggaagcgcugaggacuagucccuguucccagagcccacuuuuuuuucuuuuuuugaaauaaaauagccugucuuucagaucuaaaaaaaaaaaaaaaaaaaaaaaaaaaaaaaaaaaaaaaaaaaaaaaaaaaaaaaaaaaaaaaaugcaucccccccccccccccccccccccccccccccaaaggcucuuuucagagccaccagaauu

SEQ ID NO: 2355 - RNA, 1752 nt, Artificial Sequence
  mRNA product Design a-1 comprising derived and/or modified sequence from LASV(AV;Clade V)__CCA30314__GPC (opt2)
gggagagucccgcagucggcguccagcggcucugcuuguucgugugugugucguugcaggccuuauucaagcuuaccaugggccagaucgucaccuucuuccaggaggucccccacgucaucgaggaggucaugaacaucguccucaucgcccucuccauccucgccguccucaagggccucuacaacaucgccaccugcggccucaucggccucaucaccuuccuccuccucugcggccgcuccugcuccuccaaccucuacaagggcgucuacgagcuccagucccucgaccucaacauggagacccucaacaugaccaugccccucuccugcaccaagaacaacucccaccacuacauccgcgucggcaacgacaccggccucgagcucacccucaccaacaccuccauccucaaccacaaguucugcaaccucuccgacgcccacaagaaggaccucuacgaccacgcccucauguccaucaucuccaccuuccaccucuccauccccaacuucaaccaguacgaggccauguccugcgacuucaacggcggcaagaucuccguccaguacaaccucucccacuccuacgccaucgacgccgccaaccacugcggcaccgucgccaacggcauccuccagaccuucaugcgcauggccuggggcggcuccuacaucgcccucgacuccggccgcggcaacugggacugcaucaugaccuccuaccaguaccucaucauccagaacaccaccugggagaaccacugccaguucucccgccccucccccaucggcuaccucggccuccucucccagcgcacccgcgacaucuacaucucccgccgccuccucggcaccuucaccuggacccucuccgacuccgagggcaacgccacccccggcggcuacugccucacccgcuggaugcucaucgaggccgagcucaagugcuucggcaacaccgccgucgccaagugcaacgagaagcacgacgaggaguucugcgacaugcuccgccucuucgacuucaacaagcaggccaucucccgccucaaguccgaggcccagauguccauccagcucaucaacaaggccgucaacgcccucaucaacgaccagcucaucaugaagaaccaccuccgcgacaucaugggcauccccuacugcaacuacuccaaguacugguaccucaaccacaccaucaccggcaagaccucccuccccaagugcuggcucgucuccaacggcuccuaccucaacgagacccacuucuccgacgacaucgagcagcaggccgacaacaugaucaccgagaugcuccagaaggaguacauggagcgccagggcaagaccccccucggccucgucgaccucuucgucuucuccaccuccuucuaccucaucuccaucuuccuccgccucgucaagauccccacccaccgccacaucgucggcaagcccugccccaagccccaccgccucaaccacaugggcaucugcuccugcggccucuacaagcagcccggcguccccguccgcuggaagcgcugaggacuagucccuguucccagagcccacuuuuuuuucuuuuuuugaaauaaaauagccugucuuucagaucuaaaaaaaaaaaaaaaaaaaaaaaaaaaaaaaaaaaaaaaaaaaaaaaaaaaaaaaaaaaaaaaaugcaucccccccccccccccccccccccccccccccaaaggcucuuuucagagccaccagaauu

SEQ ID NO: 2356 - RNA, 1749 nt, Artificial Sequence
  mRNA product Design a-1 comprising derived and/or modified sequence from LASV(Togo/2016/7082;Clade VI)__AMR44577__GPC (opt2)
gggagagucccgcagucggcguccagcggcucugcuuguucgugugugugucguugcaggccuuauucaagcuuaccaugggccagaucaucaccuucuuccaggaggucccccacgucaucgaggaggucaugaacaucguccucaucgcccucucccuccucgccauccucaagggcgucuacaacgucgccaccugcggcaucaucggccucgucaccuuccucuuccucugcggccgcuccugcucccucaucuacaagggcuccuacgagcuccagacccucgagcucaacauggagacccucaacaugaccaugccccucuccugcaccaagaacuccucccaccacuacauccgcgucggcaacgagaccggccucgagcucacccucaccaacaccuccaucaucaaccacaaguucugcaaccucuccgacgcccacaagcgcaaccucuacgaccacgcccucauguccauccucuccaccuuccaccucuccauccccaacuucaaccaguacgaggccauguccugcgacuucaacggcggcaagaucuccguccaguacaaccucucccacgccuacgccgucgacgccgccgagcacugcggcaccgucgccaacggcguccuccagaccuucaugcgcauggccuggggcggcuccuacaucgcccucgacuccggccgcggcaacugggacugcaucaugaccuccuaccaguaccucaucauccagaacaccaccugggaggaccacugccaguucucccgccccucccccaucggcuaccucggccuccucucccagcgcacccgcgacaucuacaucucccgccgccuccucggcaccuucaccuggacccucuccgacuccgagggcaacgagacccccggcggcuacugccucacccgcuggaugcucaucgaggccgagcucaagugcuucggcaacaccgccgucgccaagugcaacgagaagcacgacgaggaguucugcgacaugcuccgccucuucgacuucaacaagcaggccauccagcgccucaaguccgaggcccagauguccauccagcucaucaacaaggccgucaacgcccucaucaacgaccagcucaucaugaagaaccaccuccgcgacaugaugggcauccccuacugcaacuacuccaaguacugguaccucaaccacaccuccuccggccgcaccucccuccccaagugcuggcucgucuccaacggcuccuaccucaacgagacccacuucuccgacgacaucgagcagcaggccgacaacaugaucaccgagaugcuccagaaggaguacaucgaccgccagggcaagaccccccucggccucgucgaccucuucgucuucuccaccuccuucuaccucaucuccaucuuccuccaccucaucaagauccccacccaccgccacaucgucggcaagcccugccccaagccccaccgccucaaccacaugggcaucugcuccugcggccucuacaagcagcccggcguccccacccgcuggaagcgcugaggacuagucccuguucccagagcccacuuuuuuuucuuuuuuugaaauaaaauagccugucuuucagaucuaaaaaaaaaaaaaaaaaaaaaaaaaaaaaaaaaaaaaaaaaaaaaaaaaaaaaaaaaaaaaaaaugcaucccccccccccccccccccccccccccccccaaaggcucuuuucagagccaccagaauu

SEQ ID NO: 2357 - RNA, 1749 nt, Artificial Sequence
  mRNA product Design a-1 comprising derived and/or modified sequence from LASV(KAK-428;Clade n.d. (VII))__ANH09740__GPC (opt2)
gggagagucccgcagucggcguccagcggcucugcuuguucgugugugugucguugcaggccuuauucaagcuuaccaugggccagaucgucaccuucuuccaggaggucccccacgucaucgaggaggucaugaacaucguccucaucgcccucucccuccucgccauccucaagggccucuacaacuucgccaccugcggcgucaucggccucaucaccuuccuccuccucugcggccgcuccugcuccgccaccuacaagggccaguacgagcuccagacccucgagcucaacauggagucccucaacaugaccaugccccucuccugcaccaagaacaacucccaccacuacauccgcgccggcaacaacaccggccucgagcucacccucaccaacaccuccaucaucucccacaaguucugcaaccucuccgacgcccacaagaagaaccucuacgaccacacccucauguccaucaucaccaccuuccaccucuccauccccaacuucaaccaguacgaggccauguccugcgacuucaacggcggcaagaucuccauccaguacaaccucucccacuccuacgccggcgacgccgcccagcacugcggcaccgucgccaacggcguccuccagaccuucaugcgcauggccuggggcggcuccuaccucgcccucgacuccggccgccgcggcugggacugcaucaucuccuccuaccaguaccucaucauccagaacaccaccugggacgaccacugccaguucucccgccccucccccaucggcuaccucggcuucgucucccagaagacccgcgacaucuacaucucccgccgccuccucggcaccuucaccuggacccucuccgacuccgagggccacgacaugcccggcggcuacugccucacccgcuggaugcucaucgaggccgaccucaagugcuucggcaacaccgccgucgccaagugcaacgagaagcacgacgaggaguucugcgacauguggcgccucuucgacuucaacaagcaggccauccagcgccucaaggccgaggcccagaugaacauccagcucaucaacaaggccgucaacgcccucaucaacgaccagcucaugaugaagaaccaccuccgcgacaucaugggcauccccuacugcaacuacuccaaguucugguaccucaacaacaccaccaccggccgcaccucccucccccgcugcuggcucaucuccaacggcuccuaccucaacgagacccacuucuccgacgacaucgagcagcaggccgacaacaugaucaccgagaugcuccagaaggaguacauggaccgccagggcaagaccccccucggccucgucgaccucuucgucuucuccaccuccuucuaccucaucaccaucuuccuccaccucgucaagauccccacccaccgccacaucgucggcaagcccugccccaagccccaccgccucaaccacaugggcaucugcuccugcggccucuacaagcagcccggcguccccguccgcuggaagcgcugaggacuagucccuguucccagagcccacuuuuuuuucuuuuuuugaaauaaaauagccugucuuucagaucuaaaaaaaaaaaaaaaaaaaaaaaaaaaaaaaaaaaaaaaaaaaaaaaaaaaaaaaaaaaaaaaaugcaucccccccccccccccccccccccccccccccaaaggcucuuuucagagccaccagaauu

SEQ ID NO: 2358 - RNA, 1749 nt, Artificial Sequence; identical to SEQ ID NO: 2352
  mRNA product Design a-1 comprising derived and/or modified sequence from LASV(Pinneo-NIG-1969;Clade I)__AIT17836__GPC (opt2)

SEQ ID NO: 2359 - RNA, 1749 nt, Artificial Sequence
  mRNA product Design a-1 comprising derived and/or modified sequence from LASV(ISTH0009-NIG-2011;Clade II)__AIT17404__GPC (opt2)
gggagagucccgcagucggcguccagcggcucugcuuguucgugugugugucguugcaggccuuauucaagcuuaccaugggccagaucaucaccuucuuccaggaggucccccacgucaucgaggaggucaugaacaucguccucaucgcccucucccuccucgccauccucaagggcaucuacaacgucgccaccugcggccucuucggccucgucuccuuccuccuccucugcggccgcuccugcuccaccaccuacaagggcgucuacgagcuccagacccucgagcucgacauggccucccucaacaugaccaugccccucuccugcaccaagaacaacucccaccacuacaucauggucggcaacgagaccggccucgagcucacccucaccaacaccuccaucaucaaccacaaguucugcaaccucuccgacgcccacaagaagaaccucuacgaccacgcccucauguccaucaucuccaccuuccaccucuccauccccaacuucaaccaguacgaggccauguccugcgacuucaacggcggcaagaucuccguccaguacaaccucucccacgccuacgccgucgacgccgccaaccacugcggcaccaucgccaacggcguccuccagaccuucaugcgcauggccuggggcggcuccuacaucgcccucgacuccggcaagggcuccugggacugcaucaugaccuccuaccaguaccucaucauccagaacaccaccugggaggaccacugccaguucucccgccccucccccaucggcuaccucggccuccucucccagcgcacccgcgacaucuacaucucccgccgccuccucggcaccuucaccuggacccucuccgacuccgagggcaacgagacccccggcggcuacugccucacccgcuggaugcucaucgaggccgagcucaagugcuucggcaacaccgccgucgccaagugcaacgagaagcacgacgaggaguucugcgacaugcuccgccucuucgacuucaacaagcaggccauccgccgccucaagaccgaggcccagauguccauccagcucaucaacaaggccgucaacgcccucaucaacgaccagcucaucaugaagaaccaccuccgcgacaucaugggcauccccuacugcaacuacuccaaguacugguaccucaaccacaccgucaccggcaagaccucccucccccgcugcuggcucgucuccaacggcuccuaccucaacgagacccacuucuccgacgacaucgagcagcaggccgacaacaugaucaccgagcuccuccagaaggaguacauggaccgccagggcaagaccccccucggccucgucgaccucuucgucuucuccaccuccuucuaccucaucuccaucuuccuccaccucaucaagauccccacccaccgccacaucaccggcaagcccugccccaagccccaccgccucaaccacaugggcaucugcuccugcggccucuacaagcaccccggcguccccgucaaguggaagcgcugaggacuagucccuguucccagagcccacuuuuuuuucuuuuuuugaaauaaaauagccugucuuucagaucuaaaaaaaaaaaaaaaaaaaaaaaaaaaaaaaaaaaaaaaaaaaaaaaaaaaaaaaaaaaaaaaaugcaucccccccccccccccccccccccccccccccaaaggcucuuuucagagccaccagaauu

SEQ ID NO: 2360 - RNA, 1749 nt, Artificial Sequence
  mRNA product Design a-1 comprising derived and/or modified sequence from LASV(ISTH2010-NIG-2012;Clade II)__AIT17482__GPC (opt2)
gggagagucccgcagucggcguccagcggcucugcuuguucgugugugugucguugcaggccuuauucaagcuuaccaugggccagaucaucaccuucuuccaggaggucccccacgucaucgaggaggucaugaacaucguccucaucgcccucucccuccucgccauccucaagggcaucuacaacgucgccaccugcggccucuucggccucgucuccuuccuccuccucugcggccgcuccugcuccaccaccuacaagggcgucuacgagcuccagacccucgagcucgacauggccucccucaacaugaccaugccccucuccugcaccaagaacaacucccaccacuacaucauggucggcaacgagaccggccucgagcucacccucaccaacaccuccaucaucaaccacaaguucugcaaccucuccgacgcccacaagaagaaccucuacgaccacgcccucauguccaucaucuccaccuuccaccucuccauccccaacuucaaccaguacgaggccauguccugcgacuucaacggcggcaagaucuccguccaguacaaccucucccacgccuacgccgucgacgccgccaaccacugcggcaccaucgccaacggcguccuccagaccuucaugcgcauggccuggggcggcuccuacaucgcccucgacuccggcaagggcuccugggacugcaucaugaccuccuaccaguaccucaucauccagaacaucaccugggaggaccacugccaguucucccgccccucccccaucggcuaccucggccuccucucccagcgcacccgcgacaucuacaucucccgccgccuccucggcaccuucaccuggacccucuccgacuccgagggcaacgagacccccggcggcuacugccucacccgcuggaugcucaucgaggccgagcucaagugcuucggcaacaccgccgucgccaagugcaacgagaagcacgacgaggaguucugcgacaugcuccgccucuucgacuucaacaagcaggccauccgccgccucaagaccgaggcccagauguccauccagcucaucaacaaggccgucaacgcccucaucaacgaccagcucaucaugaagaaccaccuccgcgacaucaugggcauccccuacugcaacuacuccaaguacugguaccucaaccacaccgucaccggcaagaccucccucccccgcugcuggcucgucuccaacggcuccuaccucaacgagacccacuucuccgacgacaucgagcagcaggccgacaacaugaucaccgagcuccuccagaaggaguacaucgaccgccagggcaagaccccccucggccucgucgaccucuucgucuucuccaccuccuucuaccucaucuccaucuuccuccaccucgucaagauccccacccaccgccacgucgucggcaagcccugccccaagccccaccgccucaaccacaugggcaucugcuccugcggccucuacaagcaccccggcguccccgucaaguggaagcgcugaggacuagucccuguucccagagcccacuuuuuuuucuuuuuuugaaauaaaauagccugucuuucagaucuaaaaaaaaaaaaaaaaaaaaaaaaaaaaaaaaaaaaaaaaaaaaaaaaaaaaaaaaaaaaaaaaugcaucccccccccccccccccccccccccccccccaaaggcucuuuucagagccaccagaauu

SEQ ID NO: 2361 - RNA, 1749 nt, Artificial Sequence
  mRNA product Design a-1 comprising derived and/or modified sequence from LASV(Lassa virus/H.sapiens-wt/NGA/2015/ISTH_0543;Clade II)__AVO03639__GPC (opt2)
gggagagucccgcagucggcguccagcggcucugcuuguucgugugugugucguugcaggccuuauucaagcuuaccaugggccagaucaucaccuucuuccaggaggucccccacgucaucgaggaggucaugaacaucguccucaucgcccucucccuccucgccauccucaagggcaucuacaacgucgccaccugcggccucuucggccucgucuccuuccuccuccucugcggccgcuccugcuccaccaccuacaagggcgucuacgagcuccagacccucgagcucgacauggccaaccucaacaugaccaugccccucuccugcaccaagaacaacucccaccacuacaucauggucggcaacgagaccggccucgagcucacccucaccaacaccuccaucaucaaccacaaguucugcaaccucuccgacgcccacaagaagaaccucuacgaccacgcccucauguccaucaucuccaccuuccaccucuccauccccaacuucaaccaguacgaggccauguccugcgacuucaacggcggcaagaucuccguccaguacaaccucucccacaccuacgccgucgacgccgccaaccacugcggcaccaucgccaacggcguccuccagaccuucaugcgcauggccuggggcggcuccuacaucgcccucgacuccggcaagggcuccugggacugcaucaugaccuccuaccaguaccucgucauccagaacaccaccugggaggaccacugccaguucucccgccccucccccaucggcuaccucggccuccucucccagcgcacccgcgacaucuacaucucccgccgccuccucggcaccuucaccuggacccucuccgacuccgagggcaacgagacccccggcggcuacugccucacccgcuggaugcucaucgaggccgagcucaagugcuucggcaacaccgccgucgccaagugcaacgagaagcacgacgaggaguucugcgacaugcuccgccucuucgacuucaacaagcaggccauccgccgccucaagaccgaggcccagauguccauccagcucaucaacaaggccgucaacgcccucaucaacgaccagcucaucaugaagaaccaccuccgcgacaucaugggcauccccuacugcaacuacuccaaguacugguaccucaaccacaccgucaccggcaagaccucccucccccgcugcuggcucgucuccaacggcuccuaccucaacgagacccacuucuccgacgacaucgagcagcaggccgacaacaugaucaccgagcuccuccagaaggaguacaucgaccgccagggcaagaccccccucggccucgucgaccucuucgucuucuccaccuccuucuaccucaucuccaucuuccuccaccucgucaagauccccacccaccgccacaucaccggcaagcccugccccaagccccaccgccucaaccacaugggcaucugcuccugcggccucuacaagcaccccggcguccccgucaaguggaagcgcugaggacuagucccuguucccagagcccacuuuuuuuucuuuuuuugaaauaaaauagccugucuuucagaucuaaaaaaaaaaaaaaaaaaaaaaaaaaaaaaaaaaaaaaaaaaaaaaaaaaaaaaaaaaaaaaaaugcaucccccccccccccccccccccccccccccccaaaggcucuuuucagagccaccagaauu

SEQ ID NO: 2362 - RNA, 1749 nt, Artificial Sequence
  mRNA product Design a-1 comprising derived and/or modified sequence from LASV(Lassa virus/H.sapiens-wt/NGA/2016/ISTH_0009;Clade II)__AVO03571__GPC (opt2)
gggagagucccgcagucggcguccagcggcucugcuuguucgugugugugucguugcaggccuuauucaagcuuaccaugggccagaucaucaccuucuuccaggaggucccccacgucaucgaggaggucaugaacaucguccucaucgcccucucccuccucgccauccucaagggcaucuacaacgucgccaccugcggccuccucggccucgucuccuuccuccuccucugcggccgcuccugcuccaccaccuacaagggcgucuacgagcuccagacccucgagcucgacauggccucccucaacaugaccaugccccucuccugcaccaagaacaacucccaccacuacaucauggucggcaacgagaccggccucgagcucacccucaccaacaccuccaucaucaaccacaaguucugcaaccucuccgacgcccacaagaagaaccucuacgaccacgcccucauguccaucaucuccaccuuccaccucuccauccccaacuucaaccaguacgaggccauguccugcgacuucaacggcggccgcaucuccguccaguacaaccucucccacuccuacgccgucgacgccgccaaccacugcggcaccaucgccaacggcguccuccagaccuucaugcgcauggccuggggcggcuccuacaucgcccucgacuccggcaagggcuccugggacugcaucaugaccuccuaccaguaccucaucauccagaacaccaccugggaggaccacugccaguucucccgccccucccccaucggcuaccucggccuccucucccagcgcacccgcgacaucuacaucucccgccgccuccucggcaccuucaccuggacccucuccgacuccgagggcaacgagacccccggcggcuacugccucacccgcuggaugcucaucgaggccgagcucaagugcuucggcaacaccgccgucgccaagugcaacgagaagcacgacgaggaguucugcgacaugcuccgccucuucgacuucaacaagcaggccauccgccgccucaagaccgaggcccagauguccauccagcucaucaacaaggccgucaacgcccucaucaacgaccagcucaucaugaagaaccaccuccgcgacaucaugggcauccccuacugcaacuacuccaaguacugguaccucaaccacaccgucaccggcaagaccucccucccccgcugcuggcucgucuccaacggcuccuaccucaacgagacccacuucuccgacgacaucgagcagcaggccgacaacaugaucaccgagcuccuccagaaggaguacaucgaccgccagggcaagaccccccucggccucgucgaccucuucgucuucuccaccuccuucuaccucaucuccaucuuccuccaccucgucaagauccccacccaccgccacaucaccggcaagcccugccccaagccccaccgccucaaccacaugggcaucugcuccugcggccucuacaaccaccccggcguccccgucaaguggaagcgcugaggacuagucccuguucccagagcccacuuuuuuuucuuuuuuugaaauaaaauagccugucuuucagaucuaaaaaaaaaaaaaaaaaaaaaaaaaaaaaaaaaaaaaaaaaaaaaaaaaaaaaaaaaaaaaaaaugcaucccccccccccccccccccccccccccccccaaaggcucuuuucagagccaccagaauu

SEQ ID NO: 2363 - RNA, 1749 nt, Artificial Sequence
  mRNA product Design a-1 comprising derived and/or modified sequence from LASV(Lassa virus/H.sapiens-wt/NGA/2016/ISTH_0017;Clade II)__AVO03567__GPC (opt2)
gggagagucccgcagucggcguccagcggcucugcuuguucgugugugugucguugcaggccuuauucaagcuuaccaugggccagaucaucaccuucuuccaggaggucccccacgucaucgaggaggucaugaacaucguccucaucgcccucucccuccucgccauccucaagggcaucuacaacgucgccaccugcggccucuucggccucgucuccuuccuccuccucugcggccgcuccugcuccaccaccuacaagggcgucuacgagcuccagacccucgagcucgacauggccucccucaacaugaccaugccccucuccugcaccaagaacaacucccaccacuacaucauggucggcaacgagaccggccucgagcucacccucaccaacaccuccaucaucaaccacaaguucugcaaccucuccgacgcccacaagaagaaccucuacgaccacgcccucauguccaucaucuccaccuuccaccucuccauccccaacuucaaccaguacgaggccauguccugcgacuucaacggcggcaagaucuccguccaguacaaccucucccacaccuacgccaucgacgccgccaaccacugcggcaccaucgccaacggcguccuccagaccuucaugcgcauggccuggggcggcuccuacaucgcccucgacuccggcaagggcuccugggacugcaucaugaccuccuaccaguaccucaucauccagaacaccaccugggaggaccacugccaguucucccgccccucccccaucggcuaccucggccuccucucccagcgcacccgcgacaucuacaucucccgccgccuccucggcaccuucaccuggacccucuccgacuccgagggcaacgagacccccggcggcuacugccucacccgcuggaugcucaucgaggccgagcucaagugcuucggcaacaccgccgucgccaagugcaacgagaagcacgacgaggaguucugcgacaugcuccgccucuucgacuucaacaagcaggccauccgccgccucaagaccgaggcccagauguccauccagcucaucaacaaggccgucaacgcccucaucaacgaccagcucaucaugaagaaccaccuccgcgacaucaugggcauccccuacugcaacuacuccaaguacugguaccucaaccacaccgucaccggcaagaccucccucccccgcugcuggcucgucuccaacggcuccuaccucaacgagacccacuucuccgacgacaucgagcagcaggccgacaacaugaucaccgagcuccuccagaaggaguacauggaccgccagggcaagaccccccucggccucgucgaccucuucgucuucuccaccuccuucuaccucaucuccaucuuccuccaccucguccgcauccccacccaccgccacgucaucggcaagcccugccccaagccccaccgccucaaccacaugggcaucugcuccugcggccucuacaagcaccccggcguccccgucaaguggaagcgcugaggacuagucccuguucccagagcccacuuuuuuuucuuuuuuugaaauaaaauagccugucuuucagaucuaaaaaaaaaaaaaaaaaaaaaaaaaaaaaaaaaaaaaaaaaaaaaaaaaaaaaaaaaaaaaaaaugcaucccccccccccccccccccccccccccccccaaaggcucuuuucagagccaccagaauu

SEQ ID NO: 2364 - RNA, 1749 nt, Artificial Sequence
  mRNA product Design a-1 comprising derived and/or modified sequence from LASV(Lassa virus/H.sapiens-wt/NGA/2018/ISTH_0959;Clade II)__AVV65099__GPC (opt2)
gggagagucccgcagucggcguccagcggcucugcuuguucgugugugugucguugcaggccuuauucaagcuuaccaugggccagaucaucaccuucuuccaggaggucccccacgucaucgaggaggucaugaacaucguccucaucgcccucucccuccucgccauccucaagggcaucuacaacgucgucaccugcggccucuucggccucgucuccuuccuccuccucugcggccgcuccugcuccaccaccuacaagggcgucuacgagcuccagacccucgagcucgacauggccucccucaacaugaccaugccccucuccugcaccaagaacaacucccaccacuacaucauggucggcaacgagaccggccucgagcucacccucaccaacaccuccaucaucaaccacaaguucugcaaccucuccgacgcccacaagaagaaccucuacgaccacgcccucauguccaucaucuccaccuuccaccucuccauccccaacuucaaccaguacgaggccauguccugcgacuucaacggcggcaagaucuccguccaguacaaccucucccacgccuacgccaucgacgccgccaaccacugcggcaccaucgccaacggcguccuccagaccuucaugcgcauggccuggggcggcuccuacaucgcccucgacuccggcaagggcuccugggacugcaucaugaccuccuaccaguaccucaucauccagaacaccaccugggaggaccacugccaguucucccgccccucccccaucggcuaccucggccuccucucccagcgcacccgcgacaucuacaucucccgccgccuccucggcaccuucaccuggacccucuccgacuccgagggcaacgagacccccggcggcuacugccucacccgcuggaugcucaucgaggccgagcucaagugcuucggcaacaccgccgucgccaagugcaacgagaagcacgacgaggaguucugcgacaugcuccgccucuucgacuucaacaagcaggccauccgccgccucaagaccgaggcccagauguccauccagcucaucaacaaggccgucaacgcccucaucaacgaccagcucaucaugaagaaccaccuccgcgacaucaugggcauccccuacugcaacuacuccaaguacugguaccucaaccacaccgucaccggcaagaccucccucccccgcugcuggcucgucuccaacggcuccuaccucaacgagacccacuucuccgacgacaucgagcagcaggccgacaacaugaucaccgagcuccuccagaaggaguacaucgaccgccagggcaagaccccccucggccucgucgaccucuucgucuucuccaccuccuucuaccucaucuccaucuuccuccaccucgucaagauccccacccaccgccacgucaucggcaagcccugccccaagccccaccgccucaaccacaugggcaucugcuccugcggccucuacaagcaccccggcguccccgucaaguggaagcgcugaggacuagucccuguucccagagcccacuuuuuuuucuuuuuuugaaauaaaauagccugucuuucagaucuaaaaaaaaaaaaaaaaaaaaaaaaaaaaaaaaaaaaaaaaaaaaaaaaaaaaaaaaaaaaaaaaugcaucccccccccccccccccccccccccccccccaaaggcucuuuucagagccaccagaauu

SEQ ID NO: 2365 - RNA, 1749 nt, Artificial Sequence
  mRNA product Design a-1 comprising derived and/or modified sequence from LASV(LASV003-NIG-2008;Clade II)__AIT17580__GPC (opt2)
gggagagucccgcagucggcguccagcggcucugcuuguucgugugugugucguugcaggccuuauucaagcuuaccaugggccagaucaucaccuucuuccaggaggucccccacgucaucgaggaggucaugaacaucguccucaucgcccucucccuccucgccauccucaagggcaucuacaacgucgccaccugcggccucuucggccucgucuccuuccuccuccucugcggccgcuccugcuccaccaccuacaagggcgucuacgagcuccagacccucgagcucgacauggccucccucaacaugaccaugccccucuccugcaccaagaacaacucccaccacuacaucauggucggcaacgagaccggccucgagcucacccucaccaacaccuccaucaucaaccacaaguucugcaaccucuccgacgcccacaagaagaaccucuacgaccacgcccucauguccaucaucuccaccuuccaccucuccauccccaacuucaaccaguacgaggccauguccugcgacuucaacggcggcaagaucuccguccaguacaaccucucccacaccuacgccgucgacgccgccaaccacugcggcaccaucgccaacggcguccuccagaccuucaugcgcauggccuggggcggcuccuacaucgcccucgacuccggcaagggcuccugggacugcaucaugaccuccuaccaguaccucaucauccagaacaccaccugggaggaccacugccaguucucccgccccucccccaucggcuaccucggccuccucucccagcgcacccgcgacaucuacaucucccgccgccuccucggcaccuucaccuggacccucuccgacuccgaguccaacgagacccccggcggcuacugccucacccgcuggaugcucaucgaggccgagcucaagugcuucggcaacaccgccgucgccaagugcaacgagaagcacgacgaggaguucugcgacaugcuccgccucuucgacuucaacaagcaggccauccgccgccucaaggccgaggcccagauguccauccagcucaucaacaaggccgucaacgcccucaucaacgaccagcucaucaugaagaaccaccuccgcgacaucaugggcauccccuacugcaacuacuccaaguacugguaccucaaccacaccgucaccggccgcaccucccucccccgcugcuggcucgucuccaacggcuccuaccucaacgagacccacuucuccgacgacaucgagcagcaggccgacaacaugaucaccgagcuccuccagaaggaguacauggaccgccagggcaagaccccccucggccucgucgaccucuucgucuucuccaccuccuucuaccucaucuccaucuuccuccaccucgucaagauccccacccaccgccacgucaucggcaagcccugccccaagccccaccgccucaaccacaugggcaucugcuccugcggccucuacaagcaccccggcguccccgucaaguggaagcgcugaggacuagucccuguucccagagcccacuuuuuuuucuuuuuuugaaauaaaauagccugucuuucagaucuaaaaaaaaaaaaaaaaaaaaaaaaaaaaaaaaaaaaaaaaaaaaaaaaaaaaaaaaaaaaaaaaugcaucccccccccccccccccccccccccccccccaaaggcucuuuucagagccaccagaauu

SEQ ID NO: 2366 - RNA, 1749 nt, Artificial Sequence
  mRNA product Design a-1 comprising derived and/or modified sequence from LASV(LASV035-NIG-2009;Clade II)__AIT17588__GPC (opt2)
gggagagucccgcagucggcguccagcggcucugcuuguucgugugugugucguugcaggccuuauucaagcuuaccaugggccagaucaucaccuucuuccaggaggucccccacgucaucgaggaggucaugaacaucguccucaucgcccucucccuccucgccauccucaagggcaucuacaacgucgccaccugcggccucuucggccucgucuccuuccuccuccucugcggccgcuccugcuccaccaccuacaagggcgucuacgagcuccagacccucgagcucgacauggccucccucaacaugaccaugccccucuccugcaccaagaacaacucccaccacuacaucauggucggcaacgagaccggccucgagcucacccucaccaacaccuccaucaucaaccacaaguucugcaaccucuccgacgcccacaagaagaaccucuacgaccacgcccucauguccaucaucuccaccuuccaccucuccauccccaacuucaaccaguacgaggccauguccugcgacuucaacggcggcaagaucuccguccaguacaaccucucccacgccuacgccgucgacgccgccaaccacugcggcaccaucgccaacggcguccuccagaccuucaugcgcauggccuggggcggcuccuacaucgcccucgacuccggcaagggcuccugggacugcaucaugaccuccuaccaguaccucaucauccagaacaccaccugggaggaccacugccaguucucccgccccucccccaucggcuaccucggccuccucucccagcgcacccgcgacaucuacaucucccgccgccuccucggcaccuucaccuggacccucuccgacuccgagggcaacgagacccccggcggcuacugccucacccgcuggaugcucaucgaggccgagcucaagugcuucggcaacaccgccgucgccaagugcaacgagaagcacgacgaggaguucugcgacaugcuccgccucuucgacuucaacaagcaggccauccgccgccucaaggccgaggcccagauguccauccagcucaucaacaaggccgucaacgcccucaucaacgaccagcucaucaugaagaaccaccuccgcgacaucaugggcauccccuacugcaacuacuccaaguacugguaccucaaccacaccgucaccggcaagaccucccucccccgcugcuggcucgucuccaacggcuccuaccucaacgagacccacuucuccgacgacaucgagcagcaggccgacaacaugaucaccgagcuccuccagaaggaguacaucgaccgccagggcaagaccccccucggccucgucgaccucuucgucuucuccaccuccuucuaccucaucuccaucuuccuccaccucgucaagauccccacccaccgccacgucaucggcaagcccugccccaagccccaccgccucaaccacaugggcaucugcuccugcggccucuacaagcaccccggcguccccgucaaguggaagcgcugaggacuagucccuguucccagagcccacuuuuuuuucuuuuuuugaaauaaaauagccugucuuucagaucuaaaaaaaaaaaaaaaaaaaaaaaaaaaaaaaaaaaaaaaaaaaaaaaaaaaaaaaaaaaaaaaaugcaucccccccccccccccccccccccccccccccaaaggcucuuuucagagccaccagaauu

SEQ ID NO: 2367 - RNA, 1749 nt, Artificial Sequence
  mRNA product Design a-1 comprising derived and/or modified sequence from LASV(LASV1000-NIG-2009;Clade II)__AIT17782__GPC (opt2)
gggagagucccgcagucggcguccagcggcucugcuuguucgugugugugucguugcaggccuuauucaagcuuaccaugggccagaucaucaccuucuuccaggaggucccccacgucaucgaggaggucaugaacaucguccucaucgcccucucccuccucgccauccucaagggcaucuacaacgucgccaccugcggccucuucggccucgucuccuuccuccuccucugcggccgcuccugcuccaccaccuacaagggcgucuacgagcuccagacccucgagcucgacauggccucccucaacaugaccaugccccucuccugcaccaagaacaacucccaccacuacaucauggucggcaacgagaccggccucgagcucacccucaccaacaccuccaucaucaaccacaaguucugcaaccucuccgacgcccacaagaagaaccucuacgaccacgcccucauguccaucaucuccaccuuccaccucuccauccccaacuucaaccaguacgaggccauguccugcgacuucaacggcggcaagaucuccguccaguacaaccucucccacaccuacgccgucgacgccgccaaccacugcggcaccaucgccaacggcguccuccagaccuucaugcgcauggccuggggcggcuccuacaucgcccucgacuccggcaagggcuccugggacugcaucaugaccuccuaccaguaccucaucauccagaacaccaccugggaggaccacugccaguucucccgccccucccccaucggcuaccucggccuccucucccagcgcacccgcgacaucuacaucucccgccgccuccucggcaccuucaccuggacccucuccgacuccgagggcaacgagacccccggcggcuacugccucacccgcuggaugcucaucgaggccgagcucaagugcuucggcaacaccgccgucgccaagugcaacgagaagcacgacgaggaguucugcgacaugcuccgccucuucgacuucaacaagcaggccaucaagcgccucaagaccgaggcccagauguccauccagcucaucaacaaggccgucaacgcccucaucaacgaccagcucaucaugaagaaccaccuccgcgacaucaugggcauccccuacugcaacuacuccaaguacugguaccucaaccacaccgucaccggcaagaccucccucccccgcugcuggcucgucuccaacggcuccuaccucaacgagacccacuucuccgacgacaucgagcagcaggccgacaacaugaucaccgagcuccuccagaaggaguacaucgaccgccagggcaagaccccccucggccucgucgaccucuucgucuucuccaccuccuucuaccucaucuccaucuuccuccaccucgucaagauccccacccaccgccacgucgucggcaagcccugccccaagccccaccgccucaaccacaugggcaucugcuccugcggccucuacaagcaccccggcguccccgucaaguggaagcgcugaggacuagucccuguucccagagcccacuuuuuuuucuuuuuuugaaauaaaauagccugucuuucagaucuaaaaaaaaaaaaaaaaaaaaaaaaaaaaaaaaaaaaaaaaaaaaaaaaaaaaaaaaaaaaaaaaugcaucccccccccccccccccccccccccccccccaaaggcucuuuucagagccaccagaauu

SEQ ID NO: 2368 - RNA, 1749 nt, Artificial Sequence
  mRNA product Design a-1 comprising derived and/or modified sequence from LASV(LASV221-NIG-2010;Clade II)__AIT17624__GPC (opt2)
gggagagucccgcagucggcguccagcggcucugcuuguucgugugugugucguugcaggccuuauucaagcuuaccaugggccagaucaucaccuucuuccaggaggucccccacgucaucgaggaggucaugaacaucguccucaucgcccucucccuccucgccauccucaagggcaucuacaacgucgccaccugcggccucuucggccucgucuccuuccuccuccucugcggccgcuccugcuccaccaccuacaagggcgucuacgagcuccagacccucgagcucgacauggccucccucaacaugaccaugccccucuccugcaccaagaacaacucccaccacuacaucauggucggcaacgagaccggccucgagcucacccucaccaacaccuccaucaucaaccacaaguucugcaaccucuccgacgcccacaagaagaaccucuacgaccacgcccucauguccaucaucuccaccuuccaccucuccauccccaacuucaaccaguacgaggccauguccugcgacuucaacggcggcaagaucuccguccaguacaaccucucccacaccuacgccaucgacgccgccaaccacugcggcaccaucgccaacggcguccuccagaccuucaugcgcauggccuggggcggcuccuacaucgcccucgacuccggcaagggcuccugggacugcaucaugaccuccuaccaguaccucaucauccagaacaccaccugggaggaccacugccaguucucccgccccucccccaucggcuaccucggccuccucucccagcgcacccgcgacaucuacaucucccgccgccuccucggcaccuucaccuggacccucuccgacuccgagggcaacgagacccccggcggcuacugccucacccgcuggaugcucaucgaggccgagcucaagugcuucggcaacaccgccgucgccaagugcaacgagaagcacgacgaggaguucugcgacaugcuccgccucuucgacuucaacaagcaggccauccgccgccucaagaccgaggcccagauguccauccagcucaucaacaaggccgucaacgcccucaucaacgaccagcucaucaugaagaaccaccuccgcgacaucaugggcauccccuacugcaacuacuccaaguacugguaccucaaccacaccgucaccggcaagaccucccucccccgcugcuggcucgucuccaacggcuccuaccucaacgagacccacuucuccgacgacaucgagcagcaggccgacaacaugaucaccgagaugcuccagaaggaguacauggaccgccagggcaagaccccccucggccucgucgaccucuucgucuucuccaccuccuucuaccucaucuccaucuuccuccaccucgucaagauccccacccaccgccacgucaucggcaagcccugccccaagccccaccgccucaaccacaugggcaucugcuccugcggccucuacaagcaccccggcguccccgucaaguggaagcgcugaggacuagucccuguucccagagcccacuuuuuuuucuuuuuuugaaauaaaauagccugucuuucagaucuaaaaaaaaaaaaaaaaaaaaaaaaaaaaaaaaaaaaaaaaaaaaaaaaaaaaaaaaaaaaaaaaugcaucccccccccccccccccccccccccccccccaaaggcucuuuucagagccaccagaauu

SEQ ID NO: 2369 - RNA, 1749 nt, Artificial Sequence
  mRNA product Design a-1 comprising derived and/or modified sequence from LASV(LASV237-NIG-2010;Clade II)__AIT17638__GPC (opt2)
gggagagucccgcagucggcguccagcggcucugcuuguucgugugugugucguugcaggccuuauucaagcuuaccaugggccagaucaucaccuucuuccaggaggucccccacgucaucgaggaggucaugaacaucguccucaucgcccucucccuccucgccauccucaagggcaucuacaacgucgccaccugcggccucuucggccucgucuccuuccuccuccucugcggccgcuccugcuccaccaccuacaagggcgucuacgagcuccagacccucgagcucgacauggccucccucaacaugaccaugccccucuccugcaccaagaacaacucccaccacuacaucauggucggcaacgagaccggccucgagcucacccucaccaacaccuccaucaucaaccacaaguucugcaaccucuccgacgcccacaagaaggaccucuacgaccacgcccucauguccaucaucuccaccuuccaccucuccauccccaacuucaaccaguacgaggccauguccugcgacuucaacggcggcaagaucuccguccaguacaaccucucccacaccuacgccgucgacgccgccaaccacugcggcaccaucgccaacggcguccuccagaccuucaugcgcauggccuggggcggcuccuacaucgcccucgacuccggcaagggcuccugggacugcaucaugaccuccuaccaguaccucaucauccagaacaccaccugggaggaccacugccaguucucccgccccucccccaucggcuaccucggccuccucucccagcgcacccgcgacaucuacaucucccgccgccuccucggcaccuucaccuggacccucuccgacuccgagggcaacgagacccccggcggcuacugccucacccgcuggaugcucaucgaggccgagcucaagugcuucggcaacaccgccgucgccaagugcaacgagaagcacgacgaggaguucugcgacaugcuccgccucuucgacuucaacaagcaggccauccgccgccucaagaccgaggcccagauguccauccagcucaucaacaaggccgucaacgcccucaucaacgaccagcucaucaugaagaaccaccuccgcgacaucaugggcauccccuacugcaacuacuccaaguacugguaccucaaccacaccgucaccggcaagaccucccucccccgcugcuggcucgucuccaacggcuccuaccucaacgagacccacuucuccgacgacaucgagcagcaggccgacaacaugaucaccgagcuccuccagaaggaguacauggaccgccagggcaagaccccccucggccucgucgaccucuucgucuucuccaccuccuucuaccucaucuccaucuuccuccaccucaucaagauccccacccaccgccacaucaccggcaagcccugccccaagccccaccgccucaaccacaugggcaucugcuccugcggccucuacaagcaccccggcguccccgucaaguggaagcgcugaggacuagucccuguucccagagcccacuuuuuuuucuuuuuuugaaauaaaauagccugucuuucagaucuaaaaaaaaaaaaaaaaaaaaaaaaaaaaaaaaaaaaaaaaaaaaaaaaaaaaaaaaaaaaaaaaugcaucccccccccccccccccccccccccccccccaaaggcucuuuucagagccaccagaauu

SEQ ID NO: 2370 - RNA, 1749 nt, Artificial Sequence
  mRNA product Design a-1 comprising derived and/or modified sequence from LASV(LASV253-NIG-2011;Clade II)__AIT17670__GPC (opt2)
gggagagucccgcagucggcguccagcggcucugcuuguucgugugugugucguugcaggccuuauucaagcuuaccaugggccagaucaucaccuucuuccaggaggucccccacgucaucgaggaggucaugaacaucguccucaucgcccucucccuccucgccauccucaagggcaucuacaacgucgccaccugcggccucuucggccucgucuccuuccuccuccucugcggccgcuccugcuccaccaccuacaagggcgucuacgagcuccagacccucgagcucgacauggccucccucaacaugaccaugccccucuccugcaccaagaacaacucccaccacuacaucauggucggcaacgagaccggccucgagcucacccucaccaacaccuccaucaucaaccacaaguucugcaaccucuccgacgcccacaagaagaaccucuacgaccacgcccucauguccaucaucuccaccuuccaccucuccauccccaacuucaaccaguacgaggccauguccugcgacuucaacggcggcaagaucuccguccaguacaaccucucccacaccuacgccgucgacgccgccaaccacugcggcaccaucgccaacggcguccuccagaccuucaugcgcauggccuggggcggcuccuacaucgcccucgacuccggcaagggcuccugggacugcaucaugaccuccuaccaguaccucaucauccagaacaccaccugggaggaccacugccaguucucccgccccucccccaucggcuaccucggccuccucucccagcgcacccgcgacaucuacaucucccgccgccuccucggcaccuucaccuggacccucuccgacuccgagggcaacgagacccccggcggcuacugccucacccgcuggaugcucaucgaggccgagcucaagugcuucggcaacaccgccgucgccaagugcaacgagaagcacgacgaggaguucugcgacaugcuccgccucuucgacuucaacaagcaggccauccgccgccucaaggccgaggcccagauguccauccagcucaucaacaaggccgucaacgcccucaucaacgaccagcucaucaugaagaaccaccuccgcgacaucaugggcauccccuacugcaacuacuccaaguacugguaccucaaccacaccgucaccggccgcaccucccucccccgcugcuggcucgucuccaacggcuccuaccucaacgagacccacuucuccgacgacaucgagcagcaggccgacaacaugaucaccgagcuccuccagaaggaguacaucgaccgccagggcaagaccccccucggccucgucgaccucuucgucuucuccaccuccuucuaccucaucuccaucuuccuccaccucgucaagauccccacccaccgccacaucaucggcaagcccugccccaagccccaccgccucaaccacaugggcaucugcuccugcggccucuacaagcaccccggcguccccgucaaguggaagcgcugaggacuagucccuguucccagagcccacuuuuuuuucuuuuuuugaaauaaaauagccugucuuucagaucuaaaaaaaaaaaaaaaaaaaaaaaaaaaaaaaaaaaaaaaaaaaaaaaaaaaaaaaaaaaaaaaaugcaucccccccccccccccccccccccccccccccaaaggcucuuuucagagccaccagaauu

SEQ ID NO: 2371 - RNA, 1749 nt, Artificial Sequence
  mRNA product Design a-1 comprising derived and/or modified sequence from LASV(LASV254-NIG-2011;Clade II)__AIT17674__GPC (opt2)
gggagagucccgcagucggcguccagcggcucugcuuguucgugugugugucguugcaggccuuauucaagcuuaccaugggccagaucaucaccuucuuccaggaggucccccacgucaucgaggaggucaugaacaucguccucaucgcccucucccuccucgccauccucaagggcaucuacaacgucgccaccugcggccucuucggccucgucuccuuccuccuccucugcggccgcuccugcuccaccaccuacaagggcgucuacgagcuccagacccucgagcucgacaugaccaaccucaacaugaccaugccccucuccugcaccaagaacaacucccaccacuacaucauggucggcaacgagaccggccucgagcucacccucaccaacaccuccaucaucaaccacaaguucugcaaccucuccgacgcccacaagaagaaccucuacaaccacgcccucauguccaucaucuccaccuuccaccucuccauccccaacuucaaccaguacgaggccauguccugcgacuucaacggcggcaagaucuccguccaguacaaccucucccacuccuacgccgucgacgccgccaaccacugcggcaccaucgccaacggcguccuccagaccuucaugcgcauggccuggggcggcuccuacaucgcccucgacuccggcaagggcaacugggacugcaucaugaccuccuaccaguaccucaucauccagaacaccaccugggaggaccacugccaguucucccgccccucccccaucggcuaccucggccuccucucccagcgcacccgcgacaucuacaucucccgccgccuccucggcaccuucaccuggacccucuccgacuccgagggcaacgagacccccggcggcuacugccucacccgcuggaugcucaucgaggccgagcucaagugcuucggcaacaccgccgucgccaagugcaacgagaagcacgacgaggaguucugcgacaugcuccgccucuucgacuucaacaagcaggccauccgccgccucaagaccgaggcccaggccaacauccagcucaucaacaaggccgucaacgcccucaucaacgaccagcucaucaugaagaaccaccuccgcgacaucaugggcauccccuacugcaacuacuccaaguacugguaccucaaccacaccgucaccggcaagaccucccucccccgcugcuggcucgucuccaacggcuccuaccucaacgagacccacuucuccgacgacaucgagcagcaggccgacaacaugaucaccgagcuccuccagaaggaguacauggaccgccagggcaagaccccccucggccucgucgaccucuucgucuucuccaccuccuucuaccucaucuccaucuuccuccaccucgucaagauccccacccaccgccacgucaucggcaagcccugccccaagccccaccgccucaaccacaugggcaucugcuccugcggccucuacaagcaccccggcguccccgucaaguggaagcgcugaggacuagucccuguucccagagcccacuuuuuuuucuuuuuuugaaauaaaauagccugucuuucagaucuaaaaaaaaaaaaaaaaaaaaaaaaaaaaaaaaaaaaaaaaaaaaaaaaaaaaaaaaaaaaaaaaugcaucccccccccccccccccccccccccccccccaaaggcucuuuucagagccaccagaauu

SEQ ID NO: 2372 - RNA, 1749 nt, Artificial Sequence
  mRNA product Design a-1 comprising derived and/or modified sequence from LASV(Nig08-A19;Clade III)__ADU56618__GPC (opt2)
gggagagucccgcagucggcguccagcggcucugcuuguucgugugugugucguugcaggccuuauucaagcuuaccaugggccagaucgucaccuucuuccaggaggucccccacgucaucgaggaggucaugaacaucguccucaucgcccucuccauccucgccauccucaagggccucuacaacaucgccaccugcggccucaucggccucgucaccuuccuccuccucuccggccgcuccugcuccaugaccuacaagggcgucuacgagcuccagacccucgagcucaacaugaacacccucaacaugaccaugccccucuccugcaccaagaacaacucccaccacuacaucauggucggcaacgagaccggccucgagcucacccucaccaacaccucccuccuccaccacaaguucugcaaccucuccgacgcccacaagaagaaccucuacgaccacacccucauguccaucaucuccaccuuccaccucuccauccccaacuucaaccaguacgaggccauguccugcgacuucaacggcggcaagaucaccguccaguacaaccucucccacuccuacgccaucgacgccgccaaccacugcggcaccgucgccaacggcguccuccagaccuucaugcgcauggccuggggcggcuccuacaucgcccucgacuccggccgcggcaagugggacugcaucaugaccuccuaccaguaccucaucauccagaacaccaccugggaggaccacugccaguucucccgccccucccccaucggcuaccucggccuccucucccagcgcacccgcgacaucuacaucucccgccgccuccucggcaccuucaccuggacccucuccgacuccgagggcaacgagacccccggcggcuacugccucacccgcuggaugcucaucgaggccgagcucaagugcuucggcaacaccgccgucgccaagugcaacgagaagcacgacgaggaguucugcgacaugcuccgccucuucgacuucaacaagcaggccauccgccgccucaaggccgaggcccagauguccauccagcucaucaacaaggccgucaacgcccucaucaacgaccagcucaucaugaagaaccaccuccgcgacaucaugggcauccccuacugcaacuacuccaaguacugguaccucaaccacaccuccaccggccgcaccucccucccccgcugcuggcucgucuccaacggcuccuaccucaacgagacccacuucuccgacgacaucgagcagcaggccgacaacaugaucaccgagaugcuccagaaggaguaccucgaccgccagggcaagaccccccucggccucgucgaccucuucgucuucuccaccuccuucuaccucaucuccaucuuccuccaccucgucaagauccccacccaccgccacaucgucggcaagcccugccccaagccccaccgccucaaccacaugggcaucugcuccugcggccucuacaagcagcccggcguccccguccgcuggaagcgcugaggacuagucccuguucccagagcccacuuuuuuuucuuuuuuugaaauaaaauagccugucuuucagaucuaaaaaaaaaaaaaaaaaaaaaaaaaaaaaaaaaaaaaaaaaaaaaaaaaaaaaaaaaaaaaaaaugcaucccccccccccccccccccccccccccccccaaaggcucuuuucagagccaccagaauu

SEQ ID NO: 2373 - RNA, 1752 nt, Artificial Sequence
  mRNA product Design a-1 comprising derived and/or modified sequence from LASV(G1180-SLE-2010;Clade IV)__AIT17168__GPC (opt2)
gggagagucccgcagucggcguccagcggcucugcuuguucgugugugugucguugcaggccuuauucaagcuuaccaugggccagaucgucaccuucuuccaggaggucccccacgucaucgaggaggucaugaacaucguccucaucgcccucuccauccucgccguccucaagggccucuacaacuucgccaccugcggccucgucggccuccucaccuuccuccuccucugcggccgcuccugcaccgccucccgcuacaagggcgucuacgagcuccagacccucgagcucaacauggagacccucaacaugaccaugccccucuccugcaccaagaacaacucccaccacuacaucauggucggcaacgagaccggccucgagcucacccucaccaacaccuccaucaucaaccacaaguucugcaaccucuccgacgcccacaagaagaaccucuacgaccacgcccucauguccaucaucuccaccuuccaccucuccauccccaacuucaaccaguacgaggccauguccugcgacuucaacggcggcaagaucuccguccaguacaaccucucccacuccuacgccggcgacgccgccaaccacugcggcaccgucgccaacggcguccuccagaccuucaugcgcauggccuggggcggcuccuacaucgcccucgacuccggccacggcuccugggacugcaucaugaccuccuaccaguaccucaucauccagaacaccaccugggaggaccacugccaguucucccgccccucccccaucggcuaccucggccuccucucccagcgcacccgcgacaucuacaucucccgccgccuccucggcaccuucaccuggacccucuccgacuccgagggcaaggacacccccggcggcuacugccucacccgcuggaugcucaucgaggccgagcucaagugcuucggcaacaccgccgucgccaagugcaacgagaagcacgacgaggaguucugcgacaugcuccgccucuucgacuucaacaagcaggccauccagcgccucaaggccgaggcccagauguccauccagcucaucaacaaggccgucaacgcccucaucaacgaccagcucaucaugaagaaccaccuccgcgacaucaugggcauccccuacugcaacuacuccaaguacugguaccucaaccacaccaccaccggcaagaccucccuccccaagugcuggcucgucuccaacggcuccuaccucaacgagacccacuucuccgacgacaucgagcagcaggccgacaacaugaucaccgagaugcuccagaaggaguacauggagcgccagggcaagaccccccucggccucgucgaccucuucgucuucuccaccuccuucuaccucaucuccaucuuccuccaccucgucaagauccccacccaccgccacaucgucggcaaguccugccccaagccccaccgccucaaccacaugggcaucugcuccugcggccucuacaagcagcccggcguccccgucaaguggaagcgcugaggacuagucccuguucccagagcccacuuuuuuuucuuuuuuugaaauaaaauagccugucuuucagaucuaaaaaaaaaaaaaaaaaaaaaaaaaaaaaaaaaaaaaaaaaaaaaaaaaaaaaaaaaaaaaaaaugcaucccccccccccccccccccccccccccccccaaaggcucuuuucagagccaccagaauu

SEQ ID NO: 2374 - RNA, 1752 nt, Artificial Sequence
  mRNA product Design a-1 comprising derived and/or modified sequence from LASV(G1442-SLE-2011;Clade IV)__AIT17180__GPC (opt2)
gggagagucccgcagucggcguccagcggcucugcuuguucgugugugugucguugcaggccuuauucaagcuuaccaugggccagaucgucaccuucuuccaggaggucccccacgucaucgaggaggucaugaacaucguccucaucgcccucuccauccucgccguccucaagggccucuacaacgucgccaccugcggccucaucggccucgucaccuuccuccuccucugcggccgcuccugcaccaccacccucuacaagggcgucuacgagcuccagacccucgagcucaacauggagacccucaacaugaccaugccccucuccugcaccaagaacaacucccaccacuacauccgcgucggcaacgagaccggccucgagcucacccucaccaacaccuccaucaucaaccacaaguucugcaaccucuccgacgcccacaagaagaaccucuacgaccacgcccucauguccaucaucuccaccuuccaccucuccauccccaacuucaaccaguacgaggccauguccugcgacuucaacggcggcaagaucuccguccaguacaaccucucccacuccuacgccggcgacgccgccaaccacugcggcaccgucgccaacggcguccuccagaccuucaugcgcauggccuggggcggcuccuacaucgcccucgacuccggccgcggcaacugggacugcaucaugaccuccuaccaguaccucaucauccagaacaccaccugggacgaccacugccaguucucccgccccucccccaucggcuaccucggccuccucucccagcgcacccgcgacgucuacaucucccgccgccuccucggcaccuucaccuggacccucuccgacuccgagggcaaggacacccccggcggcuacugccucacccgcuggaugcucaucgaggccgagcucaagugcuucggcaacaccgccgucgccaagugcaacgagaagcacgacgaggaguucugcgacaugcuccgccucuucgacuucaacaagcaggccauccagcgccucaaggccgaggcccagauguccauccagcucaucaacaaggccgucaacgcccucaucaacgaccagcucaucaugaagaaccaccuccgcgacaucaugggcauccccuacugcaacuacuccaaguacugguaccucaacaacaccgccaccggcaagaccucccuccccaagugcuggcucaucuccaacggcuccuaccucaacgagacccacuucuccgacgacaucgagcaggaggccgacaacaugaucaccgagaugcuccagaaggaguacauggagcgccagggcaagaccccccucggccucgucgaccucuucgucuucuccaccuccuucuaccucaucuccaucuuccuccaccucgucaagauccccacccaccgccacaucgucggcaaguccugccccaagccccaccgccucaaccacaugggcaucugcuccugcggccucuacaagcagcccggcguccccguccgcuggaagcgcugaggacuagucccuguucccagagcccacuuuuuuuucuuuuuuugaaauaaaauagccugucuuucagaucuaaaaaaaaaaaaaaaaaaaaaaaaaaaaaaaaaaaaaaaaaaaaaaaaaaaaaaaaaaaaaaaaugcaucccccccccccccccccccccccccccccccaaaggcucuuuucagagccaccagaauu

SEQ ID NO: 2375 - RNA, 1752 nt, Artificial Sequence
  mRNA product Design a-1 comprising derived and/or modified sequence from LASV(G3010-SLE-2013;Clade IV)__AIT17344__GPC (opt2)
gggagagucccgcagucggcguccagcggcucugcuuguucgugugugugucguugcaggccuuauucaagcuuaccaugggccagaucgucaccuucuuccaggaggucccccacgucaucgaggaggucaugaacaucguccucaucgcccucuccauccucgccguccucaagggccucuacaacuucgccaccugcggccucgucggccucgucaccuuccuccuccucugcggccgcuccugcaccaccucccucuacaagggcgucuacgagcuccagacccucgagcucaacauggagacccucaacaugaccaugccccucuccugcaccaagaacaacucccaccacuacaucauggucggcaacgagaccggccucgagcucacccucaccaacaccuccaucaucaaccacaaguucugcaaccucuccgacgcccacaagaagaaccucuacaaccacgcccucauguccaucaucuccaccuuccaccucuccauccccaacuucaaccaguacgaggccauguccugcgacuucaacggcggcaagaucuccguccaguacaaccucucccacuccuacgccggcgacgccgccucccacugcggcaccgucgccaacggcguccuccagaccuucaugcgcauggccuggggcggcuccuacaucgcccucgacuccggcuacggcaagugggacugcaucaugaccuccuaccaguaccucaucauccagaacaccaccugggaggaccacugccaguucucccgccccucccccaucggcuaccucggccuccucucccagcgcacccgcgacaucuacaucucccgccgccuccucggcaccuucaccuggacccucuccgacuccgagggcaaggacacccccggcggcuacugccucacccgcuggaugcucaucgaggccgagcucaagugcuucggcaacaccgccgucgccaagugcaacgagaagcacgacgaggaguucugcgacaugcuccgccucuucgacuucaacaagcaggccauccagcgccucaagaccgaggcccagauguccauccagcucaucaacaaggccgucaacgcccucaucaacgaccagcucaucaugaagaaccaccuccgcgacaucaugggcauccccuacugcaacuacuccaaguacugguaccucaaccacaccaccaccggcaagaccucccuccccaagugcuggcucgucuccaacggcuccuaccucaacgagacccacuucuccgacgacaucgagcagcaggccgacaacaugaucaccgagaugcuccagaaggaguacauggagcgccagggcaagaccccccucggccucgucgaccucuucgucuucuccaccuccuucuaccucaucuccaucuuccuccaccucgucaagauccccacccaccgccacaucgucggcaaguccugccccaagccccaccgccucaaccacaugggcaucugcuccugcggccucuacaagcagcccggcguccccguccgcuggaagcgcugaggacuagucccuguucccagagcccacuuuuuuuucuuuuuuugaaauaaaauagccugucuuucagaucuaaaaaaaaaaaaaaaaaaaaaaaaaaaaaaaaaaaaaaaaaaaaaaaaaaaaaaaaaaaaaaaaugcaucccccccccccccccccccccccccccccccaaaggcucuuuucagagccaccagaauu

SEQ ID NO: 2376 - RNA, 1752 nt, Artificial Sequence
  mRNA product Design a-1 comprising derived and/or modified sequence from LASV(G502-SLE-2009;Clade IV)__AIT17126__GPC (opt2)
gggagagucccgcagucggcguccagcggcucugcuuguucgugugugugucguugcaggccuuauucaagcuuaccaugggccagaucgucaccuucuuccaggaggucccccacgucaucgaggaggucaugaacaucguccucaucgcccucuccauccucgccguccucaagggccucuacaacuucgccaccugcggccucgucggccuccucaccuuccuccuccucugcggccgcuccugcaccaccggccucuacaagggcgucuacgagcuccagacccucgagcucaacauggagacccucaacaugaccaugccccucuccugcaccaagaacaacucccaccacuacaucauggucggcaacgagaccggccucgagcucacccucaccaacaccuccaucaucaaccacaaguucugcaaccucuccgacgcccacaagaagaaccucuacgaccacgcccucauguccaucaucuccaccuuccaccucuccauccccaacuucaaccaguacgaggccauguccugcgacuucaacggcggcaagaucuccguccaguacaaccucucccacuccuacgccggcgacgccgccgaccacugcggcaccgucgccaacggcguccuccagaccuucaugcgcauggccuggggcggcuccuacaucgcccucgacuccggccgcggccgcugggacugcaucaugaccuccuaccaguaccucaucauccagaacaccaccugggaggaccacugccaguucucccgccccucccccaucggcuaccucggccuccucucccagcgcacccgcgacaucuacaucucccgccgccuccucggcaccuucaccuggacccucuccgacuccgagggcaaggacacccccggcggcuacugccucacccgcuggaugcucaucgaggccgagcucaagugcuucggcaacaccgccgucgccaagugcaacgagaagcacgacgaggaguucugcgacaugcuccgccucuucgacuucaacaagcaggccauccagcgccucaaggccgaggcccagauguccauccagcucaucaacaaggccgucaacgcccucaucaacgaccagcucgucaugaagaaccaccuccgcgacaucaugggcauccccuacugcaacuacucccgcuacugguaccucaaccacaccaccaccggccgcaccucccuccccaagugcuggcucgucuccaacggcuccuaccucaacgagacccacuucuccgacgacaucgagcagcaggccgacaacaugaucaccgagaugcuccagaaggaguacauggagcgccagggcaagaccccccucggccucgucgaccucuucgucuucuccaccuccuucuaccucaucuccaucuuccuccaccucgucaagauccccacccaccgccacaucgucggcaaguccugccccaagccccaccgccucaaccacaugggcaucugcuccugcggccucuacaagcagcccggcguccccgucaaguggaagcgcugaggacuagucccuguucccagagcccacuuuuuuuucuuuuuuugaaauaaaauagccugucuuucagaucuaaaaaaaaaaaaaaaaaaaaaaaaaaaaaaaaaaaaaaaaaaaaaaaaaaaaaaaaaaaaaaaaugcaucccccccccccccccccccccccccccccccaaaggcucuuuucagagccaccagaauu

SEQ ID NO: 2377 - RNA, 1752 nt, Artificial Sequence
  mRNA product Design a-1 comprising derived and/or modified sequence from LASV(G733-SLE-2010;Clade IV)__AIT17154__GPC (opt2)
gggagagucccgcagucggcguccagcggcucugcuuguucgugugugugucguugcaggccuuauucaagcuuaccaugggccagaucgucaccuucuuccaggaggucccccacgucaucgaggaggucaugaacaucguccucaucgcccucuccauccucgccguccucaagggccucuacaacuucgccaccugcggcaucgucggccucgucuccuuccuccuccucugcggccgcuccugcaccaccucccucuacaagggcgucuacgagcuccagacccucgagcucaacauggagacccucaacaugaccaugccccucuccugcaccaagaacaacucccaccacuacaucauggucggcaacgagaccggccucgagcucacccucaccaacaccuccaucaucaaccacaaguucugcaaccucuccgacgcccacaagaagaaccucuacgaccacgcccucauguccaucaucuccaccuuccaccucuccauccccaacuucaaccaguacgaggccauguccugcgacuucaacggcggcaagaucuccguccaguacaaccucucccacuccuacgccggcgacgccgccaaccacugcggcaccaucgccaacggcguccuccagaccuucaugcgcauggccuggggcggcuccuacaucgcccucgacuccggccgcgaccgcugggacugcaucaugaccuccuaccaguaccucaucauccagaacaccaccugggaggaccacugccaguucucccgccccucccccaucggcuaccucggccuccucucccagcgcacccgcgacaucuacaucucccgccgccuccucggcaccuucaccuggacccucuccgacuccgagggcaaggacacccccggcggcuacugccucacccgcuggaugcucaucgaggccgagcucaagugcuucggcaacaccgccgucgccaagugcaacgagaagcacgacgaggaguucugcgacaugcuccgccucuucgacuucaacaagcaggccauccagcgccucaaggccgaggcccagauguccauccagcucaucaacaaggccgucaacgcccucaucaacgaccagcucaucaugaagaaccaccuccgcgacaucaugggcauccccuacugcaacuacuccaaguacugguaccucaaccacaccaccaccggcaagaccucccuccccaagugcuggcucgucuccaacggcuccuaccucaacgagacccacuucuccgacgacaucgagcagcaggccgacaacaugaucaccgagaugcuccagaaggaguacauggagcgccagggcaagaccccccucggccucgucgaccucuucgucuucuccaccuccuucuaccucaucuccaucuuccuccaccucgucaagauccccacccaccgccacgucgucggcaaguccugccccaagccccaccgccucaaccacaugggcaucugcuccugcggccucuacggccagcccggcguccccgucaaguggaagcgcugaggacuagucccuguucccagagcccacuuuuuuuucuuuuuuugaaauaaaauagccugucuuucagaucuaaaaaaaaaaaaaaaaaaaaaaaaaaaaaaaaaaaaaaaaaaaaaaaaaaaaaaaaaaaaaaaaugcaucccccccccccccccccccccccccccccccaaaggcucuuuucagagccaccagaauu

SEQ ID NO: 2378 - RNA, 1752 nt, Artificial Sequence
  mRNA product Design a-1 comprising derived and/or modified sequence from MOPV/LASV reassortant(IGS-1;Clade IV)__AFY05576__GPC (opt2)
gggagagucccgcagucggcguccagcggcucugcuuguucgugugugugucguugcaggccuuauucaagcuuaccaugggccagaucgucaccuucuuccaggaggucccccacgucaucgaggaggucaugaacaucguccucaucgcccucuccguccucgccguccucaagggccucuacaacuucgccaccugcggccucgucggccucgucaccuuccuccuccucugcggccgcuccugcaccaccucccucuacaagggcgucuacgagcuccagacccucgagcucaacauggagacccucaacaugaccaugccccucuccugcaccaagaacaacucccaccacuacaucauggucggcaacgagaccggccucgagcucacccucaccaacaccuccaucaucaaccacaaguucugcaaccucuccgacgcccacaagaagaaccucuacgaccacgcccucauguccaucaucuccaccuuccaccucuccauccccaacuucaaccaguacgaggccauguccugcgacuucaacggcggcaagaucuccguccaguacaaccucucccacuccuacgccggcgacgccgccaaccacugcggcaccgucgccaacggcguccuccagaccuucaugcgcauggccuggggcggcuccuacaucgcccucgacuccggccgcggcaacugggacugcaucaugaccuccuaccaguaccucaucauccagaacaccaccugggaggaccacugccaguucucccgccccucccccaucggcuaccucggccuccucucccagcgcacccgcgacaucuacaucucccgccgccuccucggcaccuucaccuggacccucuccgacuccgagggcgaggacacccccggcggcuacugccucacccgcuggaugcucaucgaggccgagcucaagugcuucggcaacaccgccgucgccaagugcaacgagaagcacgacgaggaguucugcgacaugcuccgccucuucgacuucaacaagcaggccauccagcgccucaaggccgaggcccagauguccauccagcucaucaacaaggccgucaacgcccucaucaacgaccagcucaucaugaagaaccaccuccgcgacaucaugggcauccccuacugcaacuacuccaaguacugguaccucaaccacaccaccaccggccgcaccucccuccccaagugcuggcucgucuccaacggcuccuaccucaacgagacccacuucuccgacgacaucgagcagcaggccgacaacaugaucaccgagaugcuccagaaggaguacauggagcgccagggcaagaccccccucggccucgucgaccucuucgucuucuccaccuccuucuaccucaucuccaucuuccuccaccucgucaagauccccacccaccgccacaucgucggcaaguccugccccaagccccaccgccucaaccacaugggcaucugcuccugcggccucuacaagcagcccggcguccccgucaaguggaagcgcugaggacuagucccuguucccagagcccacuuuuuuuucuuuuuuugaaauaaaauagccugucuuucagaucuaaaaaaaaaaaaaaaaaaaaaaaaaaaaaaaaaaaaaaaaaaaaaaaaaaaaaaaaaaaaaaaaugcaucccccccccccccccccccccccccccccccaaaggcucuuuucagagccaccagaauu

SEQ ID NO: 2379 - RNA, 1752 nt, Artificial Sequence
  mRNA product Design a-1 comprising derived and/or modified sequence from LASV(LM765-SLE-2012;Clade IV)__AIT17814__GPC (opt2)
gggagagucccgcagucggcguccagcggcucugcuuguucgugugugugucguugcaggccuuauucaagcuuaccaugggccagaucgucaccuucuuccaggaggucccccacgucaucgaggaggucaugaacaucguccucaucgcccucuccauccucgccguccucaagggccucuacaacuucgccaccugcggccucgucggccucgucaccuuccuccuccucugcggccgcuccugcaccaccucccucuacaagggcgucuacgagcuccagacccucgagcucaacauggagacccucaacaugaccaugccccucuccugcaccaagaacaacucccaccacuacaucauggucggcaacgagaccggccucgagcucacccucaccaacaccuccaucaucgaccacaaguucugcaaccucuccgacgcccaccgcaagaaccucuacgaccacgcccucauguccaucaucuccaccuuccaccucuccauccccaacuucaaccaguacgaggccauguccugcgacuucaacggcggcaagaucuccguccaguacaaccucucccacuccuacgccaaggacgccgccgaccacugcggcaccgucgccaacggcguccuccagaccuucaugcgcauggccuggggcggcuccuacaucgcccucgacuccggccgcggccgcugggacugcaucaugaccuccuaccaguaccucaucauccagaacaccaccugggaggaccacugccaguucucccgccccucccccaucggcuaccucggccuccucucccagcgcacccgcgacaucuacaucucccgccgccuccucggcaccuucaccuggacccucuccgacuccgagggcaaggacacccccggcggcuacugccucacccgcuggaugcucaucgaggccgagcucaagugcuucggcaacaccgccgucgccaagugcaacgagaagcacgacgaggaguucugcgacaugcuccgccucuucgacuucaacaagcaggccauccagcgccucaaggccgaggcccagauguccauccagcucaucaacaaggccgucaacgcccucaucaacgaccagcucaucaugaagaaccaccuccgcgacaucaugggcauccccuacugcaacuacuccaaguacugguaccucaaccacaccaccaccggcaagaccucccuccccaagugcuggcucgucuccaacggcuccuaccucaacgagacccacuucuccgacgacaucgagcagcaggccgacaacaugaucaccgagaugcuccagaaggaguacauggagcgccagggcaagaccccccucggccucgucgaccucuucgucuucuccaccuccuucuaccucaucuccaucuuccuccaccucgucaagauccccacccaccgccacaucgucggcaagcccugccccaagccccaccgccucaaccacaugggcaucugcuccugcggccucuacaagcagcccggcguccccgucaaguggaagcgcugaggacuagucccuguucccagagcccacuuuuuuuucuuuuuuugaaauaaaauagccugucuuucagaucuaaaaaaaaaaaaaaaaaaaaaaaaaaaaaaaaaaaaaaaaaaaaaaaaaaaaaaaaaaaaaaaaugcaucccccccccccccccccccccccccccccccaaaggcucuuuucagagccaccagaauu

SEQ ID NO: 2380 - RNA, 1752 nt, Artificial Sequence
  mRNA product Design a-1 comprising derived and/or modified sequence from LASV(LM776-SLE-2012;Clade IV)__AIT17824__GPC (opt2)
gggagagucccgcagucggcguccagcggcucugcuuguucgugugugugucguugcaggccuuauucaagcuuaccaugggccagaucgucaccuucuuccaggaggucccccacgucaucgaggaggucaugaacaucguccucaucgcccucuccauccucgccguccucaagggccucuacaacuucgccaccugcggccucgucggccucgucaccuuccuccuccucugcggccgcuccugcaccaccuccgucuacaagggcgucuacgagcuccagacccucgagcucaacauggagacccucaacaugaccaugccccucuccugcaccaagaacaacucccaccacuacaucauggucggcaacgagaccggccucgagcucacccucaccaacaccuccaucaucaaccacaaguucugcaaccucuccgacgcccacaagaagaaccucuacgaccacgcccucauguccaucaucuccaccuuccaccucuccauccccaacuucaaccaguacgaggccauguccugcgacuucaacggcggcaagaucuccguccaguacaaccucucccacuccuacgccggcgacgccgccaaccacugcggcaccgucgccaacggcguccuccagaccuucaugcgcauggccuggggcggcuccuacaucgcccucgacuccggccacggcaagugggacugcaucaugaccuccuaccaguaccucaucauccagaacaccaccugggaggaccacugccaguucucccgccccucccccaucggcuaccucggccuccucucccagcgcacccgcgacaucuacaucucccgccgccuccucggcaccuucaccuggacccucuccgacuccgagggcaaggacacccccggcggcuacugccucacccgcuggaugcucaucgaggccgagcucaagugcuucggcaacaccgccgucgccaagugcaacgagaagcacgacgaggaguucugcgacaugcuccgccucuucgacuucaacaagcaggccauccagcgccucaaggccgaggcccagauguccauccagcucaucaacaaggccgucaacgcccucaucaacgaccagcucaucaugaagaaccaccuccgcgacaucaugggcauccccuacugcaacuacuccaaguacugguaccucaaccacaccaccaccggcaagaccucccuccccaagugcuggcucgucuccaacggcuccuaccucaacgagacccacuucuccgacgacaucgagcagcaggccgacaacaugaucaccgagaugcuccagaaggaguacauggagcgccagggcaagaccccccucggccucgucgaccucuucgucuucuccaccuccuucuaccucaucuccaucuuccuccaccucgucaagauccccacccaccgccacaucgucggcaaguccugccccaagccccaccgccucaaccacaugggcaucugcuccugcggccucuacaagcagcccggcguccccguccgcuggaagcgcugaggacuagucccuguucccagagcccacuuuuuuuucuuuuuuugaaauaaaauagccugucuuucagaucuaaaaaaaaaaaaaaaaaaaaaaaaaaaaaaaaaaaaaaaaaaaaaaaaaaaaaaaaaaaaaaaaugcaucccccccccccccccccccccccccccccccaaaggcucuuuucagagccaccagaauu

SEQ ID NO: 2381 - RNA, 1752 nt, Artificial Sequence
  mRNA product Design a-1 comprising derived and/or modified sequence from LASV(Mad39;Clade IV)__ANH09722__GPC (opt2)
gggagagucccgcagucggcguccagcggcucugcuuguucgugugugugucguugcaggccuuauucaagcuuaccaugggccagaucgucaccuucuuccaggaggucccccacgucaucgaggaggucaugaacaucguccucaucgcccucuccauccucgccguccucaagggccucuacaacgucgccaccugcggccucaucggccucgucaccuuccuccuccucugcggccgcuccugcaccaccacccucuacaagggcgucuacgagcuccaggcccucgagcucaacauggagacccucaacaugaccaugccccucuccugcaccaagaacaacucccaccacuacauccgcgucggcaacgagaccggccucgagcucacccucaccaacaccucccucaucaaccacaaguucugcaaccucuccgacgcccacaagaagaaccucuacgaccacgcccucauguccaucaucuccaccuuccaccucuccauccccaacuucaaccaguacgaggccauguccugcgacuucaacgacggcaagaucuccguccaguacaaccucucccacaccuacgccggcgacaccgccaaccacugcggcaccgucgccaacggcguccuccagaccuucaugcgcauggccuggggcggcuccuacaucgcccucgacuccggccgcggcggcugggacugcaucaugaccuccuaccaguaccucaucauccagaacaccaccugggaggaccacugccaguucucccgccccucccccaucggcuaccucggccuccucucccagcgcacccgcgacaucuacaucucccgccgccuccucggcaccuucaccuggacccucuccgacuccgagggcaaggacacccccggcggcuacugccucacccgcuggaugcucaucgaggccgagcucaagugcuucggcaacaccgccgucgccaagugcaacgagaagcacgacgaggaguucugcgacaugcuccgccucuucgacuucaacaagcaggccauccagcgccucaaggccgaggcccagauguccauccagcucaucaacaaggccgucaacgcccucaucaacgaccagcucaucaugaagaaccaccuccgcgacaucaugggcauccccuacugcaacuacuccaaguacugguaccucaaccacaccgucaccggcaagaccucccuccccaagugcuggcucgucuccaacggcuccuaccucaacgagacccacuucuccgacgacaucgagcagcaggccgacaacaugaucaccgagaugcuccagaaggaguacauggagcgccagggcaagaccccccucggccucgucgaccucuucgucuucuccaccuccuucuaccucaucuccaucuuccuccaccucgucaagauccccacccaccgccacgucgucggcaagcccugccccaagccccaccgccucaaccacaugggcaucugcuccugcggcuucuacaagcagcccggcguccccguccgcuggaagcgcugaggacuagucccuguucccagagcccacuuuuuuuucuuuuuuugaaauaaaauagccugucuuucagaucuaaaaaaaaaaaaaaaaaaaaaaaaaaaaaaaaaaaaaaaaaaaaaaaaaaaaaaaaaaaaaaaaugcaucccccccccccccccccccccccccccccccaaaggcucuuuucagagccaccagaauu

SEQ ID NO: 2382 - RNA, 1752 nt, Artificial Sequence
  mRNA product Design a-1 comprising derived and/or modified sequence from LASV(Z0947-SLE-2011;Clade IV)__AIT17840__GPC (opt2)
gggagagucccgcagucggcguccagcggcucugcuuguucgugugugugucguugcaggccuuauucaagcuuaccaugggccagaucgucaccuucuuccaggaggucccccacgucaucgaggaggucaugaacaucguccucaucgcccucuccauccucgccguccucaagggccucuacaacuucgccaccugcggccucgucggccucgucaccuuccuccuccucugcggccgcuccugcaccaucucccucuacaagggcgucuacgagcuccagacccucgagcucaacauggagacccucaacaugaccaugccccucuccugcaccaagaacaacucccaccacuacaucauggucggcaacgagaccggccucgagcucacccucaccaacaccuccaucaucaaccacaaguucugcaaccucuccgacgcccacaagaagaaccucuacgaccacgcccucauguccaucaucuccaccuuccaccucuccauccccaacuucaaccaguacgaggccauguccugcgacuucaacggcggcaagaucuccguccaguacaaccucucccacuccuacgccggcgacgccgccaaccacugcggcaccgucgccaacggcguccuccagaccuucaugcgcauggccuggggcggcuccuacaucgcccucgacuccggccgcgaccgcugggacugcaucaugaccuccuaccaguaccucaucauccagaacaccaccugggaggaccacugccaguucucccgccccucccccaucggcuaccucggccuccucucccagcgcacccgcgacaucuacaucucccgccgccuccucggcaccuucaccuggacccucuccgacuccgagggcaaggacacccccggcggcuacugccucacccgcuggaugcucaucgaggccgagcucaagugcuucggcaacaccgccgucgccaagugcaacgagaagcacgacgaggaguucugcgacaugcuccgccucuucgacuucaacaagcaggccauccagcgccucaaggccgaggcccagauguccauccagcucaucaacaaggccgucaacgcccucaucaacgaccagcucaucaugaagaaccaccuccgcgacaucaugggcauccccuacugcaacuacuccaaguacugguaccucaaccacaccaccaccggcaagaccucccuccccaagugcuggcucgucuccaacggcuccuaccucaacgagacccacuucuccgacgacaucgagcagcaggccgacaacaugaucaccgagaugcuccagaaggaguacauggagcgccagggcaagaccccccucggccucgucgaccucuucgucuucuccaccuccuucuaccucaucuccaucuuccuccaccucgucaagauccccacccaccgccacaucgucggcaagcccugccccaagccccaccgccucaaccacaugggcaucugcuccugcggccucuacaagcagcccggcguccccgucaaguggaagcgcugaggacuagucccuguucccagagcccacuuuuuuuucuuuuuuugaaauaaaauagccugucuuucagaucuaaaaaaaaaaaaaaaaaaaaaaaaaaaaaaaaaaaaaaaaaaaaaaaaaaaaaaaaaaaaaaaaugcaucccccccccccccccccccccccccccccccaaaggcucuuuucagagccaccagaauu

SEQ ID NO: 2383 - RNA, 1752 nt, Artificial Sequence
  mRNA product Design a-1 comprising derived and/or modified sequence from LASV(Josiah;Clade IV)__NP_694870__GPC (opt3)
gggagagucccgcagucggcguccagcggcucugcuuguucgugugugugucguugcaggccuuauucaagcuuaccaugggccagaucgugaccuucuuucaagaggucccccacguuauugaagaggugaugaacauaguacugaucgcccucagcgugcuugcuguccugaagggguuguacaauuucgcaacaugcggauuagugggucugguuacuuuucuacuccuguguggcagauccugcacgaccucucuuuauaaagggguguacgaacugcagacauuggagcucaacauggaaacucugaauaugaccaugccucugucauguacaaagaacaauagucaucacuauauuauggucggaaacgagaccggccucgaguuaacucugacaaauaccagcaucauuaaccauaaauucugcaaucuuuccgacgcccacaagaaaaacuuguacgaucaugcgcugaugucuaucauaucgacguuucaccuaucaaucccaaauuucaaccaguaugaagcuaugagcugugacuuuaauggugggaagauuagugugcaguacaaccucucccacucuuaugccggagaugcagccaaucauugcggcacuguagcuaacggcguucugcaaaccuucaugaggauggcauggggagggagcuacaucgcccuugacuccggucggggcaacugggauuguauuaugacaucauaccaguaucugaucauacagaauacuaccugggaggaccacugccaguuuagucgcccgagccccauuggguacuugggacuccugucucaacgaacacgugauaucuauauuuccagaagguuacugggcaccuucacguggacucucucagacagcgaagguaaggauacaccugggggauacugucuuacccgguggaugcugaucgaggcugaguugaaaugcuuuggcaacacugccguggcgaaguguaaugaaaaacaugacgaggaguucugcgauaugcuacgccuguuugacuucaacaagcaggcaauccagagacucaaagccgaagcucagaugaguauucaacugauaaauaaggccgucaacgcacuuaucaaugaucagcugauuaugaagaaccacuugagggacaucaugggcauaccauauugcaauuacucuaaauauugguaccucaaccacacaaccacggggcggaccucccugcccaaguguugguuagugagcaauggaucguaccugaacgaaacacauuucucugacgauauugagcagcaagcugacaauaugaucacugagaugcuacagaaagaauauauggagcgccaggguaagaccccucucggccugguggaucuuuuugucuucuccacaucauuuuacuugaucaguauuuuccugcaccucguuaaaaucccaacucaucgacacauugugggaaagagcugccccaaaccucauagacugaaccacauggggauauguuccugcggccuuuauaagcagccagguguaccggugaaguggaaaaggugaggacuagucccuguucccagagcccacuuuuuuuucuuuuuuugaaauaaaauagccugucuuucagaucuaaaaaaaaaaaaaaaaaaaaaaaaaaaaaaaaaaaaaaaaaaaaaaaaaaaaaaaaaaaaaaaaugcaucccccccccccccccccccccccccccccccaaaggcucuuuucagagccaccagaauu

SEQ ID NO: 2384 - RNA, 1749 nt, Artificial Sequence
  mRNA product Design a-1 comprising derived and/or modified sequence from LASV(LP;Clade I)__AAF86701__GPC (opt3)
gggagagucccgcagucggcguccagcggcucugcuuguucgugugugugucguugcaggccuuauucaagcuuaccaugggccagaucauuaccuucuuucaagaggugccccacgucauagaagagguuaugaacaucgugcugauugcccucagccuucuggcuaucuugaagggguuauacaauauugcaacaugcggaaucauaggucugguagccuuccuauuucucuguggcaaauccugcucucugacucuuaaagggggauaugaacugcagacguuggagcucaacauggaaacccugaauaugacaaugccucugucauguacuaagaacaguagccaucacuacaucagagugggcaaugagaccggucucgaguuaacacugaccaacacuuccauuaucaaucauaaguucugcaaccuuucugacgcgcacaaaaagaauuuguaugaucaugcucugaugucgauuaucucaacauuucaccuaagcauaccaaacuucaaucaguacgaagccaugaguugugacuuuaacgggggaaagauuuccguccaguauaaucucucucacagcuacgcaggcgaugccgcugagcauugcggcaccguggcaaacgggguucugcaaacguucaugaggauggccuggggaggucgguauaucgcucuugacuccggcaaagggaauugggauuguauuaugacuucauaccaguaccugaucauccagaacaccacaugggaagaccacugccaguuuagucgcccgagccccauuggauauuugggccuccugucucaacgaacucgugauauauacaucuccagaagguuacuggguaccuucacauggacccucucagacagcgaggggaacgagacgccuggaggcuauugucuuacucgguggaugcugauugaagccgaguugaagugcuuuggcaauacagcgguggcaaaauguaacgaaaagcaugaugaggaguucugcgacaugcuacgccuguuugauuucaauaaacaggccaucagaaggcucaaggcugaagcccagaugaguauacagcugauuaacaaggcagucaaugcucuuaucaacgaccaacugaucaugaaaaaucacuugcgggauauuauggggaucccauacugcaacuauucuaaguacugguaucucaaucacaccuccagcggacgcacuucgcugcccaaauguugguuaauuucuaacgguuccuaccugaaugagacacaguucucagacgacauagaacagcaagccgauaacaugaucaccgagaugcuacagaaggaauacauugagcgacagggcaaaacgccucucgggcugguggacaucuuuaucuucaguaccagcuuuuaucuuauuuccauauucuugcaucugaucaagauuccaacacacagacauaucguaggaaaacccugcccuaagccacacaggcucaaucauaugggcguuuguucuugcggucuguacaagcacccgggggugcccacuaaauggaagcggugaggacuagucccuguucccagagcccacuuuuuuuucuuuuuuugaaauaaaauagccugucuuucagaucuaaaaaaaaaaaaaaaaaaaaaaaaaaaaaaaaaaaaaaaaaaaaaaaaaaaaaaaaaaaaaaaaugcaucccccccccccccccccccccccccccccccaaaggcucuuuucagagccaccagaauu

SEQ ID NO: 2385 - RNA, 1749 nt, Artificial Sequence
  mRNA product Design a-1 comprising derived and/or modified sequence from LASV(803213;Clade II)__AAF86703__GPC (opt3)
gggagagucccgcagucggcguccagcggcucugcuuguucgugugugugucguugcaggccuuauucaagcuuaccaugggccagaucauuaccuucuuucaagaggugccccacgucauagaagagguuaugaacaucgugcugauugcccucagccuucuggcuaucuugaaggggauuuacaauguagcaacaugcggauuauucggucugaucuccuuucuacuccuguguggcagaucuugcucagugacuuauaaaggggucuacgaacuucagacgcuggaguugaacauggccaaucucaacaugaccaugccucugaguuguacaaagaauaacagccaucacuauauaauggugggaaaugaaacuggccuggagcucaccuuaacaaacaccuccaucauuaaucauaaauucugcaaccugucugacgcgcacaagaaaaaucuuuacgaucaugcuuugaugucgaucauuucaacuuuucaccugagcaucccaaacuucaaucaguaugaggccaugaguugugacuuuaacggugggaagauauccguucaguacaaucuaucucacagcuucgcaguggaugccgcuaaccauugcggaacaauugcaaacggcguccuccaaaccuuuaugaggauggccuggggcggguccuauaucgcucuggacucaggaaaggguaauugggauuguauuaugacgaguuaccaguaccuuaucauccagaacacuaccugggaagaccacugccaguucagccggccgucucccauuggcuaucugggguugcucucccaacgcacacgagauauauacaucucacguagacuguuaggaacuuuuaccuggacacugagcgacagugagggcaaugaagccccugguggguauugucucaccagguggaugcuuauugaggcggagcugaaaugcuucggaaacacggcaguggccaaguguaaugaaaaacaugaugaggaauuuugcgacauguugcggcuauucgauuucaacaagcaggcuaucaaacgccugaagacugaggcccagaugucuauacagcucauuaauaaggcaguaaacgcucugaucaaugaccaacuuaucaugaaaaaccaccugagagauauuaugggcaucccauacugcaauuauuccagguacugguauuugaaccacacaguuaccggcaagacuagccucccccgguguuggcuggugucgaaugggucuuacuuaaacgaaacacauuuuuccgacgacauugagcagcaggccgauaauaugauaaccgagaugcugcaaaaagaauacauggaccgccagggaaagacgccucuaggucucgucgaucuguucguguuuucaaccaguuucuaucuuaucagcaucuuuuugcaccuggugaaaauuccaacacaucgacacaucgucggcaagcccugcccuaaaccacauagacucaaccacauggggauuuguuccugcggacuguacaagcacccgggcguucccgugaaguggaaaaggugaggacuagucccuguucccagagcccacuuuuuuuucuuuuuuugaaauaaaauagccugucuuucagaucuaaaaaaaaaaaaaaaaaaaaaaaaaaaaaaaaaaaaaaaaaaaaaaaaaaaaaaaaaaaaaaaaugcaucccccccccccccccccccccccccccccccaaaggcucuuuucagagccaccagaauu

SEQ ID NO: 2386 - RNA, 1749 nt, Artificial Sequence
  mRNA product Design a-1 comprising derived and/or modified sequence from LASV(GA391;Clade III)__CAA36645__GPC (opt3)
gggagagucccgcagucggcguccagcggcucugcuuguucgugugugugucguugcaggccuuauucaagcuuaccaugggccagaucgugaccuucuuucaagaggucccccacguuauugaagaggugaugaacauaguacugaucgcccucagcauucuugcuauccugaagggguuguacaauguggcaacaugcggauuaauuggucuggucacuuuccuacuccuguccggcagaucuuguucacuuaucuauaaagggacguacgaacugcagaccuuggagcucaacauggaaacacugaauaugacuaugccucugaguugcaccaagaacaauagccaucacuauauaagggugggaaacgagacaggccucgaguuaacccugacuaauacauccauccuuaaccauaaauuuuguaauuugucugacgcccacaagcggaaccuguacgaucauucgcuaaugucaauuaucagcaccuuccaccucaguauuccaaauuuuaaccaguaugaagcgauguccugcgacuucaauggugggaaaaucacgguucaguacaaccugucucacagcuuugcuguggaugccgcaggacauuguggcacucuugccaauggcguccugcaaaccuucaugcgcauggcuuggggaggguccuauauagcauuggacucaggucgaggcaacugggauugcauuaugacaaguuaccaguaccucaucauucagaacacuaccugggacgaucacugucaguuuagccguccgucucccaucggguaucugggauuacugucccaaagaacaagggacaucuacauuucacggcgccuccuuggcaccuucacguggacucugagcgauagugaggguaaugaaacaccugggggauauugcuugaccagauggaugcuaauagaggccgagcugaaguguuuuggcaacacugcuguggccaagugcaaugaaaaacaugacgaggaguucugugauaugcucaggcuguuugacuucaacaagcaggcgauccggcgccuuaaaacagaagcacagaugucuauucagcugaucaauaaggccguaaacgcuuugauaaaugaucaacucauuaugaaaaaccaucugcgagacaucaugggcaucccauacugcaauuauuccagauacugguauuuaaaccacaccagcacggggaagaccucgcugcccaggugcuggcuaauuucuaauggauccuaccucaacgaaacaaaguucucagacgauaucgagcagcaggccgacaauaugauuacugagaugcugcaaaaagaauacauagaucggcaggguaagaccccucuuggcuugguugaccuguuuguguucaguacuagcuuuuaucucaucuccauuuuccugcaccuugucaaaaucccaacacaccgucauaucguggggaagcccuguccuaaaccacaccgccugaaccauaugggaauuugcucuuguggcuuguacaagcagccgggugugcccgucagauggaaaaggugaggacuagucccuguucccagagcccacuuuuuuuucuuuuuuugaaauaaaauagccugucuuucagaucuaaaaaaaaaaaaaaaaaaaaaaaaaaaaaaaaaaaaaaaaaaaaaaaaaaaaaaaaaaaaaaaaugcaucccccccccccccccccccccccccccccccaaaggcucuuuucagagccaccagaauu

SEQ ID NO: 2387 - RNA, 1752 nt, Artificial Sequence
  mRNA product Design a-1 comprising derived and/or modified sequence from LASV(AV;Clade V)__CCA30314__GPC (opt3)
gggagagucccgcagucggcguccagcggcucugcuuguucgugugugugucguugcaggccuuauucaagcuuaccaugggccagaucgugaccuucuuucaagaggucccccacguuauugaagaggugaugaacauaguacugaucgcccucagcauucuugcugugcugaagggguuguacaauaucgcaacaugcggauuaauuggucugaucacuuuccuacuccuguguggcagauccugcagcucaaaccuuuauaaaggggucuacgaacugcagaguuuggaccucaauauggagacgcugaacaugaccaugccucugagcuguacaaagaauaacucccaucacuauauaagggugggaaaugauacuggccucgaauuaacccugacaaacaccucuauccuuaaucauaaauuuugcaacuugucggacgcccacaagaaagaucuguacgaccaugcgcuaaugucaauuaucagcacuuuccaccucaguauuccaaauuuuaaccaguaugaggcuauguccugugauuucaauggugggaagaucucuguucaguacaaccugagccacuccuaugccauagacgcagccaaucauugcggaacaguggcuaacggcauucuucaaaccuuuaugcggauggcauggggcgggucauacaucgcccuggauaguggacgcgguaacugggacuguauuaugacgagcuaccaguauuugaucauccagaauacuaccugggagaaccacugccaguucucucgaccgucccccauuggcuaccucgggcuguuaucacaacguacaagagauauauauaucagcaggcggcugcucggaacuuuuaccuggacacuuagugacucugaaggcaaugcuaccccugguggguacugucugacgcgcuggauguugauugaggccgaacuaaagugcuucggaaacacugcggucgcaaaauguaaugagaagcaugaugaggaauuuugcgacaugcugagacucuucgauuuuaacaaacaggccaucuccaggcugaagucugaggcucagaugucgauacagcuuauuaauaaagccgugaacgcacugaucaaugaccaauugaucaugaagaaccaccuccgggacauuaugggcaucccauauugcaauuacucuaaguauugguaccugaaccacacaauuaccggcaaaacuuccuuacccaaguguuggcugguaucaaaugggaguuaccuaaacgaaacacauuucagcgaugacauagagcagcaggcugauaauaugaucaccgaaaugcuccaaaaagaguauauggagcgccagggaaagacgccucugggucuuguugacuuguucguguuuuccaccucuuucuaccugauuagcaucuuucuccgacuggucaaaaucccaacacacagacauauugugggcaagcccugcccuaaaccacacaggcuuaaccauauggggauauguucaugcggacuguauaagcagccgggcgugcccguccgguggaagcguugaggacuagucccuguucccagagcccacuuuuuuuucuuuuuuugaaauaaaauagccugucuuucagaucuaaaaaaaaaaaaaaaaaaaaaaaaaaaaaaaaaaaaaaaaaaaaaaaaaaaaaaaaaaaaaaaaugcaucccccccccccccccccccccccccccccccaaaggcucuuuucagagccaccagaauu

SEQ ID NO: 2388 - RNA, 1749 nt, Artificial Sequence
  mRNA product Design a-1 comprising derived and/or modified sequence from LASV(Togo/2016/7082;Clade VI)__AMR44577__GPC (opt3)
gggagagucccgcagucggcguccagcggcucugcuuguucgugugugugucguugcaggccuuauucaagcuuaccaugggccagaucauuaccuucuuucaagaggugccccacgucauagaagagguuaugaacaucgugcugauugcccucagccuucuggcuaucuugaaggggguauacaauguggcaacaugcggaauuaucgguuuagucacuuuccuguuucuauguggcagauccugcucucucauauauaaagggucauacgaacugcagacgcuugagcugaacauggaaaccuugaauaugacaaugccucucaguuguacuaagaacagcucccaucacuauaucagggugggaaaugagaccggccuggagcugacacucaccaacacuucuauuaucaaucauaaauucugcaacuuaucggacgcccacaagcggaaucuguacgaucaugcgcuuaugucaauuuugagcacauuucaccugaguaucccaaacuucaaucaguaugaagcuauguccugugacuuuaacggugggaaaauaucuguucaguacaaucuaagccacgccuaugcaguggaugccgcugagcauugcggaaccgucgcaaacggcgugcuccaaacguucaugcgcauggccuggggcggguccuacauugcucuggacucaggacgagguaauugggauuguaucaugaccaguuaccaguaucuuauuauccagaacacuacaugggaagaccacugccaguuuagccguccgucucccaucggcuaccugggguugcucucccaaagaacuagggauauuuauauaucacggcgccuguuaggaaccuucacauggacccugagcgacagugagggcaacgagacgccugguggguacugucucacuagauggaugcuuaucgaagccgagcugaagugcuuuggaaauacagcgguagcaaaguguaacgaaaaacaugaugaggaguucugcgacauguugaggcuauuugauuucaauaagcaggccauucagcggcugaaaucugaagcucagauguccauccaacucauaaacaaggccguuaaugcacugauuaacgaccagcuuaucaugaaaaaucaucugcgcgauaugaugggcaucccauauugcaacuacagcaaguauugguacuugaaucacaccucgucuggccgaacuucccuccccaaguguuggcuggugucaaacgggaguuacuuaaaugagacacacuucagcgacgacauugaacagcaagcugauaacaugaucaccgagaugcugcagaaagaauauauugacagacagggaaagacgccucuaggucucgucgaucuguuuguguucuccaccucuuuuuaccuuauaagcaucuucuugcaccugauuaaaaucccaacacauaggcacaucgugggcaagcccugcccuaaaccacaucggcucaaucacauggggauuuguucaugcggacuguauaagcagccgggcguccccacucguuggaaacgcugaggacuagucccuguucccagagcccacuuuuuuuucuuuuuuugaaauaaaauagccugucuuucagaucuaaaaaaaaaaaaaaaaaaaaaaaaaaaaaaaaaaaaaaaaaaaaaaaaaaaaaaaaaaaaaaaaugcaucccccccccccccccccccccccccccccccaaaggcucuuuucagagccaccagaauu

SEQ ID NO: 2389 - RNA, 1749 nt, Artificial Sequence
  mRNA product Design a-1 comprising derived and/or modified sequence from LASV(KAK-428;Clade n.d. (VII))__ANH09740__GPC (opt3)
gggagagucccgcagucggcguccagcggcucugcuuguucgugugugugucguugcaggccuuauucaagcuuaccaugggccagaucgugaccuucuuucaagaggucccccacguuauugaagaggugaugaacauaguacugaucgcccucagccuucuggcuauuuugaagggguuauacaauuucgcaacaugcggagugaucggucugauuacuuuucuacuccuguguggcagauccugcucugccacguauaaagggcaguacgaacuucagacccuggaguugaacauggaaucacucaauaugacaaugccucugaguuguacuaagaacaauagccaucacuauaucagggcgggaaacaauaccggccuggagcucacauuaaccaacacuuccauaaucucucauaaauucugcaaucugucggacgcucacaagaaaaaccuuuacgaucauacauugaugucaauuaucaccacguuucaccugagcauuccaaauuucaaccaguaugaggccaugaguugugacuuuaauggugggaagaucuccauacaauacaaccuaucucacagcuaugcaggagaugccgcucagcauugcggcacugucgcaaauggcgugcuccagaccuucaugcggauggccuggggaggguccuaccuggcucuugacucaggucgccgaggcugggauuguauuaucaguagcuaccaguaucugauuauccaaaacacaacuugggacgaucacugccaguuuucucguccgucccccaucggguacuugggauucguuucacagaagaccagagacauuuauauaagcaggcggcuccugggcacauuuaccuggacguuaagugauucugaaggucaugacaugccugggggauacugucugacucgcuggaugcucaucgaggccgaucuuaaaugcuucggcaacacagcgguggcaaaguguaaugaaaaacacgacgaggaguuuugcgauauguggagacuguucgacuucaacaagcaggccauucaaagguugaaagcugaagcccagaugaauauccagcuaauaaacaaggcagucaaugcucugauuaacgaccaacucaugaugaagaaucaucugcgggauaucaugggcaucccauauugcaacuacuccaaauuuugguaucuuaauaacaccacuacagggcgcaccagccugccccgauguugguugauuucgaauggaucuuaccucaacgagacgcacuucuccgacgauaucgaacagcaggccgacaauaugauuaccgagaugcugcagaaggaauacauggauagacaagguaaaacaccuuuaggccugguggaccuauuuguauucucaaccaguuuuuaucucauaacuaucuuccugcaccuuguuaagauuccaacacauaggcacaucguggggaaacccugcccuaagccacaucgguugaaccacaugggaaucuguagcugcggccuguacaaacagccggguguccccgugcguuggaagcgcugaggacuagucccuguucccagagcccacuuuuuuuucuuuuuuugaaauaaaauagccugucuuucagaucuaaaaaaaaaaaaaaaaaaaaaaaaaaaaaaaaaaaaaaaaaaaaaaaaaaaaaaaaaaaaaaaaugcaucccccccccccccccccccccccccccccccaaaggcucuuuucagagccaccagaauu

SEQ ID NO: 2390 - RNA, 1749 nt, Artificial Sequence; identical to SEQ ID NO: 2384
  mRNA product Design a-1 comprising derived and/or modified sequence from LASV(Pinneo-NIG-1969;Clade I)__AIT17836__GPC (opt3)

SEQ ID NO: 2391 - RNA, 1749 nt, Artificial Sequence
  mRNA product Design a-1 comprising derived and/or modified sequence from LASV(ISTH0009-NIG-2011;Clade II)__AIT17404__GPC (opt3)
gggagagucccgcagucggcguccagcggcucugcuuguucgugugugugucguugcaggccuuauucaagcuuaccaugggccagaucauuaccuucuuucaagaggugccccacgucauagaagagguuaugaacaucgugcugauugcccucagccuucuggcuaucuugaaggggauuuacaauguagcaacaugcggauuauucggucugguguccuuucuacuccuguguggcagaucuugcucaacuacguauaaaggggucuacgaacuucagacccuggaguuggacauggccagucucaacaugacaaugccucugagcuguacuaagaauaacucccaucacuauaucauggugggaaaugaaaccggccuggagcucacauuaaccaacacuucuauaaucaaucauaaauucugcaaccugucggaugcgcacaagaaaaaucuuuacgaccaugcuuugaugucaauuaucagcacauuucaccugaguauuccaaacuucaaucaguaugaggccauguccugugauuuuaacggugggaagaucucuguucaguacaaucuaagccacgcauaugccguggacgcugcaaaccauugcggaaccauagccaauggcguccuccaaacguucaugaggauggcuuggggcggguccuacauugcccuggauucaggaaaggguaguugggacuguaucaugacuagcuaccaguaucuuauuauccagaacaccacaugggaagaucacugccaguuuucucggccgucccccaucggcuaccugggguugcucucacaacgcacucgagacauuuauauaagccguagacuguuaggaaccuucacauggacccugagugauucugagggcaacgaaacgccugguggguacugucucacuagguggaugcuuaucgaggcggagcugaaaugcuuuggaaauacagcaguggccaaguguaacgaaaaacaugacgaggaguucugcgauauguugcggcuauuugacuucaauaagcaggcuauucgcagacugaaaaccgaagcccagauguccauccagcucauaaacaaggcaguaaaugcucugauuaacgaucaacuuaucaugaagaaucaccugagggacaucaugggcauuccauauugcaacuacagcaaauauugguacuugaaucacacuguuacaggcaagaccucgcucccccgguguuggcuggugucuaacggguccuacuuaaaugaaacgcauuucucagacgauaucgagcagcaggccgacaacaugauuaccgagcugcuacaaaaagaauauauggaucgccagggaaagacaccucucggucuggucgaccuuuuuguguucaguacuagcuuuuacuugauauccaucuuccugcaccucauuaaaaucccaacccaucgacacaucacaggcaagcccugcccuaaaccacauagacugaaucacauggggauuuguucuugcggacuuuauaagcacccgggcgugcccgucaaguggaaaaggugaggacuagucccuguucccagagcccacuuuuuuuucuuuuuuugaaauaaaauagccugucuuucagaucuaaaaaaaaaaaaaaaaaaaaaaaaaaaaaaaaaaaaaaaaaaaaaaaaaaaaaaaaaaaaaaaaugcaucccccccccccccccccccccccccccccccaaaggcucuuuucagagccaccagaauu

SEQ ID NO: 2392 - RNA, 1749 nt, Artificial Sequence
  mRNA product Design a-1 comprising derived and/or modified sequence from LASV(ISTH2010-NIG-2012;Clade II)__AIT17482__GPC (opt3)
gggagagucccgcagucggcguccagcggcucugcuuguucgugugugugucguugcaggccuuauucaagcuuaccaugggccagaucauuaccuucuuucaagaggugccccacgucauagaagagguuaugaacaucgugcugauugcccucagccuucuggcuaucuugaaggggauuuacaauguagcaacaugcggauuauucggucugguguccuuucuacuccuguguggcagaucuugcucaacuacguauaaaggggucuacgaacuucagacccuggaguuggacauggccagucucaacaugacaaugccucugagcuguacuaagaauaacucccaucacuauaucauggugggaaaugaaaccggccuggagcucacauuaaccaacacuucuauaaucaaucauaaauucugcaaccugucggaugcgcacaagaaaaaucuuuacgaccaugcuuugaugucaauuaucagcacauuucaccugaguauuccaaacuucaaucaguaugaggccauguccugugauuuuaacggugggaagaucucuguucaguacaaucuaagccacgcauaugccguggacgcugcaaaccauugcggaaccauagccaauggcguccuccaaacguucaugaggauggcuuggggcggguccuacauugcccuggauucaggaaaggguaguugggacuguaucaugacuagcuaccaguaucuuauuauccagaacaucaccugggaagaucacugccaguuuucucggccgucccccauuggcuaccugggguugcucucacaacgcacacgagacauauauaucagccguagacuguuaggaacuuucaccuggacacugagugauucugagggcaacgaaaccccugguggguacugucucacgagguggaugcuuauugaggcggagcugaaaugcuuuggaaauacugcaguggccaaguguaacgaaaaacaugacgaggaguucugcgauauguugcggcuauuugacuucaauaagcaggcuauccgcagacugaaaacagaagcccagauguccauacagcucauuaacaaggcaguaaaugcucugaucaacgaucaacuuaucaugaagaaucaccugagggacauuaugggcaucccauauugcaacuacagcaaauauugguacuugaaucacaccguuacuggcaagacaucgcucccccgguguuggcuggugucuaacggguccuacuuaaaugaaacccauuucucagacgauauugagcagcaggccgacaacaugauaacggagcugcuacaaaaagaauauaucgaucgccagggaaagaccccucucggucuggucgaccuuuuuguguucaguacuagcuuuuacuugauuuccaucuuccugcaccucgugaaaaucccaacacaucgacacgucguuggcaagcccugcccuaaaccacauagacugaaucacauggggauuuguucuugcggacuuuauaagcacccgggcgugcccguaaaguggaaaaggugaggacuagucccuguucccagagcccacuuuuuuuucuuuuuuugaaauaaaauagccugucuuucagaucuaaaaaaaaaaaaaaaaaaaaaaaaaaaaaaaaaaaaaaaaaaaaaaaaaaaaaaaaaaaaaaaaugcaucccccccccccccccccccccccccccccccaaaggcucuuuucagagccaccagaauu

SEQ ID NO: 2393 - RNA, 1749 nt, Artificial Sequence
  mRNA product Design a-1 comprising derived and/or modified sequence from LASV(Lassa virus/H.sapiens-wt/NGA/2015/ISTH_0543;Clade II)__AVO03639__GPC (opt3)
gggagagucccgcagucggcguccagcggcucugcuuguucgugugugugucguugcaggccuuauucaagcuuaccaugggccagaucauuaccuucuuucaagaggugccccacgucauagaagagguuaugaacaucgugcugauugcccucagccuucuggcuaucuugaaggggauuuacaauguagcaacaugcggauuauucggucugguguccuuucuacuccuguguggcagaucuugcucaacuacguauaaaggggucuacgaacuucagacccuggaguuggacauggccaaccucaauaugacaaugccucugaguuguacuaagaacaauagccaucacuauaucauggugggaaacgaaaccggccuggagcucacauuaaccaauacuuccauaaucaaccauaaauucugcaaucugucugaugcgcacaagaaaaaccuuuacgaccaugcuuugaugucgauuaucucaacauuucaccugagcauuccaaauuucaaccaguaugaggccaugaguugugauuuuaauggugggaagaucuccguucaguacaaccuaucucacaccuaugcaguggacgccgcuaaucauugcggaacgauagcaaacggcguccuccaaacuuucaugaggauggccuggggcgggagcuacauugcucuggauuccggaaaggguucaugggacuguaucaugaccaguuaccaguaucuugugauucagaacacaacuugggaagaucacugccaguuuagccggccgucucccaucggcuaccugggguugcucucccaacgcacccgagacaucuauauuucacguagacuguuaggaacauucaccuggacgcugagcgauagugagggcaaugaaacuccugguggguacugucucacaagguggaugcuuauagaggccgagcugaaaugcuuuggaaacaccgcgguagcaaaguguaaugaaaaacaugacgaggaguucugcgauauguugcggcuauuugacuucaacaagcaggccauccgcagacugaaaacugaagcucagaugucuauucagcucaucaauaaggccguuaacgcacugauaaaugaucaacuuauuaugaagaaccaccugagggacaucaugggcaucccauauugcaauuacuccaaauauugguacuugaaccacacagugaccggcaagacgagccucccccgguguuggcuggucucgaaugggucuuacuuaaacgaaacccauuucuccgacgauauugagcagcaggcugacaauaugaucacagagcugcuacaaaaagaauauauugaucgccagggaaagacuccucucggucugguggaccuuuuuguguucucaaccaguuuuuacuugauaagcaucuuccugcaccucgucaaaauuccaacacaucgacacaucacuggcaagcccugcccuaaaccacauagacugaaccacauggggaucuguuccugcggacuuuauaagcacccgggcguucccgugaaguggaaaaggugaggacuagucccuguucccagagcccacuuuuuuuucuuuuuuugaaauaaaauagccugucuuucagaucuaaaaaaaaaaaaaaaaaaaaaaaaaaaaaaaaaaaaaaaaaaaaaaaaaaaaaaaaaaaaaaaaugcaucccccccccccccccccccccccccccccccaaaggcucuuuucagagccaccagaauu

SEQ ID NO: 2394 - RNA, 1749 nt, Artificial Sequence
  mRNA product Design a-1 comprising derived and/or modified sequence from LASV(Lassa virus/H.sapiens-wt/NGA/2016/ISTH_0009;Clade II)__AVO03571__GPC (opt3)
gggagagucccgcagucggcguccagcggcucugcuuguucgugugugugucguugcaggccuuauucaagcuuaccaugggccagaucauuaccuucuuucaagaggugccccacgucauagaagagguuaugaacaucgugcugauugcccucagccuucuggcuaucuugaaggggauuuacaauguagcaacaugcggauuacugggucuaguguccuuccuccugcuuuguggcagaucuugcucaacuacguauaaaggggucuacgaacugcagaccuuggagcucgacauggccagucugaacaugacaaugccucugagcuguacuaagaauaacucccaucacuauaucauggugggaaaugaaaccggccucgaguuaacacugaccaacacuucuauaaucaaucauaaauuuugcaaccuuucggaugcgcacaagaaaaauuuguacgaccaugcucugaugucaauuaucagcacauuccaccuaaguauuccaaacuuuaaucaguaugaggccauguccugugauuucaacggugggaggaucucuguucaguacaaucucagccacuccuaugcaguggacgccgcuaaccauugcggaaccauagcaaauggcguccugcaaacguuuaugcggauggccuggggcgggucauacauugcucuugauaguggaaaggguagcugggacuguaucaugacuucuuaccaguaucugauuauccagaacaccacaugggaagaucacugccaguucucccgcccgucacccaucggcuacuuggggcuccugagccaacgaacucgugacauuuauauaaguagaagguuacugggaaccuuuacauggacccucucugauuccgagggcaacgaaacgccugguggguacugucuuacucgguggaugcugaucgaggccgaguugaagugcuucggaaauacagcgguggcaaaauguaacgaaaagcaugacgaggaauuuugcgauaugcuacgccuguucgacuuuaauaaacaggccauuagaaggcucaagaccgaggcucagaugagcauccagcugauaaacaaagccguaaaugcacuuauuaacgaucaacugaucaugaagaaucacuugcgggacaucaugggcauuccauauugcaacuacucgaaguauugguaccucaaucacacuguuacaggcaaaaccucucugccccgcuguugguuaguguccaacgggucauaccugaaugaaacgcauuucagugacgauaucgagcagcaggcugacaacaugauuaccgagcuacuccaaaaggaauauauagaucgacagggaaaaacaccucugggucuugucgacuuguucguguuuagcacuuccuucuaccugaucucuauuuuucuccaccuggugaagaucccaacccauagacacaucacaggcaaacccugcccuaagccacauaggcuuaaucacauggggauuuguagcugcggacuguauaaccacccgggcguccccguuaaauggaagcggugaggacuagucccuguucccagagcccacuuuuuuuucuuuuuuugaaauaaaauagccugucuuucagaucuaaaaaaaaaaaaaaaaaaaaaaaaaaaaaaaaaaaaaaaaaaaaaaaaaaaaaaaaaaaaaaaaugcaucccccccccccccccccccccccccccccccaaaggcucuuuucagagccaccagaauu

SEQ ID NO: 2395 - RNA, 1749 nt, Artificial Sequence
  mRNA product Design a-1 comprising derived and/or modified sequence from LASV(Lassa virus/H.sapiens-wt/NGA/2016/ISTH_0017;Clade II)__AVO03567__GPC (opt3)
gggagagucccgcagucggcguccagcggcucugcuuguucgugugugugucguugcaggccuuauucaagcuuaccaugggccagaucauuaccuucuuucaagaggugccccacgucauagaagagguuaugaacaucgugcugauugcccucagccuucuggcuaucuugaaggggauuuacaauguagcaacaugcggauuauucggucugguguccuuucuacuccuguguggcagaucuugcucaacuacguauaaaggggucuacgaacuucagacccuggaguuggacauggccagucucaacaugacaaugccucugagcuguacuaagaauaacucccaucacuauaucauggugggaaaugaaaccggccuggagcucacauuaaccaacacuucuauaaucaaucauaaauucugcaaccugucggaugcgcacaagaaaaaucuuuacgaccaugcuuugaugucaauuaucagcacauuucaccugaguauuccaaacuucaaucaguaugaggccauguccugugauuuuaacggugggaagaucucuguucaguacaaucuaagccacaccuaugcaauagacgccgcuaaccauugcggaacgauugcaaauggcgugcuccaaacuuucaugaggauggccuggggcggguccuacaucgcucuggauucaggaaaggguaguugggacuguauuaugaccagcuaccaguaucuuaucauccagaacacaacuugggaagaucacugccaguuuucucggccgucccccauuggcuaccugggguugcucucacaacgcacccgagacauauauaucagccguagacuguuaggaacauucaccuggacgcugagugauucugagggcaacgaaacuccugguggguacugucucacaagguggaugcuuauugaggccgagcugaaaugcuuuggaaauaccgcggucgcaaaguguaacgaaaaacaugacgaggaguucugcgauauguugcggcuauuugacuucaauaagcaggccauccgcagacugaaaacugaagcucagauguccauacagcucauuaacaaggccgugaaugcacugaucaacgaucaacuuaucaugaagaaucaccugagggacauuaugggcaucccauauugcaacuacagcaaauauugguacuugaaucacacaguaaccggcaagacgucgcucccccgguguuggcugguuucuaacggguccuacuuaaaugaaacccauuucucagacgauauugagcagcaggcugacaacaugauaacagagcugcuacaaaaagaauauauggaucgccagggaaagacuccucucggucugguggaccuuuuugucuucaguaccagcuuuuacuugaucuccauuuuccugcaccucgugcgaaucccaacacauagacacgugaucggcaaacccugcccuaagccacauaggcugaaucacauggggauuuguucuugcggacuuuauaaacacccgggcguccccguuaaguggaagcggugaggacuagucccuguucccagagcccacuuuuuuuucuuuuuuugaaauaaaauagccugucuuucagaucuaaaaaaaaaaaaaaaaaaaaaaaaaaaaaaaaaaaaaaaaaaaaaaaaaaaaaaaaaaaaaaaaugcaucccccccccccccccccccccccccccccccaaaggcucuuuucagagccaccagaauu

SEQ ID NO: 2396 - RNA, 1749 nt, Artificial Sequence
  mRNA product Design a-1 comprising derived and/or modified sequence from LASV(Lassa virus/H.sapiens-wt/NGA/2018/ISTH_0959;Clade II)__AVV65099__GPC (opt3)
gggagagucccgcagucggcguccagcggcucugcuuguucgugugugugucguugcaggccuuauucaagcuuaccaugggccagaucauuaccuucuuucaagaggugccccacgucauagaagagguuaugaacaucgugcugauugcccucagccuucuggcuaucuugaaggggauuuacaauguagugacaugcggauuauucggucuggucuccuuucuacuccuguguggcagaucuugcucaacuacguauaaagggguguacgaacuucagacccuggaguuggacauggcaagucucaacaugacaaugccucugagcuguacuaagaauaacucccaucacuauaucaugguuggaaaugaaaccggccuggagcucacauuaaccaacacuucuauaaucaaucauaaauucugcaaccugucggaugcccacaagaaaaaucuuuacgaccaugcguugaugucaauuaucagcacauuucaccugaguauuccaaacuucaaucaguaugaggcuauguccugugauuuuaacggugggaagaucucugugcaguacaaucuaagccacgccuaugcaauagacgccgcuaaccauugcggaaccauugcaaauggcguccuccaaacguucaugaggauggccuggggcggguccuacaucgcucuggauucaggaaaggguaguugggacuguauuaugacuagcuaccaguaucuuaucauccagaacaccacaugggaagaucacugccaguuuucucggccgucccccauuggcuaccugggguugcucucacaacgcacucgagacauauauaucagccguagacuguuaggaaccuucacauggacccugagugauucugagggcaacgaaacgccugguggguacugucucacuagguggaugcuuauugaggccgagcugaaaugcuuuggaaauacagcgguggcaaaguguaacgaaaaacaugacgaggaguucugcgauauguugcggcuauuugacuucaauaagcaggccauccgcagacugaaaaccgaagcucagauguccauacagcucauuaacaaggccguaaaugcacugaucaacgaucaacuuaucaugaagaaucaccugagggacauuaugggcaucccauauugcaacuacagcaaauauugguacuugaaucacacuguuacaggcaagaccucgcucccccgguguuggcuggugucuaacggguccuacuuaaaugaaacgcauuucucagacgauauugagcagcaggcugacaacaugauaaccgagcugcuacaaaaagaauauaucgaucgccagggaaagacaccucucggucuggucgaccuuuuuguguucaguacuagcuuuuacuugauuuccaucuuccugcaccucgugaaaaucccaacccaucgacacgucauuggcaagcccugcccuaaaccacauagacugaaucacauggggauauguucuugcggacuuuauaagcacccgggcguucccgugaaguggaaaaggugaggacuagucccuguucccagagcccacuuuuuuuucuuuuuuugaaauaaaauagccugucuuucagaucuaaaaaaaaaaaaaaaaaaaaaaaaaaaaaaaaaaaaaaaaaaaaaaaaaaaaaaaaaaaaaaaaugcaucccccccccccccccccccccccccccccccaaaggcucuuuucagagccaccagaauu

SEQ ID NO: 2397 - RNA, 1749 nt, Artificial Sequence
  mRNA product Design a-1 comprising derived and/or modified sequence from LASV(LASV003-NIG-2008;Clade II)__AIT17580__GPC (opt3)
gggagagucccgcagucggcguccagcggcucugcuuguucgugugugugucguugcaggccuuauucaagcuuaccaugggccagaucauuaccuucuuucaagaggugccccacgucauagaagagguuaugaacaucgugcugauugcccucagccuucuggcuaucuugaaggggauuuacaauguagcaacaugcggauuauucggucugguguccuuucuacuccuguguggcagaucuugcucaacuacguauaaaggggucuacgaacuucagacccuggaguuggacauggccagucucaacaugacaaugccucugagcuguacuaagaauaacucccaucacuauaucauggugggaaaugaaaccggccuggagcucacauuaaccaacacuucuauaaucaaucauaaauucugcaaccugucggaugcgcacaagaaaaaucuuuacgaccaugcuuugaugucaauuaucagcacauuucaccugaguauuccaaacuucaaucaguaugaggccauguccugugauuuuaacggugggaagaucucuguucaguacaaucuaagccacaccuaugcaguggacgccgcuaaccauugcggaacgauagcaaauggcguccuccaaacuuucaugaggauggccuggggcggguccuacauugcucuggauucaggaaaggguaguugggacuguaucaugaccagcuaccaguaucuuauuauccagaacacaacuugggaagaucacugccaguuuucucggccgucccccaucggcuaccugggguugcucucacaacgcacccgagacauuuauauaagccguagacuguuaggaacauucaccuggacgcugagugauucugaguccaacgaaacuccuggcgguuacugucucacaagguggaugcuuaucgaggccgagcugaaaugcuuugggaauaccgcgguggcaaaguguaacgaaaaacaugacgaggaguucugcgauauguugcggcuauuugacuucaauaagcaggccauucgcagacugaaagcugaagcccagaugagcauccagcucauaaacaaggcaguaaaugcucugauuaacgaucaacuuaucaugaagaaucaccugagggacaucaugggcauuccauauugcaacuacucgaaauauugguacuugaaucacacuguuacaggacggaccucucucccccgcuguuggcugguguccaacggcucauacuuaaaugaaacgcauuucagugacgauaucgagcagcaggccgacaacaugauuaccgagcugcuacaaaaggaauauauggaucgacaggggaaaacaccucucggacuggucgaccuuuuuguguucagcacuuccuuuuacuugauaucuaucuuccugcaccucgugaagauuccaacccauagacacgucaucgguaaacccugcccuaagccacauaggcugaaucacaugggcaucuguagcugcgggcuuuauaaacacccgggaguucccgugaaguggaagcggugaggacuagucccuguucccagagcccacuuuuuuuucuuuuuuugaaauaaaauagccugucuuucagaucuaaaaaaaaaaaaaaaaaaaaaaaaaaaaaaaaaaaaaaaaaaaaaaaaaaaaaaaaaaaaaaaaugcaucccccccccccccccccccccccccccccccaaaggcucuuuucagagccaccagaauu

SEQ ID NO: 2398 - RNA, 1749 nt, Artificial Sequence
  mRNA product Design a-1 comprising derived and/or modified sequence from LASV(LASV035-NIG-2009;Clade II)__AIT17588__GPC (opt3)
gggagagucccgcagucggcguccagcggcucugcuuguucgugugugugucguugcaggccuuauucaagcuuaccaugggccagaucauuaccuucuuucaagaggugccccacgucauagaagagguuaugaacaucgugcugauugcccucagccuucuggcuaucuugaaggggauuuacaauguagcaacaugcggauuauucggucugguguccuuucuacuccuguguggcagaucuugcucaacuacguauaaaggggucuacgaacuucagacccuggaguuggacauggccagucucaacaugacaaugccucugagcuguacuaagaauaacucccaucacuauaucauggugggaaaugaaaccggccuggagcucacauuaaccaacacuucuauaaucaaucauaaauucugcaaccugucggaugcgcacaagaaaaaucuuuacgaccaugcuuugaugucaauuaucagcacauuucaccugaguauuccaaacuucaaucaguaugaggccauguccugugauuuuaacggugggaagaucucuguucaguacaaucuaagccacgcauaugccguggacgcugcaaaccauugcggaaccauagccaauggcguccuccaaacguucaugaggauggcuuggggcggguccuacauugcccuggauucaggaaaggguaguugggacuguaucaugacuagcuaccaguaucuuauuauccagaacaccacaugggaagaucacugccaguuuucucggccgucccccaucggcuaccugggguugcucucacaacgcacucgagacauuuauauaagccguagacuguuaggaaccuucacauggacccugagugauucugagggcaacgaaacgccugguggguacugucucacuagguggaugcuuaucgaggcggagcugaaaugcuuuggaaauacagcaguggccaaguguaacgaaaaacaugacgaggaguucugcgauauguugcggcuauuugacuucaauaagcaggcuauucgcagacugaaagccgaagcacagauguccauccagcucauaaacaaggcuguaaaugcccugauuaacgaucaacuuaucaugaagaaucaccugagggacaucaugggcauuccauauugcaacuacagcaaauauugguacuugaaucacaccguuacuggcaagacaucgcucccccgguguuggcuggugucuaacggguccuacuuaaaugaaacccauuucucagacgauaucgagcagcaggcggacaacaugauuacggagcugcuacaaaaagaauauauagaucgccagggaaagaccccucucggucuggucgaccuuuuuguguucaguacuagcuuuuacuugaucuccauuuuccugcaccucgugaaaaucccaacacaucgacacgucaucggcaagcccugcccuaaaccacauagacugaaucacauggggauuuguucuugcggacuuuauaagcacccgggcguucccgugaaguggaaaaggugaggacuagucccuguucccagagcccacuuuuuuuucuuuuuuugaaauaaaauagccugucuuucagaucuaaaaaaaaaaaaaaaaaaaaaaaaaaaaaaaaaaaaaaaaaaaaaaaaaaaaaaaaaaaaaaaaugcaucccccccccccccccccccccccccccccccaaaggcucuuuucagagccaccagaauu

SEQ ID NO: 2399 - RNA, 1749 nt, Artificial Sequence
  mRNA product Design a-1 comprising derived and/or modified sequence from LASV(LASV1000-NIG-2009;Clade II)__AIT17782__GPC (opt3)
gggagagucccgcagucggcguccagcggcucugcuuguucgugugugugucguugcaggccuuauucaagcuuaccaugggccagaucauuaccuucuuucaagaggugccccacgucauagaagagguuaugaacaucgugcugauugcccucagccuucuggcuaucuugaaggggauuuacaauguagcaacaugcggauuauucggucugguguccuuucuacuccuguguggcagaucuugcucaacuacguauaaaggggucuacgaacuucagacccuggaguuggacauggccagucucaacaugacaaugccucugagcuguacuaagaauaacucccaucacuauaucauggugggaaaugaaaccggccuggagcucacauuaaccaacacuucuauaaucaaucauaaauucugcaaccugucggaugcgcacaagaaaaaucuuuacgaccaugcuuugaugucaauuaucagcacauuucaccugaguauuccaaacuucaaucaguaugaggccauguccugugauuuuaacggugggaagaucucuguucaguacaaucuaagccacaccuaugcaguggacgccgcuaaccauugcggaacgauagcaaauggcguccuccaaacuuucaugaggauggccuggggcggguccuacauugcucuggauucaggaaaggguaguugggacuguaucaugaccagcuaccaguaucuuauuauccagaacacaacuugggaagaucacugccaguuuucucggccgucccccaucggcuaccugggguugcucucacaacgcacccgagacauuuauauaagccguagacuguuaggaacauucaccuggacgcugagugauucugagggcaacgaaacuccugguggguacugucucacaagguggaugcuuaucgaggccgagcugaaaugcuuuggaaauaccgcgguggcaaaguguaacgaaaaacaugacgaggaguucugcgauauguugcggcuauuugacuucaauaagcaggccauuaaacgccugaagacugaagcucagauguccauccagcucauaaacaaggccguaaaugcacugauuaacgaucaacuuaucaugaaaaaucaccugagagacaucaugggcauuccauauugcaacuacagcaaguauugguacuugaaucacacaguuaccggcaaaacgucgcuccccagguguuggcuggugucuaacggguccuacuuaaaugaaacccauuucucagacgauaucgagcagcaggcugacaacaugauuacagagcugcuacaaaaggaauauauagaucggcagggaaaaacuccucucggucuggucgaccuuuuuguguucaguaccagcuuuuacuugaucuccauuuuccugcaccucgugaagaucccaacacaucgccacgucguuggcaaacccugcccuaagccacaucgacugaaucacauggggaucuguucuugcggacuuuauaagcacccgggcgugcccguaaaauggaagagaugaggacuagucccuguucccagagcccacuuuuuuuucuuuuuuugaaauaaaauagccugucuuucagaucuaaaaaaaaaaaaaaaaaaaaaaaaaaaaaaaaaaaaaaaaaaaaaaaaaaaaaaaaaaaaaaaaugcaucccccccccccccccccccccccccccccccaaaggcucuuuucagagccaccagaauu

SEQ ID NO: 2400 - RNA, 1749 nt, Artificial Sequence
  mRNA product Design a-1 comprising derived and/or modified sequence from LASV(LASV221-NIG-2010;Clade II)__AIT17624__GPC (opt3)
gggagagucccgcagucggcguccagcggcucugcuuguucgugugugugucguugcaggccuuauucaagcuuaccaugggccagaucauuaccuucuuucaagaggugccccacgucauagaagagguuaugaacaucgugcugauugcccucagccuucuggcuaucuugaaggggauuuacaauguagcaacaugcggauuauucggucugguguccuuucuacuccuguguggcagaucuugcucaacuacguauaaaggggucuacgaacuucagacccuggaguuggacauggccagucucaacaugacaaugccucugagcuguacuaagaauaacucccaucacuauaucauggugggaaaugaaaccggccuggagcucacauuaaccaacacuucuauaaucaaucauaaauucugcaaccugucggaugcgcacaagaaaaaucuuuacgaccaugcuuugaugucaauuaucagcacauuucaccugaguauuccaaacuucaaucaguaugaggccauguccugugauuuuaacggugggaagaucucuguucaguacaaucuaagccacaccuaugcaauagacgccgcuaaccauugcggaacgauugcaaauggcgugcuccaaacuuucaugaggauggccuggggcggguccuacaucgcucuggauucaggaaaggguaguugggacuguauuaugaccagcuaccaguaucuuaucauccagaacacaacuugggaagaucacugccaguuuucucggccgucccccauuggcuaccugggguugcucucacaacgcacccgagacauauauaucagccguagacuguuaggaacauucaccuggacgcugagugauucugagggcaacgaaacuccugguggguacugucucacaagguggaugcuuauugaggccgagcugaaaugcuuuggaaauaccgcggucgcaaaguguaacgaaaaacaugacgaggaguucugcgauauguugcggcuauuugacuucaauaagcaggccauccgcagacugaaaacugaagcucagauguccauacagcucauuaacaaggccgugaaugcacugaucaacgaucaacuuaucaugaagaaucaccugagggacauuaugggcaucccauauugcaacuacagcaaauauugguacuugaaucacacaguaaccggcaagacgucgcucccccgguguuggcugguuucuaacggguccuacuuaaaugaaacccauuucucagacgauauugagcagcaggcugacaacaugauaacagagaugcugcaaaaagaauauauggaucgccagggaaagacuccucuaggucucguggaccuguuugucuucaguaccagcuuuuaccuuaucuccauuuucuugcaccuggugaaaaucccaacacaucgacacgugaucggcaagcccugcccuaaaccacauagacucaaucacauggggauuuguucuugcggacuguauaagcacccgggcguccccguuaaguggaaaaggugaggacuagucccuguucccagagcccacuuuuuuuucuuuuuuugaaauaaaauagccugucuuucagaucuaaaaaaaaaaaaaaaaaaaaaaaaaaaaaaaaaaaaaaaaaaaaaaaaaaaaaaaaaaaaaaaaugcaucccccccccccccccccccccccccccccccaaaggcucuuuucagagccaccagaauu

SEQ ID NO: 2401 - RNA, 1749 nt, Artificial Sequence
  mRNA product Design a-1 comprising derived and/or modified sequence from LASV(LASV237-NIG-2010;Clade II)__AIT17638__GPC (opt3)
gggagagucccgcagucggcguccagcggcucugcuuguucgugugugugucguugcaggccuuauucaagcuuaccaugggccagaucauuaccuucuuucaagaggugccccacgucauagaagagguuaugaacaucgugcugauugcccucagccuucuggcuaucuugaaggggauuuacaauguagcaacaugcggauuauucggucugguguccuuucuacuccuguguggcagaucuugcucaacuacguauaaaggggucuacgaacuucagacccuggaguuggacauggccagucucaacaugacaaugccucugagcuguacuaagaauaacucccaucacuauaucauggugggaaaugaaaccggccuggagcucacauuaaccaacacuucuauaaucaaucauaaauucugcaaccugucggaugcgcacaagaaagaccuuuacgaucaugcuuugaugucaauuaucagcacauuucaccugaguauuccaaauuucaaccaguaugaggccauguccugugacuuuaauggugggaagaucucuguucaguacaaccuaagccacaccuaugcaguggaugccgcuaaucauugcggaacgauagcaaacggcguccuccaaacuuucaugaggauggccuggggcggguccuacauugcucuggacucaggaaaggguaguugggauuguaucaugaccagcuaccaguaucuuauuauccagaauacaacuugggaagaccacugccaguuuucucggccgucccccaucggcuaccugggguugcucucacaacgcacccgagauauuuauauaagccguagacuguuaggaacauucaccuggacgcugagugacucugagggcaacgaaacuccugguggguacugucucacaagguggaugcuuaucgaggccgagcugaaaugcuuuggaaacaccgcgguggcaaaguguaaugaaaaacaugaugaggaguucugcgacauguugcggcuauuugauuucaacaagcaggccauucgcagacugaaaacugaagcucagauguccauccagcucauaaauaaggccguaaacgcacugauuaaugaccaacuuaucaugaagaaccaccugagggacaucaugggcauuccauauugcaauuacagcaaauauugguacuugaaccacacaguuaccggcaagacgucgcucccccgguguuggcuggugucuaauggguccuacuuaaacgaaacccauuucucagaugacaucgagcagcaggcugauaauaugauuacagagcugcuacaaaaagaauauauggaccgccagggaaagacuccucucggucuggucgaucuuuuuguguucaguaccagcuuuuacuugauauccaucuuccugcaccucauuaaaaucccaacacaucgacacaucacuggcaagcccugcccuaaaccacauagacugaaccacauggggauuuguucuugcggacuuuauaagcacccgggcgugcccgucaaguggaaaaggugaggacuagucccuguucccagagcccacuuuuuuuucuuuuuuugaaauaaaauagccugucuuucagaucuaaaaaaaaaaaaaaaaaaaaaaaaaaaaaaaaaaaaaaaaaaaaaaaaaaaaaaaaaaaaaaaaugcaucccccccccccccccccccccccccccccccaaaggcucuuuucagagccaccagaauu

SEQ ID NO: 2402 - RNA, 1749 nt, Artificial Sequence
  mRNA product Design a-1 comprising derived and/or modified sequence from LASV(LASV253-NIG-2011;Clade II)__AIT17670__GPC (opt3)
gggagagucccgcagucggcguccagcggcucugcuuguucgugugugugucguugcaggccuuauucaagcuuaccaugggccagaucauuaccuucuuucaagaggugccccacgucauagaagagguuaugaacaucgugcugauugcccucagccuucuggcuaucuugaaggggauuuacaauguagcaacaugcggauuauucggucugguguccuuucuacuccuguguggcagaucuugcucaacuacguauaaaggggucuacgaacuucagacccuggaguuggacauggccagucucaacaugacaaugccucugagcuguacuaagaauaacucccaucacuauaucauggugggaaaugaaaccggccuggagcucacauuaaccaacacuucuauaaucaaucauaaauucugcaaccugucggaugcgcacaagaaaaaucuuuacgaccaugcuuugaugucaauuaucagcacauuucaccugaguauuccaaacuucaaucaguaugaggccauguccugugauuuuaacggugggaagaucucuguucaguacaaucuaagccacaccuaugcaguggacgccgcuaaccauugcggaacgauagcaaauggcguccuccaaacuuucaugaggauggccuggggcggguccuacauugcucuggauucaggaaaggguaguugggacuguaucaugaccagcuaccaguaucuuauuauccagaacacaacuugggaagaucacugccaguuuucucggccgucccccaucggcuaccugggguugcucucacaacgcacccgagacauuuauauaagccguagacuguuaggaacauucaccuggacgcugagugauucugagggcaacgaaacuccugguggguacugucucacaagguggaugcuuaucgaggccgagcugaaaugcuuuggaaauaccgcgguggcaaaguguaacgaaaaacaugacgaggaguucugcgauauguugcggcuauuugacuucaauaagcaggccauucgcagacugaaagcugaagcccagauguccauccagcucauaaacaaggcaguaaaugcucugauuaacgaucaacuuaucaugaagaaucaccugagggacaucaugggcauuccauauugcaacuacagcaaauauugguacuugaaucacacuguuacaggccggaccucgcucccccgcuguuggcuggugucuaacggguccuacuuaaaugaaacgcauuucucagacgauaucgagcagcaggccgacaacaugauuaccgagcugcuacaaaaggaauauauagaucgacagggaaaaacaccucucggucuggucgaccuuuuuguguucaguacuagcuuuuacuugaucuccauuuuccugcaccucgugaagaucccaacccauagacacaucauuggcaaacccugcccuaagccacauaggcugaaucacauggggauauguucuugcggacuuuauaaacacccgggcguccccguuaaguggaagcggugaggacuagucccuguucccagagcccacuuuuuuuucuuuuuuugaaauaaaauagccugucuuucagaucuaaaaaaaaaaaaaaaaaaaaaaaaaaaaaaaaaaaaaaaaaaaaaaaaaaaaaaaaaaaaaaaaugcaucccccccccccccccccccccccccccccccaaaggcucuuuucagagccaccagaauu

SEQ ID NO: 2403 - RNA, 1749 nt, Artificial Sequence
  mRNA product Design a-1 comprising derived and/or modified sequence from LASV(LASV254-NIG-2011;Clade II)__AIT17674__GPC (opt3)
gggagagucccgcagucggcguccagcggcucugcuuguucgugugugugucguugcaggccuuauucaagcuuaccaugggccagaucauuaccuucuuucaagaggugccccacgucauagaagagguuaugaacaucgugcugauugcccucagccuucuggcuaucuugaaggggauuuacaauguagcaacaugcggauuauucggucugguguccuuucuacuccuguguggcagaucuugcucaacuacguauaaaggggucuacgaacuucagacccuggaguuggacaugacaaaccucaauaugacuaugccucugaguuguaccaagaacaauagccaucacuauaucauggugggaaacgaaacaggccuggagcucaccuuaacuaauacauccauaaucaaccauaaauucugcaaucugucugaugcccacaagaaaaaccuuuacaaucaugcguugaugucgauuaucucaaccuuucaccugagcauuccaaacuucaaucaguaugaggcuaugaguugugacuuuaacggugggaagaucuccguucaguacaaucuaucucacagcuaugccguggaugcagccaaccauugcggaacgauagcuaacggcguccuccaaacuuucaugaggauggcauggggcggguccuacauugcccuggacucaggaaaggguaauugggauuguaucaugaccaguuaccaguaucuuauuauccagaacacaacuugggaagaccacugccaguuuagccggccgucucccaucggcuaccugggguugcucucccaacgcacccgagauauuuauauaucacguagacuguuaggaacauucaccuggacgcugagcgacagugagggcaaugaaacuccugguggguacugucucacaagguggaugcuuaucgaggcugagcugaaaugcuuuggaaacaccgccguggcgaaguguaaugaaaaacaugaugaggaguucugcgacauguugcggcuauuugauuucaacaagcaggcaauucgcagacugaaaacugaagcccaggcuaauauccagcucauaaacaaggccguaaaugcacugauuaacgaccaacuuaucaugaagaaucaccugagggauaucaugggcauuccauauugcaacuacucuaaauauugguacuugaaucacacaguuaccggcaagacgucccucccccgguguuggcuggugagcaacgggucguacuuaaaugaaacccauuucucugacgacaucgagcagcaggcugauaacaugauuacagagcugcuacaaaaagaauauauggaccgccagggaaagacuccucucggucuggucgaucuuuuuguguucuccaccucauuuuacuugauaaguaucuuccugcaccucgugaaaauuccaacacaucgacacgucaucggcaagcccugcccuaaaccacauagacugaaccacauggggaucuguagcugcggacuuuauaagcacccgggcguucccgugaaguggaaaaggugaggacuagucccuguucccagagcccacuuuuuuuucuuuuuuugaaauaaaauagccugucuuucagaucuaaaaaaaaaaaaaaaaaaaaaaaaaaaaaaaaaaaaaaaaaaaaaaaaaaaaaaaaaaaaaaaaugcaucccccccccccccccccccccccccccccccaaaggcucuuuucagagccaccagaauu

SEQ ID NO: 2404 - RNA, 1749 nt, Artificial Sequence
  mRNA product Design a-1 comprising derived and/or modified sequence from LASV(Nig08-A19;Clade III)__ADU56618__GPC (opt3)
gggagagucccgcagucggcguccagcggcucugcuuguucgugugugugucguugcaggccuuauucaagcuuaccaugggccagaucgugaccuucuuucaagaggucccccacguuauugaagaggugaugaacauaguacugaucgcccucagcauucuugcuauccugaagggguuguacaauauugcaacaugcggauuaaucggucuggugacuuuccuacuccuguccggcagaucuuguucaaugacguauaaaggggucuacgaacuucagacccuggaguugaacaugaauacacucaacaugacuaugccucugaguugcaccaagaauaacagccaucacuauauaauggugggaaaugaaacaggccuggagcucaccuuaacuaacacaucccugcuucaucacaaauuuuguaauuugucugacgcccauaagaaaaaccuguacgaucacacccuaaugucgaucauuucaacguuccaccucagcaucccaaauuuuaaccaguaugaggcgaugaguugcgacuucaauggugggaagauuacuguucaguacaaccugucccauucuuaugcuaucgaugccgcaaaucacuguggaaccguggccaacggcguccuucaaacauuuaugaggauggcuuggggcgggagcuacauagcacuggacuccggacgggguaagugggauugcauuaugacuucauaccaguauuugaucauucagaacaccacaugggaagaccauugucaguucagucgcccgagccccaucggcuaccucgggcuguuaucucaacgaacccgugauaucuauauuuccagaaggcugcucggaacguuuacuuggacacuuucagacagcgagggcaaugaaaccccugguggguacugccugacucgguggauguugauagaggccgagcuaaaauguuucggaaacacagcuguggccaagugcaaugaaaaacacgaugaggaauuuugugacaugcugcgccucuucgauuuuaacaagcaggcgaucagaaggcugaaagcagaggcccagaugaguauucagcuuaucaauaaggcuguaaacgcccugauaaaugaccaauugauuaugaagaaccaccuccgggauaucaugggcaucccauauugcaauuacucuaaauauugguaccugaaccauaccuccacgggccgcaccagcuuaccccgaugcuggcugguuucgaaugggucuuaccuaaacgaaacacacuucuccgacgacauugagcagcaggcagauaauaugaucacugagaugcuccaaaaggaauaucuggacagacagggaaaaaccccucuugguuugguggaucuguucgucuuuucaacaaguuucuaccucauuagcauauuucugcaucuugugaagaucccaacucacaggcauauugugggcaaacccuguccuaagccacaccggcugaaccacauggggaucugcuccuguggauuguauaaacagccgggcguccccguucguuggaagcgcugaggacuagucccuguucccagagcccacuuuuuuuucuuuuuuugaaauaaaauagccugucuuucagaucuaaaaaaaaaaaaaaaaaaaaaaaaaaaaaaaaaaaaaaaaaaaaaaaaaaaaaaaaaaaaaaaaugcaucccccccccccccccccccccccccccccccaaaggcucuuuucagagccaccagaauu

SEQ ID NO: 2405 - RNA, 1752 nt, Artificial Sequence
  mRNA product Design a-1 comprising derived and/or modified sequence from LASV(G1180-SLE-2010;Clade IV)__AIT17168__GPC (opt3)
gggagagucccgcagucggcguccagcggcucugcuuguucgugugugugucguugcaggccuuauucaagcuuaccaugggccagaucgugaccuucuuucaagaggucccccacguuauugaagaggugaugaacauaguacugaucgcccucagcauucuugcugugcugaagggguuguacaauuucgcaacaugcggauuagucggucugcuaacuuuucuccugcuuuguggcagauccugcacggccucuagguauaaagggguguacgaacugcagaccuuggagcucaacauggaaacacugaauaugacuaugccucugucauguaccaagaacaauagucaucacuauaucaugguuggaaacgagacaggccucgaguuaacccugacuaauacaagcauuaucaaccauaaauucugcaaucuuuccgacgcgcacaagaaaaacuuguacgaucaugcucugaugucuauaaucucgaccuuucaccuaucaauuccaaauuucaaccaguaugaagccaugagcugugacuuuaauggugggaagaucagugugcaguacaaccucucccacucuuaugcaggagaugccgcuaaucauugcggcacggucgcaaacggcgugcugcaaacuuucaugcggauggccuggggagggagcuacauugcucuugacuccggucacggcucaugggauuguaucaugaccaguuaccaguaucugauaauucagaacacaacuugggaggaccauugccaguuuagccgcccgucucccaucggguacuugggacuccugucccaacgaacccgugauauuuauaucucaagaagguuacugggcacauucaccuggacgcucagcgacagugaagguaaggauacuccugggggauacugucuuacacgguggaugcugaucgaggccgaguugaaaugcuuuggcaauaccgcgguagcaaaguguaacgaaaaacacgacgaggaguucugcgauaugcuacgccuguuugacuucaauaagcaggccauucagagacucaaagcugaagcccagaugucuauacaacugaucaacaaggcaguuaaugcucuuauuaacgaucagcugaucaugaagaaucacuugagggacauaaugggcauuccauauugcaacuacuccaaauauugguaccucaaucauacuacaaccgggaagacgagccugcccaaauguugguuagugucgaacggaucuuaccugaaugaaacccacuucuccgacgauaucgagcagcaagccgacaacaugaucacagagaugcuacagaaggaauauauggagcggcaggguaaaacuccucucggccuggucgaucuuuuuguguucucaaccaguuuuuacuugauuagcaucuuccugcaucucgugaagauuccaacacaccgccauauagucgggaaauccugccccaagccucaccgacugaaucacaugggaaucuguucuugcggccuuuauaagcagccagguguuccggugaaauggaagagaugaggacuagucccuguucccagagcccacuuuuuuuucuuuuuuugaaauaaaauagccugucuuucagaucuaaaaaaaaaaaaaaaaaaaaaaaaaaaaaaaaaaaaaaaaaaaaaaaaaaaaaaaaaaaaaaaaugcaucccccccccccccccccccccccccccccccaaaggcucuuuucagagccaccagaauu

SEQ ID NO: 2406 - RNA, 1752 nt, Artificial Sequence
  mRNA product Design a-1 comprising derived and/or modified sequence from LASV(G1442-SLE-2011;Clade IV)__AIT17180__GPC (opt3)
gggagagucccgcagucggcguccagcggcucugcuuguucgugugugugucguugcaggccuuauucaagcuuaccaugggccagaucgugaccuucuuucaagaggucccccacguuauugaagaggugaugaacauaguacugaucgcccucagcauucuugcugugcugaagggguuguacaaugucgcaacaugcggauuaaucggucuggugacuuuccuacuccuguguggcagauccugcacgaccacacuuuauaaagggguuuacgaacugcagacuuuggagcucaacauggaaacccugaauaugacaaugccucugucuuguaccaagaacaauucacaucacuauauuagggugggaaacgagacuggccucgaguuaacacugaccaauacgaguaucauaaaccauaaauuuugcaaucuuagcgacgcccacaagaaaaacuuguacgaucaugcgcugauguccaucauuucuacuuuccaccuaucgaucccaaauuuuaaccaguaugaagcuaugucaugugacuucaauggugggaagauuagcguccaguacaaccucagucacuccuaugccggagaugcagccaaucauugcggcaccguggcuaacggcguacugcaaacauuuaugcggauggcauggggagggucuuacaucgcccuugacagcggucgcggcaacugggauuguauaaugacuuccuaccaguaucugauuauccagaauaccacaugggacgaucacugccaguucucacgaccgagucccauuggguacuugggacuccugagccaacguaccagagacguuuauaucucuaggcgguuacugggcacguuuacuuggacacucuccgauucagaggguaaggacaccccugggggauacugucuuacucgcuggaugcugaucgaagcugaguugaaaugcuucggcaacacagccguggcgaaguguaaugagaaacaugaugaagaguuuugcgacaugcuaagacuguucgauuuuaacaagcaggcaauucagaggcucaaagccgaagcucagaugagcauacaacugaucaauaaggccgucaacgcacuuauuaaugaccagcugaucaugaagaaccacuugcgggacauaaugggcauuccauauugcaauuacaguaaauauugguaccucaacaauaccgcuacggggaagaccucucugcccaaauguugguuaaucuccaacggaagcuaccugaaugagacacacuucucggaugacaucgaacaggaggccgauaacaugauuacugagaugcuacaaaaggaauauauggagcgccaggguaaaaccccucucggccugguggaccuuuucguguuuucuacauccuucuacuugaucucaauuuuucugcaucucgucaagauaccaacucaccgacauaucguugggaaaaguugccccaagccucacagacugaaucauaugggaauuuguagcugcggccuuuauaagcagccaggugugccgguaagguggaaacggugaggacuagucccuguucccagagcccacuuuuuuuucuuuuuuugaaauaaaauagccugucuuucagaucuaaaaaaaaaaaaaaaaaaaaaaaaaaaaaaaaaaaaaaaaaaaaaaaaaaaaaaaaaaaaaaaaugcaucccccccccccccccccccccccccccccccaaaggcucuuuucagagccaccagaauu

SEQ ID NO: 2407 - RNA, 1752 nt, Artificial Sequence
  mRNA product Design a-1 comprising derived and/or modified sequence from LASV(G3010-SLE-2013;Clade IV)__AIT17344__GPC (opt3)
gggagagucccgcagucggcguccagcggcucugcuuguucgugugugugucguugcaggccuuauucaagcuuaccaugggccagaucgugaccuucuuucaagaggucccccacguuauugaagaggugaugaacauaguacugaucgcccucagcauucuugcugugcugaagggguuguacaauuucgcaacaugcggauuagucggucuggugacuuuucuacuccuguguggcagauccugcacgaccucucuuuauaaagggguuuacgaacugcagacauuggagcucaacauggaaacucugaauaugaccaugccucugucauguacaaagaacaauagucaucacuauaucauggugggaaacgagaccggccucgaguuaacucugacaaauaccagcauuaucaaccauaaauucugcaaucuuuccgacgcccacaagaaaaacuuguacaaucaugcgcugaugucuauaaucucgacguuucaccuaucaauuccaaacuucaaucaguaugaagcuaugagcugugauuuuaacggugggaagaucaguguccaguacaaucucucccacucuuaugccggagacgcagccagccauugcggcacuguggcuaacggcguacugcaaaccuucaugaggauggcauggggaggguccuacauugcccuugauucagguuacggcaagugggacuguaucaugacaaguuaucaguaccugauaauucagaacacuaccugggaggaucacugccaguuuagccggccgucucccaucggguauuugggacuccugucccaacgcacacgagacauuuacaucucacguagauuacugggcaccuucacguggacucucagcgauagugaagguaaagacacaccugggggauauugucuuaccagguggaugcugaucgaggcugaguugaagugcuuuggcaauacugccguugcgaaauguaacgaaaagcaugaugaggaguucugcgacaugcuacggcuguuugauuucaauaaacaggcaauucagcgccucaagacagaagcccagaugucuauacaacugaucaacaaggcugugaaugcccuuauuaacgaccagcugaucaugaaaaaucacuugagagauauaaugggcauuccauacugcaacuauuccaaguacugguaccucaaucacaccacgaccgggaaaacaagccugcccaaguguugguuagucucgaacggaucuuaucugaaugaaacucauuucuccgacgacaucgagcagcaagcagauaacaugaucaccgagaugcuacagaaagaauacauggagaggcaggguaagacaccucucggccugguggaccuuuuuguguucucaaccaguuuuuauuugauuagcaucuuccugcaccucgucaaaauuccaacucaucggcacauaguugggaaguccugccccaagccucaucgccugaaucacaugggaaucuguucuugcggccuuuacaaacagccaggugugccgguacgauggaagagaugaggacuagucccuguucccagagcccacuuuuuuuucuuuuuuugaaauaaaauagccugucuuucagaucuaaaaaaaaaaaaaaaaaaaaaaaaaaaaaaaaaaaaaaaaaaaaaaaaaaaaaaaaaaaaaaaaugcaucccccccccccccccccccccccccccccccaaaggcucuuuucagagccaccagaauu

SEQ ID NO: 2408 - RNA, 1752 nt, Artificial Sequence
  mRNA product Design a-1 comprising derived and/or modified sequence from LASV(G502-SLE-2009;Clade IV)__AIT17126__GPC (opt3)
gggagagucccgcagucggcguccagcggcucugcuuguucgugugugugucguugcaggccuuauucaagcuuaccaugggccagaucgugaccuucuuucaagaggucccccacguuauugaagaggugaugaacauaguacugaucgcccucagcauucuugcugugcugaagggguuguacaauuucgcaacaugcggauuagucggucugcuaacuuuucuccugcuuuguggcagauccugcacgaccgggcuguauaaaggaguguacgaauugcagacacucgagcugaacauggaaacucugaauaugaccaugccucucucuuguacaaagaacaauucacaucacuauaucaugguuggcaacgagaccgguuuagagcugacucuuacaaauaccaguauuaucaaccauaaauucugcaauuugagcgacgcccacaagaaaaaccuguacgaucaugcgcuaauguccauaaucucuacguuucaccucucgauuccaaauuucaaccaguaugaagcuaugucaugugacuuuaaugggggaaagaucagcgugcaguacaaccugagucacuccuaugccggcgaugcagccgaccauugcggcacugucgcuaauggggugcuucaaaccuucaugaggauggcauggggagguucuuacauugcccuggauagcggccgggggcgcugggacuguaucaugacauccuaccaguauuugauaauucagaacacuaccugggaggaucacugccaguuuucacgaccgagucccaucggauaccucggccuguuaagccaacguacaagagacauuuauaucucuaggcggcugcucgguaccuucacguggacucuuuccgauucagaagggaaggacacaccuggaggcuacugucugacccgcuggauguugaucgaggcugagcuaaaaugcuuuggcaacacugccguagcgaaguguaaugaaaaacaugaugaggaguucugcgacaugcugagacucuuugauuucaacaagcaggcaauucagaggcugaaagccgaagcucagaugagcauacaacuuaucaauaaggccguuaacgcacugauuaaugaccaguuggugaugaagaaccaccuccgggacaucauggggauaccauauugcaauuacagucgcuauugguaccugaaccacacaaccacgggacgaaccucuuuacccaaauguuggcuggucuccaaugguagcuaccuaaacgaaacacauuucucggaugacauugagcagcaagcugauaauaugaucacugagaugcuccagaaggaauauauggagagacagggcaaaaccccucuggggcuuguggacuuguuuguguucucuacauccuuuuaccugaucucaauuuuccuccaccuggucaagaucccaacucauaggcacauuguuggaaaaaguugccccaagccucaucggcuuaaccacaugggcauauguagcugcggucuguauaaacagccaggggugccgguaaaguggaagcguugaggacuagucccuguucccagagcccacuuuuuuuucuuuuuuugaaauaaaauagccugucuuucagaucuaaaaaaaaaaaaaaaaaaaaaaaaaaaaaaaaaaaaaaaaaaaaaaaaaaaaaaaaaaaaaaaaugcaucccccccccccccccccccccccccccccccaaaggcucuuuucagagccaccagaauu

SEQ ID NO: 2409 - RNA, 1752 nt, Artificial Sequence
  mRNA product Design a-1 comprising derived and/or modified sequence from LASV(G733-SLE-2010;Clade IV)__AIT17154__GPC (opt3)
gggagagucccgcagucggcguccagcggcucugcuuguucgugugugugucguugcaggccuuauucaagcuuaccaugggccagaucgugaccuucuuucaagaggucccccacguuauugaagaggugaugaacauaguacugaucgcccucagcauucuugcugugcugaagggguuguacaauuucgcaacaugcggaaucgucgguuuaguguccuuucugcuacucuguggcagaucuugcacuacgucacuguauaaagggguuuacgaacuucagacccuggaguugaacauggaaacacucaauaugacuaugccucugaguuguaccaagaacaauagccaucacuauauuauggugggaaacgagacaggccuggagcucaccuuaacuaauacauccaucauaaaccauaaauucugcaaucugucugacgcccacaagaaaaaccuuuacgaucaugcguugaugucgaucauuucaaccuuucaccugagcaucccaaauuucaaccaguaugaagcuaugaguugugacuuuaauggugggaagauuuccguccaguacaaccuaucucacagcuaugccggagaugcagccaaucauugcggcacgaucgcuaacggcgugcuccaaacuuucaugaggauggcauggggaggguccuacauagcccuggacucaggucgggaucgcugggacuguauuaugaccaguuaccaguaucuuaucauucagaacacaacuugggaggaucacugccaguuuagccgaccgucucccaucggcuaccugggguugcucucccaacguaccagagacaucuauauuucaaggcggcuguuaggaacauucaccuggacgcugagcgauagugaaggcaaggacacuccugguggguacugucucacacgcuggaugcuuauagaggcugagcugaaaugcuuuggaaauaccgccguagcgaaguguaacgaaaaacaugaugaggaguucugcgacauguugagacuauuugauuucaauaagcaggcaauccagaggcugaaagccgaagcucagaugucuauucaacucaucaacaaggccguuaaugcacugauaaacgaccagcuuauuaugaagaaucaucugcgggacaucaugggcaucccauauugcaacuacuccaaauauugguacuugaaucacacuacaaccggcaagacgagccuccccaaauguuggcuggugucgaacgggucuuacuuaaaugaaacccacuucuccgaugacauugagcagcaagcugauaacaugaucacagagaugcugcagaaggaauauauggagcgccagggaaaaacuccucuaggucucgucgaccuguuuguguucucaaccaguuuuuaccuuauuagcauauucuugcaccuggugaagaucccaacacaucgacacgucguuggcaaauccugccccaagccucauagacucaaucacauggggauuuguucuugcggacuguauggccagccaggugugccgguaaaguggaaaaggugaggacuagucccuguucccagagcccacuuuuuuuucuuuuuuugaaauaaaauagccugucuuucagaucuaaaaaaaaaaaaaaaaaaaaaaaaaaaaaaaaaaaaaaaaaaaaaaaaaaaaaaaaaaaaaaaaugcaucccccccccccccccccccccccccccccccaaaggcucuuuucagagccaccagaauu

SEQ ID NO: 2410 - RNA, 1752 nt, Artificial Sequence
  mRNA product Design a-1 comprising derived and/or modified sequence from MOPV/LASV reassortant(IGS-1;Clade IV)__AFY05576__GPC (opt3)
gggagagucccgcagucggcguccagcggcucugcuuguucgugugugugucguugcaggccuuauucaagcuuaccaugggccagaucgugaccuucuuucaagaggucccccacguuauugaagaggugaugaacauaguacugaucgcccucagcgugcuugcuguccugaagggguuguacaauuucgcaacaugcggauuagugggucugguuacuuuucuacuccuguguggcagauccugcacgaccucucuuuauaaagggguguacgaacugcagacauuggagcucaacauggaaacucugaauaugaccaugccucugucauguacaaagaacaauagucaucacuauauuauggucggaaacgagaccggccucgaguuaacucugacaaauaccagcaucauuaaccauaaauucugcaaucuuuccgacgcccacaagaaaaacuuguacgaucaugcgcugaugucuaucauaucgacguuucaccuaucaaucccaaauuucaaccaguaugaagcuaugagcugugacuuuaauggugggaagauuagugugcaguacaaccucucccacucuuaugccggagaugcagccaaucauugcggcacuguagcuaacggcguucugcaaaccuucaugaggauggcauggggagggagcuacaucgcccuugacuccggucggggcaacugggauuguauuaugacaucauaccaguaucugaucauacagaauacuaccugggaggaccacugccaguuuagucgcccgagccccauuggguacuugggacuccugucucaacgaacacgugauaucuauauuuccagaagguuacugggcaccuucacguggacucucucagacagcgaaggugaggauacaccugggggauacugucuuacccgguggaugcugaucgaggcugaauugaagugcuuuggcaacacugccguggcgaaauguaaugagaagcaugacgaagaguucugcgauaugcuacgccuguuugacuucaacaaacaggcaauccagagacucaaggccgaagcucagaugaguauucaacugauaaauaaagccgucaacgcacuuaucaaugaucagcugauuaugaagaaccacuugagggacaucaugggcauaccauauugcaauuacucuaaguauugguaccucaaccacacaaccacggggcggaccucccugcccaaauguugguuagugagcaauggaucguaccugaacgagacacauuucucugacgauauugagcagcaagcugacaauaugaucacugaaaugcuacagaaggaguauauggaacgccaggguaaaaccccucucggccugguggaucuuuuugucuucuccacaucauuuuacuugaucaguauuuuccugcaccucguuaagaucccaacucaucgacacauuguggggaaaagcugccccaagccucauagacugaaccacaugggaauauguuccugcggccuuuauaaacagccagguguaccggugaaguggaagaggugaggacuagucccuguucccagagcccacuuuuuuuucuuuuuuugaaauaaaauagccugucuuucagaucuaaaaaaaaaaaaaaaaaaaaaaaaaaaaaaaaaaaaaaaaaaaaaaaaaaaaaaaaaaaaaaaaugcaucccccccccccccccccccccccccccccccaaaggcucuuuucagagccaccagaauu

SEQ ID NO: 2411 - RNA, 1752 nt, Artificial Sequence
  mRNA product Design a-1 comprising derived and/or modified sequence from LASV(LM765-SLE-2012;Clade IV)__AIT17814__GPC (opt3)
gggagagucccgcagucggcguccagcggcucugcuuguucgugugugugucguugcaggccuuauucaagcuuaccaugggccagaucgugaccuucuuucaagaggucccccacguuauugaagaggugaugaacauaguacugaucgcccucagcauucuugcugugcugaagggguuguacaauuucgcaacaugcggauuagucggucuggugacuuuucuacuccuguguggcagauccugcacgaccucucuuuauaaagggguuuacgaacugcagacauuggagcucaacauggaaacucugaauaugaccaugccucugucauguacaaagaacaauagucaucacuauaucauggugggaaacgagaccggccucgaguuaacucugacaaauaccagcauuaucgaccauaaauucugcaaccuuuccgaugcccacaggaagaauuuguacgaccaugcgcugaugucuauaaucucgacguuucaccuaucaauuccaaacuucaaucaguaugaagcuaugagcugugauuuuaacggugggaaaaucaguguccaguacaaucucucccacucuuaugccaaggacgcagccgaucauugcggaacuguggcuaacggcguacugcaaaccuucaugcggauggcauggggcgggagcuacauugcccuugacuccggacgcggucgaugggauuguaucaugacaucauaccaguaucugauaauucagaauacuaccugggaggaccacugccaguuuagucguccgagccccaucggcuacuuggggcuccugucucaaagaacaagggauauuuauaucucccggcgcuuacugggaaccuucacguggacucucucagacagcgaaggcaaggauacaccugguggguacugucuuaccagauggaugcugaucgaggcugaguugaaaugcuuuggaaacacugccguugcgaaguguaacgaaaaacaugacgaggaguucugcgauaugcuaaggcuguuugacuucaauaagcaggcaauucagcggcucaaagccgaagcucagaugaguauacaacugaucaacaaggccgugaaugcacuuauuaacgaccagcugaucaugaagaaucacuugcgcgauauaaugggcauuccauauugcaacuacucuaaauauugguaccucaaucacacaaccacgggcaagaccucccugcccaaauguugguuagucagcaacgggucguaccugaaugaaacacauuucucugacgauaucgagcagcaagcugacaacaugaucacugagaugcuacagaaggaauauauggagcgacagggaaaaaccccucucggucugguggaucuuuuuguguucuccacaucauuuuacuugauuaguaucuuccugcaccucgucaagauuccaacucauagacacauaguuggcaaacccugcccuaagccacauaggcugaaucacauggggaucuguagcugcggacuuuauaagcagccgggcgugcccguaaaauggaagcggugaggacuagucccuguucccagagcccacuuuuuuuucuuuuuuugaaauaaaauagccugucuuucagaucuaaaaaaaaaaaaaaaaaaaaaaaaaaaaaaaaaaaaaaaaaaaaaaaaaaaaaaaaaaaaaaaaugcaucccccccccccccccccccccccccccccccaaaggcucuuuucagagccaccagaauu

SEQ ID NO: 2412 - RNA, 1752 nt, Artificial Sequence
  mRNA product Design a-1 comprising derived and/or modified sequence from LASV(LM776-SLE-2012;Clade IV)__AIT17824__GPC (opt3)
gggagagucccgcagucggcguccagcggcucugcuuguucgugugugugucguugcaggccuuauucaagcuuaccaugggccagaucgugaccuucuuucaagaggucccccacguuauugaagaggugaugaacauaguacugaucgcccucagcauucuugcugugcugaagggguuguacaauuucgcaacaugcggauuagucggucuggugacuuuucuacuccuguguggcagauccugcacgaccucuguuuauaaagggguguacgaacuucagacacuggaguugaacauggaaacucucaauaugaccaugccucugucauguacaaagaacaauagucaucacuauaucauggucggaaacgagaccggccuggagcucacuuuaacaaauaccagcauuaucaaccauaaauucugcaaucuguccgacgcccacaagaaaaaccuuuacgaucaugcguugaugucuauaaucucgacguuucaccugucaauuccaaauuucaaccaguaugaagcuaugagcugugacuuuaauggugggaagaucagugugcaguacaaccuaucccacucuuaugccggagaugcagccaaucauugcggcacuguagcuaacggcguucuccaaaccuucaugaggauggcauggggagggagcuacauugcccuggacuccggucacggcaagugggauuguaucaugacaucauaccaguaucuuauaauucagaacacuaccugggaggaccauugccaguuuagucggccgagccccaucggguaccugggauugcucucucaacgcacacgagauauuuauaucucccguagacuguuaggcaccuucacguggacucugucagacagcgaagguaaagauacaccugggggauacugucucaccagguggaugcuuaucgaggcugagcugaagugcuuuggcaauacugccguggcgaaauguaacgaaaagcacgacgaggaguucugcgauauguugcggcuauuugacuucaauaaacaggcaauucagcgccugaaggccgaagcucagaugaguauacaacucaucaacaaggccgucaaugcacugauuaacgaucagcuuaucaugaaaaaucaccugagagacauaaugggcauuccauauugcaacuacucuaaguauugguacuugaaucauacaaccacggggaaaaccucccuccccaaguguuggcuggugagcaacggaucguacuuaaaugaaacacacuucucugacgauaucgagcagcaagcugacaacaugaucacugagaugcugcagaaagaauauauggagaggcaggguaagaccccucuaggccucguggaucuguuugucuucuccacaucauuuuaccuuauuaguaucuucuugcaucugguuaaaauuccaacucaccggcauauagugggaaagagcugccccaagccucaccgccucaaucacauggggaucuguuccugcggccuguauaaacagccagguguaccggugcgauggaagagaugaggacuagucccuguucccagagcccacuuuuuuuucuuuuuuugaaauaaaauagccugucuuucagaucuaaaaaaaaaaaaaaaaaaaaaaaaaaaaaaaaaaaaaaaaaaaaaaaaaaaaaaaaaaaaaaaaugcaucccccccccccccccccccccccccccccccaaaggcucuuuucagagccaccagaauu

SEQ ID NO: 2413 - RNA, 1752 nt, Artificial Sequence
  mRNA product Design a-1 comprising derived and/or modified sequence from LASV(Mad39;Clade IV)__ANH09722__GPC (opt3)
gggagagucccgcagucggcguccagcggcucugcuuguucgugugugugucguugcaggccuuauucaagcuuaccaugggccagaucgugaccuucuuucaagaggucccccacguuauugaagaggugaugaacauaguacugaucgcccucagcauucuugcugugcugaagggguuguacaaugucgcaacaugcggauuaaucggucuggugacuuuccuacuccuguguggcagauccugcacgaccacacuuuauaaagggguuuacgaacugcaggccuuggagcucaacauggaaacucugaauaugaccaugccucugucuuguacaaagaacaauucacaucacuauauuagggugggaaacgagaccggccucgaguuaacucugacaaauaccagucuuaucaaccauaaauuuugcaauuugagcgacgcgcacaagaaaaaccuguacgaucaugcucuaauguccauaaucucuacguuccaccucucgauuccaaauuuuaaccaguaugaagccaugucaugugacuucaaugaugguaagaucagcguccaguacaaccugagucacacuuaugcaggggacaccgccaaucauugcggaacaguggcuaacggcguacuucaaacuuuuaugcggauggcauggggcggguccuacauugcccuggauucuggacgcgguggcugggacuguaucaugaccagcuaccaguauuugauaauucagaacacaaccugggaggaucacugccaguucucccgaccgucacccaucggguaccucggacuguuaagucaacguacgagagacauuuauaucagcaggcggcugcucggcacuuuuacauggacccuuucugauuccgaagguaaggacacuccugggggauacugucugacacgcuggauguugaucgaggcugagcuaaaaugcuucggcaauaccgccguugcgaaguguaacgaaaaacaugaugaggaauuuugcgacaugcugagacucuucgauuuuaauaagcaggcaauucagaggcugaaagccgaggcucagaugucaauacaacuuaucaacaaggccgugaaugcacugauuaacgaccaguugaucaugaagaaucaccuccgggacauaaugggcauuccauauugcaacuacagcaaauauugguaccugaaucacacggucaccgggaagacaaguuuacccaaauguuggcuggugucuaacggauccuaccuaaaugaaacucauuucagcgaugacaucgagcagcaagcugauaacaugaucaccgagaugcuccagaaggaauauauggagcgccaggguaaaacaccucugggccuuguggacuuguucgucuuuucgacuucuuucuaccugauuuccaucuuucuccaccugguuaagauuccaacccaucgacacgugguagggaaacccugcccuaagccacauagacuuaaucacaugggaauauguucaugcggcuucuauaagcagccgggugugcccgucagguggaaacggugaggacuagucccuguucccagagcccacuuuuuuuucuuuuuuugaaauaaaauagccugucuuucagaucuaaaaaaaaaaaaaaaaaaaaaaaaaaaaaaaaaaaaaaaaaaaaaaaaaaaaaaaaaaaaaaaaugcaucccccccccccccccccccccccccccccccaaaggcucuuuucagagccaccagaauu

SEQ ID NO: 2414 - RNA, 1752 nt, Artificial Sequence
  mRNA product Design a-1 comprising derived and/or modified sequence from LASV(Z0947-SLE-2011;Clade IV)__AIT17840__GPC (opt3)
gggagagucccgcagucggcguccagcggcucugcuuguucgugugugugucguugcaggccuuauucaagcuuaccaugggccagaucgugaccuucuuucaagaggucccccacguuauugaagaggugaugaacauaguacugaucgcccucagcauucuugcugugcugaagggguuguacaauuucgcaacaugcggauuagucggucuggugacuuuucuacuccuguguggcagauccugcacgaucucucuuuauaaagggguuuacgaacugcagaccuuggagcucaacauggaaacacugaauaugacuaugccucugucauguaccaagaacaauagucaucacuauauuauggugggaaacgagacaggccucgaguuaacccugacuaauacaagcaucauaaaccauaaauucugcaaucuuuccgacgcccacaagaaaaacuuguacgaucaugcgcugaugucuaucauuucgaccuuucaccuaucaaucccaaauuucaaccaguaugaagcuaugagcugugacuuuaauggugggaagauuaguguccaguacaaccucucccacucuuaugccggagaugcagccaaucauugcggcacgguggcuaacggcguacugcaaacuuucaugaggauggcauggggagggagcuacaucgcccuugacuccggucgggaucgcugggacuguauaaugaccucauaccaguaucugauuauccagaacacaacuugggaggaucacugccaguuuagucgaccgagccccauuggcuacuuggggcuccugucucaacguaccagagacaucuauaucuccaggcgguuacugggaacauucaccuggacgcucucagauagcgaaggcaaggacacuccugguggguacugucuuacacgcuggaugcugauugaggcugaguugaaaugcuuuggaaauaccgccguugcgaaguguaacgaaaaacaugaugaggaguucugcgacaugcuaagacuguuugauuucaauaagcaggcaauacagaggcucaaagccgaagcucagaugaguauccaacugauuaacaaggccgugaaugcacuuaucaacgaccagcugauaaugaagaaucacuugcgggacauuaugggcaucccauauugcaacuacucuaaauauugguaccucaaucacacuacaaccggcaagacgucccugcccaaauguugguuagucagcaacgggucguaccugaaugaaacccauuucucugaugacaucgagcagcaagcugauaacaugauuacagagaugcuacagaaggaauauauggagcgccagggaaaaacuccucucggucugguggaccuuuuuguguucuccaccucauuuuacuugaucaguauuuuccugcaccucgucaagauaccaacacaucgacacaucguuggcaaacccugcccuaagccacauagacugaaucacauggggauuuguagcugcggacuuuauaagcagccgggcgugcccguaaaauggaagaggugaggacuagucccuguucccagagcccacuuuuuuuucuuuuuuugaaauaaaauagccugucuuucagaucuaaaaaaaaaaaaaaaaaaaaaaaaaaaaaaaaaaaaaaaaaaaaaaaaaaaaaaaaaaaaaaaaugcaucccccccccccccccccccccccccccccccaaaggcucuuuucagagccaccagaauu

SEQ ID NO: 2415 - RNA, 1752 nt, Artificial Sequence
  mRNA product Design a-1 comprising derived and/or modified sequence from LASV(Josiah;Clade IV)__NP_694870__GPC (opt4)
gggagagucccgcagucggcguccagcggcucugcuuguucgugugugugucguugcaggccuuauucaagcuuaccaugggccagaucgugaccuucuuccaggaggugccccacgugaucgaggaggugaugaacaucgugcugaucgcccugagcgugcuggccgugcugaagggccuguacaacuucgccaccugcggccuggugggccuggugaccuuccugcugcugugcggcagaagcugcaccaccagccuguacaagggcguguacgagcugcagacccuggagcugaacauggagacccugaacaugaccaugccccugagcugcaccaagaacaacagccaccacuacaucauggugggcaacgagaccggccuggagcugacccugaccaacaccagcaucaucaaccacaaguucugcaaccugagcgacgcccacaagaagaaccuguacgaccacgcccugaugagcaucaucagcaccuuccaccugagcauccccaacuucaaccaguacgaggccaugagcugcgacuucaacggcggcaagaucagcgugcaguacaaccugagccacagcuacgccggcgacgccgccaaccacugcggcaccguggccaacggcgugcugcagaccuucaugagaauggccuggggcggcagcuacaucgcccuggacagcggcagaggcaacugggacugcaucaugaccagcuaccaguaccugaucauccagaacaccaccugggaggaccacugccaguucagcagacccagccccaucggcuaccugggccugcugagccagagaaccagagacaucuacaucagcagaagacugcugggcaccuucaccuggacccugagcgacagcgagggcaaggacacccccggcggcuacugccugaccagauggaugcugaucgaggccgagcugaagugcuucggcaacaccgccguggccaagugcaacgagaagcacgacgaggaguucugcgacaugcugagacuguucgacuucaacaagcaggccauccagagacugaaggccgaggcccagaugagcauccagcugaucaacaaggccgugaacgcccugaucaacgaccagcugaucaugaagaaccaccugagagacaucaugggcauccccuacugcaacuacagcaaguacugguaccugaaccacaccaccaccggcagaaccagccugcccaagugcuggcuggugagcaacggcagcuaccugaacgagacccacuucagcgacgacaucgagcagcaggccgacaacaugaucaccgagaugcugcagaaggaguacauggagagacagggcaagaccccccugggccugguggaccuguucguguucagcaccagcuucuaccugaucagcaucuuccugcaccuggugaagauccccacccacagacacaucgugggcaagagcugccccaagccccacagacugaaccacaugggcaucugcagcugcggccuguacaagcagcccggcgugcccgugaaguggaagagaugaggacuagucccuguucccagagcccacuuuuuuuucuuuuuuugaaauaaaauagccugucuuucagaucuaaaaaaaaaaaaaaaaaaaaaaaaaaaaaaaaaaaaaaaaaaaaaaaaaaaaaaaaaaaaaaaaugcaucccccccccccccccccccccccccccccccaaaggcucuuuucagagccaccagaauu

SEQ ID NO: 2416 - RNA, 1749 nt, Artificial Sequence
  mRNA product Design a-1 comprising derived and/or modified sequence from LASV(LP;Clade I)__AAF86701__GPC (opt4)
gggagagucccgcagucggcguccagcggcucugcuuguucgugugugugucguugcaggccuuauucaagcuuaccaugggccagaucaucaccuucuuccaggaggugccccacgugaucgaggaggugaugaacaucgugcugaucgcccugagccugcuggccauccugaagggccuguacaacaucgccaccugcggcaucaucggccugguggccuuccuguuccugugcggcaagagcugcagccugacccugaagggcggcuacgagcugcagacccuggagcugaacauggagacccugaacaugaccaugccccugagcugcaccaagaacagcagccaccacuacaucagagugggcaacgagaccggccuggagcugacccugaccaacaccagcaucaucaaccacaaguucugcaaccugagcgacgcccacaagaagaaccuguacgaccacgcccugaugagcaucaucagcaccuuccaccugagcauccccaacuucaaccaguacgaggccaugagcugcgacuucaacggcggcaagaucagcgugcaguacaaccugagccacagcuacgccggcgacgccgccgagcacugcggcaccguggccaacggcgugcugcagaccuucaugagaauggccuggggcggcagauacaucgcccuggacagcggcaagggcaacugggacugcaucaugaccagcuaccaguaccugaucauccagaacaccaccugggaggaccacugccaguucagcagacccagccccaucggcuaccugggccugcugagccagagaaccagagacaucuacaucagcagaagacugcugggcaccuucaccuggacccugagcgacagcgagggcaacgagacccccggcggcuacugccugaccagauggaugcugaucgaggccgagcugaagugcuucggcaacaccgccguggccaagugcaacgagaagcacgacgaggaguucugcgacaugcugagacuguucgacuucaacaagcaggccaucagaagacugaaggccgaggcccagaugagcauccagcugaucaacaaggccgugaacgcccugaucaacgaccagcugaucaugaagaaccaccugagagacaucaugggcauccccuacugcaacuacagcaaguacugguaccugaaccacaccagcagcggcagaaccagccugcccaagugcuggcugaucagcaacggcagcuaccugaacgagacccaguucagcgacgacaucgagcagcaggccgacaacaugaucaccgagaugcugcagaaggaguacaucgagagacagggcaagaccccccugggccugguggacaucuucaucuucagcaccagcuucuaccugaucagcaucuuccugcaccugaucaagauccccacccacagacacaucgugggcaagcccugccccaagccccacagacugaaccacaugggcgugugcagcugcggccuguacaagcaccccggcgugcccaccaaguggaagagaugaggacuagucccuguucccagagcccacuuuuuuuucuuuuuuugaaauaaaauagccugucuuucagaucuaaaaaaaaaaaaaaaaaaaaaaaaaaaaaaaaaaaaaaaaaaaaaaaaaaaaaaaaaaaaaaaaugcaucccccccccccccccccccccccccccccccaaaggcucuuuucagagccaccagaauu

SEQ ID NO: 2417 - RNA, 1749 nt, Artificial Sequence
  mRNA product Design a-1 comprising derived and/or modified sequence from LASV(803213;Clade II)__AAF86703__GPC (opt4)
gggagagucccgcagucggcguccagcggcucugcuuguucgugugugugucguugcaggccuuauucaagcuuaccaugggccagaucaucaccuucuuccaggaggugccccacgugaucgaggaggugaugaacaucgugcugaucgcccugagccugcuggccauccugaagggcaucuacaacguggccaccugcggccuguucggccugaucagcuuccugcugcugugcggcagaagcugcagcgugaccuacaagggcguguacgagcugcagacccuggagcugaacauggccaaccugaacaugaccaugccccugagcugcaccaagaacaacagccaccacuacaucauggugggcaacgagaccggccuggagcugacccugaccaacaccagcaucaucaaccacaaguucugcaaccugagcgacgcccacaagaagaaccuguacgaccacgcccugaugagcaucaucagcaccuuccaccugagcauccccaacuucaaccaguacgaggccaugagcugcgacuucaacggcggcaagaucagcgugcaguacaaccugagccacagcuucgccguggacgccgccaaccacugcggcaccaucgccaacggcgugcugcagaccuucaugagaauggccuggggcggcagcuacaucgcccuggacagcggcaagggcaacugggacugcaucaugaccagcuaccaguaccugaucauccagaacaccaccugggaggaccacugccaguucagcagacccagccccaucggcuaccugggccugcugagccagagaaccagagacaucuacaucagcagaagacugcugggcaccuucaccuggacccugagcgacagcgagggcaacgaggcccccggcggcuacugccugaccagauggaugcugaucgaggccgagcugaagugcuucggcaacaccgccguggccaagugcaacgagaagcacgacgaggaguucugcgacaugcugagacuguucgacuucaacaagcaggccaucaagagacugaagaccgaggcccagaugagcauccagcugaucaacaaggccgugaacgcccugaucaacgaccagcugaucaugaagaaccaccugagagacaucaugggcauccccuacugcaacuacagcagauacugguaccugaaccacaccgugaccggcaagaccagccugcccagaugcuggcuggugagcaacggcagcuaccugaacgagacccacuucagcgacgacaucgagcagcaggccgacaacaugaucaccgagaugcugcagaaggaguacauggacagacagggcaagaccccccugggccugguggaccuguucguguucagcaccagcuucuaccugaucagcaucuuccugcaccuggugaagauccccacccacagacacaucgugggcaagcccugccccaagccccacagacugaaccacaugggcaucugcagcugcggccuguacaagcaccccggcgugcccgugaaguggaagagaugaggacuagucccuguucccagagcccacuuuuuuuucuuuuuuugaaauaaaauagccugucuuucagaucuaaaaaaaaaaaaaaaaaaaaaaaaaaaaaaaaaaaaaaaaaaaaaaaaaaaaaaaaaaaaaaaaugcaucccccccccccccccccccccccccccccccaaaggcucuuuucagagccaccagaauu

SEQ ID NO: 2418 - RNA, 1749 nt, Artificial Sequence
  mRNA product Design a-1 comprising derived and/or modified sequence from LASV(GA391;Clade III)__CAA36645__GPC (opt4)
gggagagucccgcagucggcguccagcggcucugcuuguucgugugugugucguugcaggccuuauucaagcuuaccaugggccagaucgugaccuucuuccaggaggugccccacgugaucgaggaggugaugaacaucgugcugaucgcccugagcauccuggccauccugaagggccuguacaacguggccaccugcggccugaucggccuggugaccuuccugcugcugagcggcagaagcugcagccugaucuacaagggcaccuacgagcugcagacccuggagcugaacauggagacccugaacaugaccaugccccugagcugcaccaagaacaacagccaccacuacaucagagugggcaacgagaccggccuggagcugacccugaccaacaccagcauccugaaccacaaguucugcaaccugagcgacgcccacaagagaaaccuguacgaccacagccugaugagcaucaucagcaccuuccaccugagcauccccaacuucaaccaguacgaggccaugagcugcgacuucaacggcggcaagaucaccgugcaguacaaccugagccacagcuucgccguggacgccgccggccacugcggcacccuggccaacggcgugcugcagaccuucaugagaauggccuggggcggcagcuacaucgcccuggacagcggcagaggcaacugggacugcaucaugaccagcuaccaguaccugaucauccagaacaccaccugggacgaccacugccaguucagcagacccagccccaucggcuaccugggccugcugagccagagaaccagagacaucuacaucagcagaagacugcugggcaccuucaccuggacccugagcgacagcgagggcaacgagacccccggcggcuacugccugaccagauggaugcugaucgaggccgagcugaagugcuucggcaacaccgccguggccaagugcaacgagaagcacgacgaggaguucugcgacaugcugagacuguucgacuucaacaagcaggccaucagaagacugaagaccgaggcccagaugagcauccagcugaucaacaaggccgugaacgcccugaucaacgaccagcugaucaugaagaaccaccugagagacaucaugggcauccccuacugcaacuacagcagauacugguaccugaaccacaccagcaccggcaagaccagccugcccagaugcuggcugaucagcaacggcagcuaccugaacgagaccaaguucagcgacgacaucgagcagcaggccgacaacaugaucaccgagaugcugcagaaggaguacaucgacagacagggcaagaccccccugggccugguggaccuguucguguucagcaccagcuucuaccugaucagcaucuuccugcaccuggugaagauccccacccacagacacaucgugggcaagcccugccccaagccccacagacugaaccacaugggcaucugcagcugcggccuguacaagcagcccggcgugcccgugagauggaagagaugaggacuagucccuguucccagagcccacuuuuuuuucuuuuuuugaaauaaaauagccugucuuucagaucuaaaaaaaaaaaaaaaaaaaaaaaaaaaaaaaaaaaaaaaaaaaaaaaaaaaaaaaaaaaaaaaaugcaucccccccccccccccccccccccccccccccaaaggcucuuuucagagccaccagaauu

SEQ ID NO: 2419 - RNA, 1752 nt, Artificial Sequence
  mRNA product Design a-1 comprising derived and/or modified sequence from LASV(AV;Clade V)__CCA30314__GPC (opt4)
gggagagucccgcagucggcguccagcggcucugcuuguucgugugugugucguugcaggccuuauucaagcuuaccaugggccagaucgugaccuucuuccaggaggugccccacgugaucgaggaggugaugaacaucgugcugaucgcccugagcauccuggccgugcugaagggccuguacaacaucgccaccugcggccugaucggccugaucaccuuccugcugcugugcggcagaagcugcagcagcaaccuguacaagggcguguacgagcugcagagccuggaccugaacauggagacccugaacaugaccaugccccugagcugcaccaagaacaacagccaccacuacaucagagugggcaacgacaccggccuggagcugacccugaccaacaccagcauccugaaccacaaguucugcaaccugagcgacgcccacaagaaggaccuguacgaccacgcccugaugagcaucaucagcaccuuccaccugagcauccccaacuucaaccaguacgaggccaugagcugcgacuucaacggcggcaagaucagcgugcaguacaaccugagccacagcuacgccaucgacgccgccaaccacugcggcaccguggccaacggcauccugcagaccuucaugagaauggccuggggcggcagcuacaucgcccuggacagcggcagaggcaacugggacugcaucaugaccagcuaccaguaccugaucauccagaacaccaccugggagaaccacugccaguucagcagacccagccccaucggcuaccugggccugcugagccagagaaccagagacaucuacaucagcagaagacugcugggcaccuucaccuggacccugagcgacagcgagggcaacgccacccccggcggcuacugccugaccagauggaugcugaucgaggccgagcugaagugcuucggcaacaccgccguggccaagugcaacgagaagcacgacgaggaguucugcgacaugcugagacuguucgacuucaacaagcaggccaucagcagacugaagagcgaggcccagaugagcauccagcugaucaacaaggccgugaacgcccugaucaacgaccagcugaucaugaagaaccaccugagagacaucaugggcauccccuacugcaacuacagcaaguacugguaccugaaccacaccaucaccggcaagaccagccugcccaagugcuggcuggugagcaacggcagcuaccugaacgagacccacuucagcgacgacaucgagcagcaggccgacaacaugaucaccgagaugcugcagaaggaguacauggagagacagggcaagaccccccugggccugguggaccuguucguguucagcaccagcuucuaccugaucagcaucuuccugagacuggugaagauccccacccacagacacaucgugggcaagcccugccccaagccccacagacugaaccacaugggcaucugcagcugcggccuguacaagcagcccggcgugcccgugagauggaagagaugaggacuagucccuguucccagagcccacuuuuuuuucuuuuuuugaaauaaaauagccugucuuucagaucuaaaaaaaaaaaaaaaaaaaaaaaaaaaaaaaaaaaaaaaaaaaaaaaaaaaaaaaaaaaaaaaaugcaucccccccccccccccccccccccccccccccaaaggcucuuuucagagccaccagaauu

SEQ ID NO: 2420 - RNA, 1749 nt, Artificial Sequence
  mRNA product Design a-1 comprising derived and/or modified sequence from LASV(Togo/2016/7082;Clade VI)__AMR44577__GPC (opt4)
gggagagucccgcagucggcguccagcggcucugcuuguucgugugugugucguugcaggccuuauucaagcuuaccaugggccagaucaucaccuucuuccaggaggugccccacgugaucgaggaggugaugaacaucgugcugaucgcccugagccugcuggccauccugaagggcguguacaacguggccaccugcggcaucaucggccuggugaccuuccuguuccugugcggcagaagcugcagccugaucuacaagggcagcuacgagcugcagacccuggagcugaacauggagacccugaacaugaccaugccccugagcugcaccaagaacagcagccaccacuacaucagagugggcaacgagaccggccuggagcugacccugaccaacaccagcaucaucaaccacaaguucugcaaccugagcgacgcccacaagagaaaccuguacgaccacgcccugaugagcauccugagcaccuuccaccugagcauccccaacuucaaccaguacgaggccaugagcugcgacuucaacggcggcaagaucagcgugcaguacaaccugagccacgccuacgccguggacgccgccgagcacugcggcaccguggccaacggcgugcugcagaccuucaugagaauggccuggggcggcagcuacaucgcccuggacagcggcagaggcaacugggacugcaucaugaccagcuaccaguaccugaucauccagaacaccaccugggaggaccacugccaguucagcagacccagccccaucggcuaccugggccugcugagccagagaaccagagacaucuacaucagcagaagacugcugggcaccuucaccuggacccugagcgacagcgagggcaacgagacccccggcggcuacugccugaccagauggaugcugaucgaggccgagcugaagugcuucggcaacaccgccguggccaagugcaacgagaagcacgacgaggaguucugcgacaugcugagacuguucgacuucaacaagcaggccauccagagacugaagagcgaggcccagaugagcauccagcugaucaacaaggccgugaacgcccugaucaacgaccagcugaucaugaagaaccaccugagagacaugaugggcauccccuacugcaacuacagcaaguacugguaccugaaccacaccagcagcggcagaaccagccugcccaagugcuggcuggugagcaacggcagcuaccugaacgagacccacuucagcgacgacaucgagcagcaggccgacaacaugaucaccgagaugcugcagaaggaguacaucgacagacagggcaagaccccccugggccugguggaccuguucguguucagcaccagcuucuaccugaucagcaucuuccugcaccugaucaagauccccacccacagacacaucgugggcaagcccugccccaagccccacagacugaaccacaugggcaucugcagcugcggccuguacaagcagcccggcgugcccaccagauggaagagaugaggacuagucccuguucccagagcccacuuuuuuuucuuuuuuugaaauaaaauagccugucuuucagaucuaaaaaaaaaaaaaaaaaaaaaaaaaaaaaaaaaaaaaaaaaaaaaaaaaaaaaaaaaaaaaaaaugcaucccccccccccccccccccccccccccccccaaaggcucuuuucagagccaccagaauu

SEQ ID NO: 2421 - RNA, 1749 nt, Artificial Sequence
  mRNA product Design a-1 comprising derived and/or modified sequence from LASV(KAK-428;Clade n.d. (VII))__ANH09740__GPC (opt4)
gggagagucccgcagucggcguccagcggcucugcuuguucgugugugugucguugcaggccuuauucaagcuuaccaugggccagaucgugaccuucuuccaggaggugccccacgugaucgaggaggugaugaacaucgugcugaucgcccugagccugcuggccauccugaagggccuguacaacuucgccaccugcggcgugaucggccugaucaccuuccugcugcugugcggcagaagcugcagcgccaccuacaagggccaguacgagcugcagacccuggagcugaacauggagagccugaacaugaccaugccccugagcugcaccaagaacaacagccaccacuacaucagagccggcaacaacaccggccuggagcugacccugaccaacaccagcaucaucagccacaaguucugcaaccugagcgacgcccacaagaagaaccuguacgaccacacccugaugagcaucaucaccaccuuccaccugagcauccccaacuucaaccaguacgaggccaugagcugcgacuucaacggcggcaagaucagcauccaguacaaccugagccacagcuacgccggcgacgccgcccagcacugcggcaccguggccaacggcgugcugcagaccuucaugagaauggccuggggcggcagcuaccuggcccuggacagcggcagaagaggcugggacugcaucaucagcagcuaccaguaccugaucauccagaacaccaccugggacgaccacugccaguucagcagacccagccccaucggcuaccugggcuucgugagccagaagaccagagacaucuacaucagcagaagacugcugggcaccuucaccuggacccugagcgacagcgagggccacgacaugcccggcggcuacugccugaccagauggaugcugaucgaggccgaccugaagugcuucggcaacaccgccguggccaagugcaacgagaagcacgacgaggaguucugcgacauguggagacuguucgacuucaacaagcaggccauccagagacugaaggccgaggcccagaugaacauccagcugaucaacaaggccgugaacgcccugaucaacgaccagcugaugaugaagaaccaccugagagacaucaugggcauccccuacugcaacuacagcaaguucugguaccugaacaacaccaccaccggcagaaccagccugcccagaugcuggcugaucagcaacggcagcuaccugaacgagacccacuucagcgacgacaucgagcagcaggccgacaacaugaucaccgagaugcugcagaaggaguacauggacagacagggcaagaccccccugggccugguggaccuguucguguucagcaccagcuucuaccugaucaccaucuuccugcaccuggugaagauccccacccacagacacaucgugggcaagcccugccccaagccccacagacugaaccacaugggcaucugcagcugcggccuguacaagcagcccggcgugcccgugagauggaagagaugaggacuagucccuguucccagagcccacuuuuuuuucuuuuuuugaaauaaaauagccugucuuucagaucuaaaaaaaaaaaaaaaaaaaaaaaaaaaaaaaaaaaaaaaaaaaaaaaaaaaaaaaaaaaaaaaaugcaucccccccccccccccccccccccccccccccaaaggcucuuuucagagccaccagaauu

SEQ ID NO: 2422 - RNA, 1749 nt, Artificial Sequence; identical to SEQ ID NO: 2416
  mRNA product Design a-1 comprising derived and/or modified sequence from LASV(Pinneo-NIG-1969;Clade I)__AIT17836__GPC (opt4)

SEQ ID NO: 2423 - RNA, 1749 nt, Artificial Sequence
  mRNA product Design a-1 comprising derived and/or modified sequence from LASV(ISTH0009-NIG-2011;Clade II)__AIT17404__GPC (opt4)
gggagagucccgcagucggcguccagcggcucugcuuguucgugugugugucguugcaggccuuauucaagcuuaccaugggccagaucaucaccuucuuccaggaggugccccacgugaucgaggaggugaugaacaucgugcugaucgcccugagccugcuggccauccugaagggcaucuacaacguggccaccugcggccuguucggccuggugagcuuccugcugcugugcggcagaagcugcagcaccaccuacaagggcguguacgagcugcagacccuggagcuggacauggccagccugaacaugaccaugccccugagcugcaccaagaacaacagccaccacuacaucauggugggcaacgagaccggccuggagcugacccugaccaacaccagcaucaucaaccacaaguucugcaaccugagcgacgcccacaagaagaaccuguacgaccacgcccugaugagcaucaucagcaccuuccaccugagcauccccaacuucaaccaguacgaggccaugagcugcgacuucaacggcggcaagaucagcgugcaguacaaccugagccacgccuacgccguggacgccgccaaccacugcggcaccaucgccaacggcgugcugcagaccuucaugagaauggccuggggcggcagcuacaucgcccuggacagcggcaagggcagcugggacugcaucaugaccagcuaccaguaccugaucauccagaacaccaccugggaggaccacugccaguucagcagacccagccccaucggcuaccugggccugcugagccagagaaccagagacaucuacaucagcagaagacugcugggcaccuucaccuggacccugagcgacagcgagggcaacgagacccccggcggcuacugccugaccagauggaugcugaucgaggccgagcugaagugcuucggcaacaccgccguggccaagugcaacgagaagcacgacgaggaguucugcgacaugcugagacuguucgacuucaacaagcaggccaucagaagacugaagaccgaggcccagaugagcauccagcugaucaacaaggccgugaacgcccugaucaacgaccagcugaucaugaagaaccaccugagagacaucaugggcauccccuacugcaacuacagcaaguacugguaccugaaccacaccgugaccggcaagaccagccugcccagaugcuggcuggugagcaacggcagcuaccugaacgagacccacuucagcgacgacaucgagcagcaggccgacaacaugaucaccgagcugcugcagaaggaguacauggacagacagggcaagaccccccugggccugguggaccuguucguguucagcaccagcuucuaccugaucagcaucuuccugcaccugaucaagauccccacccacagacacaucaccggcaagcccugccccaagccccacagacugaaccacaugggcaucugcagcugcggccuguacaagcaccccggcgugcccgugaaguggaagagaugaggacuagucccuguucccagagcccacuuuuuuuucuuuuuuugaaauaaaauagccugucuuucagaucuaaaaaaaaaaaaaaaaaaaaaaaaaaaaaaaaaaaaaaaaaaaaaaaaaaaaaaaaaaaaaaaaugcaucccccccccccccccccccccccccccccccaaaggcucuuuucagagccaccagaauu

SEQ ID NO: 2424 - RNA, 1749 nt, Artificial Sequence
  mRNA product Design a-1 comprising derived and/or modified sequence from LASV(ISTH2010-NIG-2012;Clade II)__AIT17482__GPC (opt4)
gggagagucccgcagucggcguccagcggcucugcuuguucgugugugugucguugcaggccuuauucaagcuuaccaugggccagaucaucaccuucuuccaggaggugccccacgugaucgaggaggugaugaacaucgugcugaucgcccugagccugcuggccauccugaagggcaucuacaacguggccaccugcggccuguucggccuggugagcuuccugcugcugugcggcagaagcugcagcaccaccuacaagggcguguacgagcugcagacccuggagcuggacauggccagccugaacaugaccaugccccugagcugcaccaagaacaacagccaccacuacaucauggugggcaacgagaccggccuggagcugacccugaccaacaccagcaucaucaaccacaaguucugcaaccugagcgacgcccacaagaagaaccuguacgaccacgcccugaugagcaucaucagcaccuuccaccugagcauccccaacuucaaccaguacgaggccaugagcugcgacuucaacggcggcaagaucagcgugcaguacaaccugagccacgccuacgccguggacgccgccaaccacugcggcaccaucgccaacggcgugcugcagaccuucaugagaauggccuggggcggcagcuacaucgcccuggacagcggcaagggcagcugggacugcaucaugaccagcuaccaguaccugaucauccagaacaucaccugggaggaccacugccaguucagcagacccagccccaucggcuaccugggccugcugagccagagaaccagagacaucuacaucagcagaagacugcugggcaccuucaccuggacccugagcgacagcgagggcaacgagacccccggcggcuacugccugaccagauggaugcugaucgaggccgagcugaagugcuucggcaacaccgccguggccaagugcaacgagaagcacgacgaggaguucugcgacaugcugagacuguucgacuucaacaagcaggccaucagaagacugaagaccgaggcccagaugagcauccagcugaucaacaaggccgugaacgcccugaucaacgaccagcugaucaugaagaaccaccugagagacaucaugggcauccccuacugcaacuacagcaaguacugguaccugaaccacaccgugaccggcaagaccagccugcccagaugcuggcuggugagcaacggcagcuaccugaacgagacccacuucagcgacgacaucgagcagcaggccgacaacaugaucaccgagcugcugcagaaggaguacaucgacagacagggcaagaccccccugggccugguggaccuguucguguucagcaccagcuucuaccugaucagcaucuuccugcaccuggugaagauccccacccacagacacguggugggcaagcccugccccaagccccacagacugaaccacaugggcaucugcagcugcggccuguacaagcaccccggcgugcccgugaaguggaagagaugaggacuagucccuguucccagagcccacuuuuuuuucuuuuuuugaaauaaaauagccugucuuucagaucuaaaaaaaaaaaaaaaaaaaaaaaaaaaaaaaaaaaaaaaaaaaaaaaaaaaaaaaaaaaaaaaaugcaucccccccccccccccccccccccccccccccaaaggcucuuuucagagccaccagaauu

SEQ ID NO: 2425 - RNA, 1749 nt, Artificial Sequence
  mRNA product Design a-1 comprising derived and/or modified sequence from LASV(Lassa virus/H.sapiens-wt/NGA/2015/ISTH_0543;Clade II)__AVO03639__GPC (opt4)
gggagagucccgcagucggcguccagcggcucugcuuguucgugugugugucguugcaggccuuauucaagcuuaccaugggccagaucaucaccuucuuccaggaggugccccacgugaucgaggaggugaugaacaucgugcugaucgcccugagccugcuggccauccugaagggcaucuacaacguggccaccugcggccuguucggccuggugagcuuccugcugcugugcggcagaagcugcagcaccaccuacaagggcguguacgagcugcagacccuggagcuggacauggccaaccugaacaugaccaugccccugagcugcaccaagaacaacagccaccacuacaucauggugggcaacgagaccggccuggagcugacccugaccaacaccagcaucaucaaccacaaguucugcaaccugagcgacgcccacaagaagaaccuguacgaccacgcccugaugagcaucaucagcaccuuccaccugagcauccccaacuucaaccaguacgaggccaugagcugcgacuucaacggcggcaagaucagcgugcaguacaaccugagccacaccuacgccguggacgccgccaaccacugcggcaccaucgccaacggcgugcugcagaccuucaugagaauggccuggggcggcagcuacaucgcccuggacagcggcaagggcagcugggacugcaucaugaccagcuaccaguaccuggugauccagaacaccaccugggaggaccacugccaguucagcagacccagccccaucggcuaccugggccugcugagccagagaaccagagacaucuacaucagcagaagacugcugggcaccuucaccuggacccugagcgacagcgagggcaacgagacccccggcggcuacugccugaccagauggaugcugaucgaggccgagcugaagugcuucggcaacaccgccguggccaagugcaacgagaagcacgacgaggaguucugcgacaugcugagacuguucgacuucaacaagcaggccaucagaagacugaagaccgaggcccagaugagcauccagcugaucaacaaggccgugaacgcccugaucaacgaccagcugaucaugaagaaccaccugagagacaucaugggcauccccuacugcaacuacagcaaguacugguaccugaaccacaccgugaccggcaagaccagccugcccagaugcuggcuggugagcaacggcagcuaccugaacgagacccacuucagcgacgacaucgagcagcaggccgacaacaugaucaccgagcugcugcagaaggaguacaucgacagacagggcaagaccccccugggccugguggaccuguucguguucagcaccagcuucuaccugaucagcaucuuccugcaccuggugaagauccccacccacagacacaucaccggcaagcccugccccaagccccacagacugaaccacaugggcaucugcagcugcggccuguacaagcaccccggcgugcccgugaaguggaagagaugaggacuagucccuguucccagagcccacuuuuuuuucuuuuuuugaaauaaaauagccugucuuucagaucuaaaaaaaaaaaaaaaaaaaaaaaaaaaaaaaaaaaaaaaaaaaaaaaaaaaaaaaaaaaaaaaaugcaucccccccccccccccccccccccccccccccaaaggcucuuuucagagccaccagaauu

SEQ ID NO: 2426 - RNA, 1749 nt, Artificial Sequence
  mRNA product Design a-1 comprising derived and/or modified sequence from LASV(Lassa virus/H.sapiens-wt/NGA/2016/ISTH_0009;Clade II)__AVO03571__GPC (opt4)
gggagagucccgcagucggcguccagcggcucugcuuguucgugugugugucguugcaggccuuauucaagcuuaccaugggccagaucaucaccuucuuccaggaggugccccacgugaucgaggaggugaugaacaucgugcugaucgcccugagccugcuggccauccugaagggcaucuacaacguggccaccugcggccugcugggccuggugagcuuccugcugcugugcggcagaagcugcagcaccaccuacaagggcguguacgagcugcagacccuggagcuggacauggccagccugaacaugaccaugccccugagcugcaccaagaacaacagccaccacuacaucauggugggcaacgagaccggccuggagcugacccugaccaacaccagcaucaucaaccacaaguucugcaaccugagcgacgcccacaagaagaaccuguacgaccacgcccugaugagcaucaucagcaccuuccaccugagcauccccaacuucaaccaguacgaggccaugagcugcgacuucaacggcggcagaaucagcgugcaguacaaccugagccacagcuacgccguggacgccgccaaccacugcggcaccaucgccaacggcgugcugcagaccuucaugagaauggccuggggcggcagcuacaucgcccuggacagcggcaagggcagcugggacugcaucaugaccagcuaccaguaccugaucauccagaacaccaccugggaggaccacugccaguucagcagacccagccccaucggcuaccugggccugcugagccagagaaccagagacaucuacaucagcagaagacugcugggcaccuucaccuggacccugagcgacagcgagggcaacgagacccccggcggcuacugccugaccagauggaugcugaucgaggccgagcugaagugcuucggcaacaccgccguggccaagugcaacgagaagcacgacgaggaguucugcgacaugcugagacuguucgacuucaacaagcaggccaucagaagacugaagaccgaggcccagaugagcauccagcugaucaacaaggccgugaacgcccugaucaacgaccagcugaucaugaagaaccaccugagagacaucaugggcauccccuacugcaacuacagcaaguacugguaccugaaccacaccgugaccggcaagaccagccugcccagaugcuggcuggugagcaacggcagcuaccugaacgagacccacuucagcgacgacaucgagcagcaggccgacaacaugaucaccgagcugcugcagaaggaguacaucgacagacagggcaagaccccccugggccugguggaccuguucguguucagcaccagcuucuaccugaucagcaucuuccugcaccuggugaagauccccacccacagacacaucaccggcaagcccugccccaagccccacagacugaaccacaugggcaucugcagcugcggccuguacaaccaccccggcgugcccgugaaguggaagagaugaggacuagucccuguucccagagcccacuuuuuuuucuuuuuuugaaauaaaauagccugucuuucagaucuaaaaaaaaaaaaaaaaaaaaaaaaaaaaaaaaaaaaaaaaaaaaaaaaaaaaaaaaaaaaaaaaugcaucccccccccccccccccccccccccccccccaaaggcucuuuucagagccaccagaauu

SEQ ID NO: 2427 - RNA, 1749 nt, Artificial Sequence
  mRNA product Design a-1 comprising derived and/or modified sequence from LASV(Lassa virus/H.sapiens-wt/NGA/2016/ISTH_0017;Clade II)__AVO03567__GPC (opt4)
gggagagucccgcagucggcguccagcggcucugcuuguucgugugugugucguugcaggccuuauucaagcuuaccaugggccagaucaucaccuucuuccaggaggugccccacgugaucgaggaggugaugaacaucgugcugaucgcccugagccugcuggccauccugaagggcaucuacaacguggccaccugcggccuguucggccuggugagcuuccugcugcugugcggcagaagcugcagcaccaccuacaagggcguguacgagcugcagacccuggagcuggacauggccagccugaacaugaccaugccccugagcugcaccaagaacaacagccaccacuacaucauggugggcaacgagaccggccuggagcugacccugaccaacaccagcaucaucaaccacaaguucugcaaccugagcgacgcccacaagaagaaccuguacgaccacgcccugaugagcaucaucagcaccuuccaccugagcauccccaacuucaaccaguacgaggccaugagcugcgacuucaacggcggcaagaucagcgugcaguacaaccugagccacaccuacgccaucgacgccgccaaccacugcggcaccaucgccaacggcgugcugcagaccuucaugagaauggccuggggcggcagcuacaucgcccuggacagcggcaagggcagcugggacugcaucaugaccagcuaccaguaccugaucauccagaacaccaccugggaggaccacugccaguucagcagacccagccccaucggcuaccugggccugcugagccagagaaccagagacaucuacaucagcagaagacugcugggcaccuucaccuggacccugagcgacagcgagggcaacgagacccccggcggcuacugccugaccagauggaugcugaucgaggccgagcugaagugcuucggcaacaccgccguggccaagugcaacgagaagcacgacgaggaguucugcgacaugcugagacuguucgacuucaacaagcaggccaucagaagacugaagaccgaggcccagaugagcauccagcugaucaacaaggccgugaacgcccugaucaacgaccagcugaucaugaagaaccaccugagagacaucaugggcauccccuacugcaacuacagcaaguacugguaccugaaccacaccgugaccggcaagaccagccugcccagaugcuggcuggugagcaacggcagcuaccugaacgagacccacuucagcgacgacaucgagcagcaggccgacaacaugaucaccgagcugcugcagaaggaguacauggacagacagggcaagaccccccugggccugguggaccuguucguguucagcaccagcuucuaccugaucagcaucuuccugcaccuggugagaauccccacccacagacacgugaucggcaagcccugccccaagccccacagacugaaccacaugggcaucugcagcugcggccuguacaagcaccccggcgugcccgugaaguggaagagaugaggacuagucccuguucccagagcccacuuuuuuuucuuuuuuugaaauaaaauagccugucuuucagaucuaaaaaaaaaaaaaaaaaaaaaaaaaaaaaaaaaaaaaaaaaaaaaaaaaaaaaaaaaaaaaaaaugcaucccccccccccccccccccccccccccccccaaaggcucuuuucagagccaccagaauu

SEQ ID NO: 2428 - RNA, 1749 nt, Artificial Sequence
  mRNA product Design a-1 comprising derived and/or modified sequence from LASV(Lassa virus/H.sapiens-wt/NGA/2018/ISTH_0959;Clade II)__AVV65099__GPC (opt4)
gggagagucccgcagucggcguccagcggcucugcuuguucgugugugugucguugcaggccuuauucaagcuuaccaugggccagaucaucaccuucuuccaggaggugccccacgugaucgaggaggugaugaacaucgugcugaucgcccugagccugcuggccauccugaagggcaucuacaacguggugaccugcggccuguucggccuggugagcuuccugcugcugugcggcagaagcugcagcaccaccuacaagggcguguacgagcugcagacccuggagcuggacauggccagccugaacaugaccaugccccugagcugcaccaagaacaacagccaccacuacaucauggugggcaacgagaccggccuggagcugacccugaccaacaccagcaucaucaaccacaaguucugcaaccugagcgacgcccacaagaagaaccuguacgaccacgcccugaugagcaucaucagcaccuuccaccugagcauccccaacuucaaccaguacgaggccaugagcugcgacuucaacggcggcaagaucagcgugcaguacaaccugagccacgccuacgccaucgacgccgccaaccacugcggcaccaucgccaacggcgugcugcagaccuucaugagaauggccuggggcggcagcuacaucgcccuggacagcggcaagggcagcugggacugcaucaugaccagcuaccaguaccugaucauccagaacaccaccugggaggaccacugccaguucagcagacccagccccaucggcuaccugggccugcugagccagagaaccagagacaucuacaucagcagaagacugcugggcaccuucaccuggacccugagcgacagcgagggcaacgagacccccggcggcuacugccugaccagauggaugcugaucgaggccgagcugaagugcuucggcaacaccgccguggccaagugcaacgagaagcacgacgaggaguucugcgacaugcugagacuguucgacuucaacaagcaggccaucagaagacugaagaccgaggcccagaugagcauccagcugaucaacaaggccgugaacgcccugaucaacgaccagcugaucaugaagaaccaccugagagacaucaugggcauccccuacugcaacuacagcaaguacugguaccugaaccacaccgugaccggcaagaccagccugcccagaugcuggcuggugagcaacggcagcuaccugaacgagacccacuucagcgacgacaucgagcagcaggccgacaacaugaucaccgagcugcugcagaaggaguacaucgacagacagggcaagaccccccugggccugguggaccuguucguguucagcaccagcuucuaccugaucagcaucuuccugcaccuggugaagauccccacccacagacacgugaucggcaagcccugccccaagccccacagacugaaccacaugggcaucugcagcugcggccuguacaagcaccccggcgugcccgugaaguggaagagaugaggacuagucccuguucccagagcccacuuuuuuuucuuuuuuugaaauaaaauagccugucuuucagaucuaaaaaaaaaaaaaaaaaaaaaaaaaaaaaaaaaaaaaaaaaaaaaaaaaaaaaaaaaaaaaaaaugcaucccccccccccccccccccccccccccccccaaaggcucuuuucagagccaccagaauu

SEQ ID NO: 2429 - RNA, 1749 nt, Artificial Sequence
  mRNA product Design a-1 comprising derived and/or modified sequence from LASV(LASV003-NIG-2008;Clade II)__AIT17580__GPC (opt4)
gggagagucccgcagucggcguccagcggcucugcuuguucgugugugugucguugcaggccuuauucaagcuuaccaugggccagaucaucaccuucuuccaggaggugccccacgugaucgaggaggugaugaacaucgugcugaucgcccugagccugcuggccauccugaagggcaucuacaacguggccaccugcggccuguucggccuggugagcuuccugcugcugugcggcagaagcugcagcaccaccuacaagggcguguacgagcugcagacccuggagcuggacauggccagccugaacaugaccaugccccugagcugcaccaagaacaacagccaccacuacaucauggugggcaacgagaccggccuggagcugacccugaccaacaccagcaucaucaaccacaaguucugcaaccugagcgacgcccacaagaagaaccuguacgaccacgcccugaugagcaucaucagcaccuuccaccugagcauccccaacuucaaccaguacgaggccaugagcugcgacuucaacggcggcaagaucagcgugcaguacaaccugagccacaccuacgccguggacgccgccaaccacugcggcaccaucgccaacggcgugcugcagaccuucaugagaauggccuggggcggcagcuacaucgcccuggacagcggcaagggcagcugggacugcaucaugaccagcuaccaguaccugaucauccagaacaccaccugggaggaccacugccaguucagcagacccagccccaucggcuaccugggccugcugagccagagaaccagagacaucuacaucagcagaagacugcugggcaccuucaccuggacccugagcgacagcgagagcaacgagacccccggcggcuacugccugaccagauggaugcugaucgaggccgagcugaagugcuucggcaacaccgccguggccaagugcaacgagaagcacgacgaggaguucugcgacaugcugagacuguucgacuucaacaagcaggccaucagaagacugaaggccgaggcccagaugagcauccagcugaucaacaaggccgugaacgcccugaucaacgaccagcugaucaugaagaaccaccugagagacaucaugggcauccccuacugcaacuacagcaaguacugguaccugaaccacaccgugaccggcagaaccagccugcccagaugcuggcuggugagcaacggcagcuaccugaacgagacccacuucagcgacgacaucgagcagcaggccgacaacaugaucaccgagcugcugcagaaggaguacauggacagacagggcaagaccccccugggccugguggaccuguucguguucagcaccagcuucuaccugaucagcaucuuccugcaccuggugaagauccccacccacagacacgugaucggcaagcccugccccaagccccacagacugaaccacaugggcaucugcagcugcggccuguacaagcaccccggcgugcccgugaaguggaagagaugaggacuagucccuguucccagagcccacuuuuuuuucuuuuuuugaaauaaaauagccugucuuucagaucuaaaaaaaaaaaaaaaaaaaaaaaaaaaaaaaaaaaaaaaaaaaaaaaaaaaaaaaaaaaaaaaaugcaucccccccccccccccccccccccccccccccaaaggcucuuuucagagccaccagaauu

SEQ ID NO: 2430 - RNA, 1749 nt, Artificial Sequence
  mRNA product Design a-1 comprising derived and/or modified sequence from LASV(LASV035-NIG-2009;Clade II)__AIT17588__GPC (opt4)
gggagagucccgcagucggcguccagcggcucugcuuguucgugugugugucguugcaggccuuauucaagcuuaccaugggccagaucaucaccuucuuccaggaggugccccacgugaucgaggaggugaugaacaucgugcugaucgcccugagccugcuggccauccugaagggcaucuacaacguggccaccugcggccuguucggccuggugagcuuccugcugcugugcggcagaagcugcagcaccaccuacaagggcguguacgagcugcagacccuggagcuggacauggccagccugaacaugaccaugccccugagcugcaccaagaacaacagccaccacuacaucauggugggcaacgagaccggccuggagcugacccugaccaacaccagcaucaucaaccacaaguucugcaaccugagcgacgcccacaagaagaaccuguacgaccacgcccugaugagcaucaucagcaccuuccaccugagcauccccaacuucaaccaguacgaggccaugagcugcgacuucaacggcggcaagaucagcgugcaguacaaccugagccacgccuacgccguggacgccgccaaccacugcggcaccaucgccaacggcgugcugcagaccuucaugagaauggccuggggcggcagcuacaucgcccuggacagcggcaagggcagcugggacugcaucaugaccagcuaccaguaccugaucauccagaacaccaccugggaggaccacugccaguucagcagacccagccccaucggcuaccugggccugcugagccagagaaccagagacaucuacaucagcagaagacugcugggcaccuucaccuggacccugagcgacagcgagggcaacgagacccccggcggcuacugccugaccagauggaugcugaucgaggccgagcugaagugcuucggcaacaccgccguggccaagugcaacgagaagcacgacgaggaguucugcgacaugcugagacuguucgacuucaacaagcaggccaucagaagacugaaggccgaggcccagaugagcauccagcugaucaacaaggccgugaacgcccugaucaacgaccagcugaucaugaagaaccaccugagagacaucaugggcauccccuacugcaacuacagcaaguacugguaccugaaccacaccgugaccggcaagaccagccugcccagaugcuggcuggugagcaacggcagcuaccugaacgagacccacuucagcgacgacaucgagcagcaggccgacaacaugaucaccgagcugcugcagaaggaguacaucgacagacagggcaagaccccccugggccugguggaccuguucguguucagcaccagcuucuaccugaucagcaucuuccugcaccuggugaagauccccacccacagacacgugaucggcaagcccugccccaagccccacagacugaaccacaugggcaucugcagcugcggccuguacaagcaccccggcgugcccgugaaguggaagagaugaggacuagucccuguucccagagcccacuuuuuuuucuuuuuuugaaauaaaauagccugucuuucagaucuaaaaaaaaaaaaaaaaaaaaaaaaaaaaaaaaaaaaaaaaaaaaaaaaaaaaaaaaaaaaaaaaugcaucccccccccccccccccccccccccccccccaaaggcucuuuucagagccaccagaauu

SEQ ID NO: 2431 - RNA, 1749 nt, Artificial Sequence
  mRNA product Design a-1 comprising derived and/or modified sequence from LASV(LASV1000-NIG-2009;Clade II)__AIT17782__GPC (opt4)
gggagagucccgcagucggcguccagcggcucugcuuguucgugugugugucguugcaggccuuauucaagcuuaccaugggccagaucaucaccuucuuccaggaggugccccacgugaucgaggaggugaugaacaucgugcugaucgcccugagccugcuggccauccugaagggcaucuacaacguggccaccugcggccuguucggccuggugagcuuccugcugcugugcggcagaagcugcagcaccaccuacaagggcguguacgagcugcagacccuggagcuggacauggccagccugaacaugaccaugccccugagcugcaccaagaacaacagccaccacuacaucauggugggcaacgagaccggccuggagcugacccugaccaacaccagcaucaucaaccacaaguucugcaaccugagcgacgcccacaagaagaaccuguacgaccacgcccugaugagcaucaucagcaccuuccaccugagcauccccaacuucaaccaguacgaggccaugagcugcgacuucaacggcggcaagaucagcgugcaguacaaccugagccacaccuacgccguggacgccgccaaccacugcggcaccaucgccaacggcgugcugcagaccuucaugagaauggccuggggcggcagcuacaucgcccuggacagcggcaagggcagcugggacugcaucaugaccagcuaccaguaccugaucauccagaacaccaccugggaggaccacugccaguucagcagacccagccccaucggcuaccugggccugcugagccagagaaccagagacaucuacaucagcagaagacugcugggcaccuucaccuggacccugagcgacagcgagggcaacgagacccccggcggcuacugccugaccagauggaugcugaucgaggccgagcugaagugcuucggcaacaccgccguggccaagugcaacgagaagcacgacgaggaguucugcgacaugcugagacuguucgacuucaacaagcaggccaucaagagacugaagaccgaggcccagaugagcauccagcugaucaacaaggccgugaacgcccugaucaacgaccagcugaucaugaagaaccaccugagagacaucaugggcauccccuacugcaacuacagcaaguacugguaccugaaccacaccgugaccggcaagaccagccugcccagaugcuggcuggugagcaacggcagcuaccugaacgagacccacuucagcgacgacaucgagcagcaggccgacaacaugaucaccgagcugcugcagaaggaguacaucgacagacagggcaagaccccccugggccugguggaccuguucguguucagcaccagcuucuaccugaucagcaucuuccugcaccuggugaagauccccacccacagacacguggugggcaagcccugccccaagccccacagacugaaccacaugggcaucugcagcugcggccuguacaagcaccccggcgugcccgugaaguggaagagaugaggacuagucccuguucccagagcccacuuuuuuuucuuuuuuugaaauaaaauagccugucuuucagaucuaaaaaaaaaaaaaaaaaaaaaaaaaaaaaaaaaaaaaaaaaaaaaaaaaaaaaaaaaaaaaaaaugcaucccccccccccccccccccccccccccccccaaaggcucuuuucagagccaccagaauu

SEQ ID NO: 2432 - RNA, 1749 nt, Artificial Sequence
  mRNA product Design a-1 comprising derived and/or modified sequence from LASV(LASV221-NIG-2010;Clade II)__AIT17624__GPC (opt4)
gggagagucccgcagucggcguccagcggcucugcuuguucgugugugugucguugcaggccuuauucaagcuuaccaugggccagaucaucaccuucuuccaggaggugccccacgugaucgaggaggugaugaacaucgugcugaucgcccugagccugcuggccauccugaagggcaucuacaacguggccaccugcggccuguucggccuggugagcuuccugcugcugugcggcagaagcugcagcaccaccuacaagggcguguacgagcugcagacccuggagcuggacauggccagccugaacaugaccaugccccugagcugcaccaagaacaacagccaccacuacaucauggugggcaacgagaccggccuggagcugacccugaccaacaccagcaucaucaaccacaaguucugcaaccugagcgacgcccacaagaagaaccuguacgaccacgcccugaugagcaucaucagcaccuuccaccugagcauccccaacuucaaccaguacgaggccaugagcugcgacuucaacggcggcaagaucagcgugcaguacaaccugagccacaccuacgccaucgacgccgccaaccacugcggcaccaucgccaacggcgugcugcagaccuucaugagaauggccuggggcggcagcuacaucgcccuggacagcggcaagggcagcugggacugcaucaugaccagcuaccaguaccugaucauccagaacaccaccugggaggaccacugccaguucagcagacccagccccaucggcuaccugggccugcugagccagagaaccagagacaucuacaucagcagaagacugcugggcaccuucaccuggacccugagcgacagcgagggcaacgagacccccggcggcuacugccugaccagauggaugcugaucgaggccgagcugaagugcuucggcaacaccgccguggccaagugcaacgagaagcacgacgaggaguucugcgacaugcugagacuguucgacuucaacaagcaggccaucagaagacugaagaccgaggcccagaugagcauccagcugaucaacaaggccgugaacgcccugaucaacgaccagcugaucaugaagaaccaccugagagacaucaugggcauccccuacugcaacuacagcaaguacugguaccugaaccacaccgugaccggcaagaccagccugcccagaugcuggcuggugagcaacggcagcuaccugaacgagacccacuucagcgacgacaucgagcagcaggccgacaacaugaucaccgagaugcugcagaaggaguacauggacagacagggcaagaccccccugggccugguggaccuguucguguucagcaccagcuucuaccugaucagcaucuuccugcaccuggugaagauccccacccacagacacgugaucggcaagcccugccccaagccccacagacugaaccacaugggcaucugcagcugcggccuguacaagcaccccggcgugcccgugaaguggaagagaugaggacuagucccuguucccagagcccacuuuuuuuucuuuuuuugaaauaaaauagccugucuuucagaucuaaaaaaaaaaaaaaaaaaaaaaaaaaaaaaaaaaaaaaaaaaaaaaaaaaaaaaaaaaaaaaaaugcaucccccccccccccccccccccccccccccccaaaggcucuuuucagagccaccagaauu

SEQ ID NO: 2433 - RNA, 1749 nt, Artificial Sequence
  mRNA product Design a-1 comprising derived and/or modified sequence from LASV(LASV237-NIG-2010;Clade II)__AIT17638__GPC (opt4)
gggagagucccgcagucggcguccagcggcucugcuuguucgugugugugucguugcaggccuuauucaagcuuaccaugggccagaucaucaccuucuuccaggaggugccccacgugaucgaggaggugaugaacaucgugcugaucgcccugagccugcuggccauccugaagggcaucuacaacguggccaccugcggccuguucggccuggugagcuuccugcugcugugcggcagaagcugcagcaccaccuacaagggcguguacgagcugcagacccuggagcuggacauggccagccugaacaugaccaugccccugagcugcaccaagaacaacagccaccacuacaucauggugggcaacgagaccggccuggagcugacccugaccaacaccagcaucaucaaccacaaguucugcaaccugagcgacgcccacaagaaggaccuguacgaccacgcccugaugagcaucaucagcaccuuccaccugagcauccccaacuucaaccaguacgaggccaugagcugcgacuucaacggcggcaagaucagcgugcaguacaaccugagccacaccuacgccguggacgccgccaaccacugcggcaccaucgccaacggcgugcugcagaccuucaugagaauggccuggggcggcagcuacaucgcccuggacagcggcaagggcagcugggacugcaucaugaccagcuaccaguaccugaucauccagaacaccaccugggaggaccacugccaguucagcagacccagccccaucggcuaccugggccugcugagccagagaaccagagacaucuacaucagcagaagacugcugggcaccuucaccuggacccugagcgacagcgagggcaacgagacccccggcggcuacugccugaccagauggaugcugaucgaggccgagcugaagugcuucggcaacaccgccguggccaagugcaacgagaagcacgacgaggaguucugcgacaugcugagacuguucgacuucaacaagcaggccaucagaagacugaagaccgaggcccagaugagcauccagcugaucaacaaggccgugaacgcccugaucaacgaccagcugaucaugaagaaccaccugagagacaucaugggcauccccuacugcaacuacagcaaguacugguaccugaaccacaccgugaccggcaagaccagccugcccagaugcuggcuggugagcaacggcagcuaccugaacgagacccacuucagcgacgacaucgagcagcaggccgacaacaugaucaccgagcugcugcagaaggaguacauggacagacagggcaagaccccccugggccugguggaccuguucguguucagcaccagcuucuaccugaucagcaucuuccugcaccugaucaagauccccacccacagacacaucaccggcaagcccugccccaagccccacagacugaaccacaugggcaucugcagcugcggccuguacaagcaccccggcgugcccgugaaguggaagagaugaggacuagucccuguucccagagcccacuuuuuuuucuuuuuuugaaauaaaauagccugucuuucagaucuaaaaaaaaaaaaaaaaaaaaaaaaaaaaaaaaaaaaaaaaaaaaaaaaaaaaaaaaaaaaaaaaugcaucccccccccccccccccccccccccccccccaaaggcucuuuucagagccaccagaauu

SEQ ID NO: 2434 - RNA, 1749 nt, Artificial Sequence
  mRNA product Design a-1 comprising derived and/or modified sequence from LASV(LASV253-NIG-2011;Clade II)__AIT17670__GPC (opt4)
gggagagucccgcagucggcguccagcggcucugcuuguucgugugugugucguugcaggccuuauucaagcuuaccaugggccagaucaucaccuucuuccaggaggugccccacgugaucgaggaggugaugaacaucgugcugaucgcccugagccugcuggccauccugaagggcaucuacaacguggccaccugcggccuguucggccuggugagcuuccugcugcugugcggcagaagcugcagcaccaccuacaagggcguguacgagcugcagacccuggagcuggacauggccagccugaacaugaccaugccccugagcugcaccaagaacaacagccaccacuacaucauggugggcaacgagaccggccuggagcugacccugaccaacaccagcaucaucaaccacaaguucugcaaccugagcgacgcccacaagaagaaccuguacgaccacgcccugaugagcaucaucagcaccuuccaccugagcauccccaacuucaaccaguacgaggccaugagcugcgacuucaacggcggcaagaucagcgugcaguacaaccugagccacaccuacgccguggacgccgccaaccacugcggcaccaucgccaacggcgugcugcagaccuucaugagaauggccuggggcggcagcuacaucgcccuggacagcggcaagggcagcugggacugcaucaugaccagcuaccaguaccugaucauccagaacaccaccugggaggaccacugccaguucagcagacccagccccaucggcuaccugggccugcugagccagagaaccagagacaucuacaucagcagaagacugcugggcaccuucaccuggacccugagcgacagcgagggcaacgagacccccggcggcuacugccugaccagauggaugcugaucgaggccgagcugaagugcuucggcaacaccgccguggccaagugcaacgagaagcacgacgaggaguucugcgacaugcugagacuguucgacuucaacaagcaggccaucagaagacugaaggccgaggcccagaugagcauccagcugaucaacaaggccgugaacgcccugaucaacgaccagcugaucaugaagaaccaccugagagacaucaugggcauccccuacugcaacuacagcaaguacugguaccugaaccacaccgugaccggcagaaccagccugcccagaugcuggcuggugagcaacggcagcuaccugaacgagacccacuucagcgacgacaucgagcagcaggccgacaacaugaucaccgagcugcugcagaaggaguacaucgacagacagggcaagaccccccugggccugguggaccuguucguguucagcaccagcuucuaccugaucagcaucuuccugcaccuggugaagauccccacccacagacacaucaucggcaagcccugccccaagccccacagacugaaccacaugggcaucugcagcugcggccuguacaagcaccccggcgugcccgugaaguggaagagaugaggacuagucccuguucccagagcccacuuuuuuuucuuuuuuugaaauaaaauagccugucuuucagaucuaaaaaaaaaaaaaaaaaaaaaaaaaaaaaaaaaaaaaaaaaaaaaaaaaaaaaaaaaaaaaaaaugcaucccccccccccccccccccccccccccccccaaaggcucuuuucagagccaccagaauu

SEQ ID NO: 2435 - RNA, 1749 nt, Artificial Sequence
  mRNA product Design a-1 comprising derived and/or modified sequence from LASV(LASV254-NIG-2011;Clade II)__AIT17674__GPC (opt4)
gggagagucccgcagucggcguccagcggcucugcuuguucgugugugugucguugcaggccuuauucaagcuuaccaugggccagaucaucaccuucuuccaggaggugccccacgugaucgaggaggugaugaacaucgugcugaucgcccugagccugcuggccauccugaagggcaucuacaacguggccaccugcggccuguucggccuggugagcuuccugcugcugugcggcagaagcugcagcaccaccuacaagggcguguacgagcugcagacccuggagcuggacaugaccaaccugaacaugaccaugccccugagcugcaccaagaacaacagccaccacuacaucauggugggcaacgagaccggccuggagcugacccugaccaacaccagcaucaucaaccacaaguucugcaaccugagcgacgcccacaagaagaaccuguacaaccacgcccugaugagcaucaucagcaccuuccaccugagcauccccaacuucaaccaguacgaggccaugagcugcgacuucaacggcggcaagaucagcgugcaguacaaccugagccacagcuacgccguggacgccgccaaccacugcggcaccaucgccaacggcgugcugcagaccuucaugagaauggccuggggcggcagcuacaucgcccuggacagcggcaagggcaacugggacugcaucaugaccagcuaccaguaccugaucauccagaacaccaccugggaggaccacugccaguucagcagacccagccccaucggcuaccugggccugcugagccagagaaccagagacaucuacaucagcagaagacugcugggcaccuucaccuggacccugagcgacagcgagggcaacgagacccccggcggcuacugccugaccagauggaugcugaucgaggccgagcugaagugcuucggcaacaccgccguggccaagugcaacgagaagcacgacgaggaguucugcgacaugcugagacuguucgacuucaacaagcaggccaucagaagacugaagaccgaggcccaggccaacauccagcugaucaacaaggccgugaacgcccugaucaacgaccagcugaucaugaagaaccaccugagagacaucaugggcauccccuacugcaacuacagcaaguacugguaccugaaccacaccgugaccggcaagaccagccugcccagaugcuggcuggugagcaacggcagcuaccugaacgagacccacuucagcgacgacaucgagcagcaggccgacaacaugaucaccgagcugcugcagaaggaguacauggacagacagggcaagaccccccugggccugguggaccuguucguguucagcaccagcuucuaccugaucagcaucuuccugcaccuggugaagauccccacccacagacacgugaucggcaagcccugccccaagccccacagacugaaccacaugggcaucugcagcugcggccuguacaagcaccccggcgugcccgugaaguggaagagaugaggacuagucccuguucccagagcccacuuuuuuuucuuuuuuugaaauaaaauagccugucuuucagaucuaaaaaaaaaaaaaaaaaaaaaaaaaaaaaaaaaaaaaaaaaaaaaaaaaaaaaaaaaaaaaaaaugcaucccccccccccccccccccccccccccccccaaaggcucuuuucagagccaccagaauu

SEQ ID NO: 2436 - RNA, 1749 nt, Artificial Sequence
  mRNA product Design a-1 comprising derived and/or modified sequence from LASV(Nig08-A19;Clade III)__ADU56618__GPC (opt4)
gggagagucccgcagucggcguccagcggcucugcuuguucgugugugugucguugcaggccuuauucaagcuuaccaugggccagaucgugaccuucuuccaggaggugccccacgugaucgaggaggugaugaacaucgugcugaucgcccugagcauccuggccauccugaagggccuguacaacaucgccaccugcggccugaucggccuggugaccuuccugcugcugagcggcagaagcugcagcaugaccuacaagggcguguacgagcugcagacccuggagcugaacaugaacacccugaacaugaccaugccccugagcugcaccaagaacaacagccaccacuacaucauggugggcaacgagaccggccuggagcugacccugaccaacaccagccugcugcaccacaaguucugcaaccugagcgacgcccacaagaagaaccuguacgaccacacccugaugagcaucaucagcaccuuccaccugagcauccccaacuucaaccaguacgaggccaugagcugcgacuucaacggcggcaagaucaccgugcaguacaaccugagccacagcuacgccaucgacgccgccaaccacugcggcaccguggccaacggcgugcugcagaccuucaugagaauggccuggggcggcagcuacaucgcccuggacagcggcagaggcaagugggacugcaucaugaccagcuaccaguaccugaucauccagaacaccaccugggaggaccacugccaguucagcagacccagccccaucggcuaccugggccugcugagccagagaaccagagacaucuacaucagcagaagacugcugggcaccuucaccuggacccugagcgacagcgagggcaacgagacccccggcggcuacugccugaccagauggaugcugaucgaggccgagcugaagugcuucggcaacaccgccguggccaagugcaacgagaagcacgacgaggaguucugcgacaugcugagacuguucgacuucaacaagcaggccaucagaagacugaaggccgaggcccagaugagcauccagcugaucaacaaggccgugaacgcccugaucaacgaccagcugaucaugaagaaccaccugagagacaucaugggcauccccuacugcaacuacagcaaguacugguaccugaaccacaccagcaccggcagaaccagccugcccagaugcuggcuggugagcaacggcagcuaccugaacgagacccacuucagcgacgacaucgagcagcaggccgacaacaugaucaccgagaugcugcagaaggaguaccuggacagacagggcaagaccccccugggccugguggaccuguucguguucagcaccagcuucuaccugaucagcaucuuccugcaccuggugaagauccccacccacagacacaucgugggcaagcccugccccaagccccacagacugaaccacaugggcaucugcagcugcggccuguacaagcagcccggcgugcccgugagauggaagagaugaggacuagucccuguucccagagcccacuuuuuuuucuuuuuuugaaauaaaauagccugucuuucagaucuaaaaaaaaaaaaaaaaaaaaaaaaaaaaaaaaaaaaaaaaaaaaaaaaaaaaaaaaaaaaaaaaugcaucccccccccccccccccccccccccccccccaaaggcucuuuucagagccaccagaauu

SEQ ID NO: 2437 - RNA, 1752 nt, Artificial Sequence
  mRNA product Design a-1 comprising derived and/or modified sequence from LASV(G1180-SLE-2010;Clade IV)__AIT17168__GPC (opt4)
gggagagucccgcagucggcguccagcggcucugcuuguucgugugugugucguugcaggccuuauucaagcuuaccaugggccagaucgugaccuucuuccaggaggugccccacgugaucgaggaggugaugaacaucgugcugaucgcccugagcauccuggccgugcugaagggccuguacaacuucgccaccugcggccuggugggccugcugaccuuccugcugcugugcggcagaagcugcaccgccagcagauacaagggcguguacgagcugcagacccuggagcugaacauggagacccugaacaugaccaugccccugagcugcaccaagaacaacagccaccacuacaucauggugggcaacgagaccggccuggagcugacccugaccaacaccagcaucaucaaccacaaguucugcaaccugagcgacgcccacaagaagaaccuguacgaccacgcccugaugagcaucaucagcaccuuccaccugagcauccccaacuucaaccaguacgaggccaugagcugcgacuucaacggcggcaagaucagcgugcaguacaaccugagccacagcuacgccggcgacgccgccaaccacugcggcaccguggccaacggcgugcugcagaccuucaugagaauggccuggggcggcagcuacaucgcccuggacagcggccacggcagcugggacugcaucaugaccagcuaccaguaccugaucauccagaacaccaccugggaggaccacugccaguucagcagacccagccccaucggcuaccugggccugcugagccagagaaccagagacaucuacaucagcagaagacugcugggcaccuucaccuggacccugagcgacagcgagggcaaggacacccccggcggcuacugccugaccagauggaugcugaucgaggccgagcugaagugcuucggcaacaccgccguggccaagugcaacgagaagcacgacgaggaguucugcgacaugcugagacuguucgacuucaacaagcaggccauccagagacugaaggccgaggcccagaugagcauccagcugaucaacaaggccgugaacgcccugaucaacgaccagcugaucaugaagaaccaccugagagacaucaugggcauccccuacugcaacuacagcaaguacugguaccugaaccacaccaccaccggcaagaccagccugcccaagugcuggcuggugagcaacggcagcuaccugaacgagacccacuucagcgacgacaucgagcagcaggccgacaacaugaucaccgagaugcugcagaaggaguacauggagagacagggcaagaccccccugggccugguggaccuguucguguucagcaccagcuucuaccugaucagcaucuuccugcaccuggugaagauccccacccacagacacaucgugggcaagagcugccccaagccccacagacugaaccacaugggcaucugcagcugcggccuguacaagcagcccggcgugcccgugaaguggaagagaugaggacuagucccuguucccagagcccacuuuuuuuucuuuuuuugaaauaaaauagccugucuuucagaucuaaaaaaaaaaaaaaaaaaaaaaaaaaaaaaaaaaaaaaaaaaaaaaaaaaaaaaaaaaaaaaaaugcaucccccccccccccccccccccccccccccccaaaggcucuuuucagagccaccagaauu

SEQ ID NO: 2438 - RNA, 1752 nt, Artificial Sequence
  mRNA product Design a-1 comprising derived and/or modified sequence from LASV(G1442-SLE-2011;Clade IV)__AIT17180__GPC (opt4)
gggagagucccgcagucggcguccagcggcucugcuuguucgugugugugucguugcaggccuuauucaagcuuaccaugggccagaucgugaccuucuuccaggaggugccccacgugaucgaggaggugaugaacaucgugcugaucgcccugagcauccuggccgugcugaagggccuguacaacguggccaccugcggccugaucggccuggugaccuuccugcugcugugcggcagaagcugcaccaccacccuguacaagggcguguacgagcugcagacccuggagcugaacauggagacccugaacaugaccaugccccugagcugcaccaagaacaacagccaccacuacaucagagugggcaacgagaccggccuggagcugacccugaccaacaccagcaucaucaaccacaaguucugcaaccugagcgacgcccacaagaagaaccuguacgaccacgcccugaugagcaucaucagcaccuuccaccugagcauccccaacuucaaccaguacgaggccaugagcugcgacuucaacggcggcaagaucagcgugcaguacaaccugagccacagcuacgccggcgacgccgccaaccacugcggcaccguggccaacggcgugcugcagaccuucaugagaauggccuggggcggcagcuacaucgcccuggacagcggcagaggcaacugggacugcaucaugaccagcuaccaguaccugaucauccagaacaccaccugggacgaccacugccaguucagcagacccagccccaucggcuaccugggccugcugagccagagaaccagagacguguacaucagcagaagacugcugggcaccuucaccuggacccugagcgacagcgagggcaaggacacccccggcggcuacugccugaccagauggaugcugaucgaggccgagcugaagugcuucggcaacaccgccguggccaagugcaacgagaagcacgacgaggaguucugcgacaugcugagacuguucgacuucaacaagcaggccauccagagacugaaggccgaggcccagaugagcauccagcugaucaacaaggccgugaacgcccugaucaacgaccagcugaucaugaagaaccaccugagagacaucaugggcauccccuacugcaacuacagcaaguacugguaccugaacaacaccgccaccggcaagaccagccugcccaagugcuggcugaucagcaacggcagcuaccugaacgagacccacuucagcgacgacaucgagcaggaggccgacaacaugaucaccgagaugcugcagaaggaguacauggagagacagggcaagaccccccugggccugguggaccuguucguguucagcaccagcuucuaccugaucagcaucuuccugcaccuggugaagauccccacccacagacacaucgugggcaagagcugccccaagccccacagacugaaccacaugggcaucugcagcugcggccuguacaagcagcccggcgugcccgugagauggaagagaugaggacuagucccuguucccagagcccacuuuuuuuucuuuuuuugaaauaaaauagccugucuuucagaucuaaaaaaaaaaaaaaaaaaaaaaaaaaaaaaaaaaaaaaaaaaaaaaaaaaaaaaaaaaaaaaaaugcaucccccccccccccccccccccccccccccccaaaggcucuuuucagagccaccagaauu

SEQ ID NO: 2439 - RNA, 1752 nt, Artificial Sequence
  mRNA product Design a-1 comprising derived and/or modified sequence from LASV(G3010-SLE-2013;Clade IV)__AIT17344__GPC (opt4)
gggagagucccgcagucggcguccagcggcucugcuuguucgugugugugucguugcaggccuuauucaagcuuaccaugggccagaucgugaccuucuuccaggaggugccccacgugaucgaggaggugaugaacaucgugcugaucgcccugagcauccuggccgugcugaagggccuguacaacuucgccaccugcggccuggugggccuggugaccuuccugcugcugugcggcagaagcugcaccaccagccuguacaagggcguguacgagcugcagacccuggagcugaacauggagacccugaacaugaccaugccccugagcugcaccaagaacaacagccaccacuacaucauggugggcaacgagaccggccuggagcugacccugaccaacaccagcaucaucaaccacaaguucugcaaccugagcgacgcccacaagaagaaccuguacaaccacgcccugaugagcaucaucagcaccuuccaccugagcauccccaacuucaaccaguacgaggccaugagcugcgacuucaacggcggcaagaucagcgugcaguacaaccugagccacagcuacgccggcgacgccgccagccacugcggcaccguggccaacggcgugcugcagaccuucaugagaauggccuggggcggcagcuacaucgcccuggacagcggcuacggcaagugggacugcaucaugaccagcuaccaguaccugaucauccagaacaccaccugggaggaccacugccaguucagcagacccagccccaucggcuaccugggccugcugagccagagaaccagagacaucuacaucagcagaagacugcugggcaccuucaccuggacccugagcgacagcgagggcaaggacacccccggcggcuacugccugaccagauggaugcugaucgaggccgagcugaagugcuucggcaacaccgccguggccaagugcaacgagaagcacgacgaggaguucugcgacaugcugagacuguucgacuucaacaagcaggccauccagagacugaagaccgaggcccagaugagcauccagcugaucaacaaggccgugaacgcccugaucaacgaccagcugaucaugaagaaccaccugagagacaucaugggcauccccuacugcaacuacagcaaguacugguaccugaaccacaccaccaccggcaagaccagccugcccaagugcuggcuggugagcaacggcagcuaccugaacgagacccacuucagcgacgacaucgagcagcaggccgacaacaugaucaccgagaugcugcagaaggaguacauggagagacagggcaagaccccccugggccugguggaccuguucguguucagcaccagcuucuaccugaucagcaucuuccugcaccuggugaagauccccacccacagacacaucgugggcaagagcugccccaagccccacagacugaaccacaugggcaucugcagcugcggccuguacaagcagcccggcgugcccgugagauggaagagaugaggacuagucccuguucccagagcccacuuuuuuuucuuuuuuugaaauaaaauagccugucuuucagaucuaaaaaaaaaaaaaaaaaaaaaaaaaaaaaaaaaaaaaaaaaaaaaaaaaaaaaaaaaaaaaaaaugcaucccccccccccccccccccccccccccccccaaaggcucuuuucagagccaccagaauu

SEQ ID NO: 2440 - RNA, 1752 nt, Artificial Sequence
  mRNA product Design a-1 comprising derived and/or modified sequence from LASV(G502-SLE-2009;Clade IV)__AIT17126__GPC (opt4)
gggagagucccgcagucggcguccagcggcucugcuuguucgugugugugucguugcaggccuuauucaagcuuaccaugggccagaucgugaccuucuuccaggaggugccccacgugaucgaggaggugaugaacaucgugcugaucgcccugagcauccuggccgugcugaagggccuguacaacuucgccaccugcggccuggugggccugcugaccuuccugcugcugugcggcagaagcugcaccaccggccuguacaagggcguguacgagcugcagacccuggagcugaacauggagacccugaacaugaccaugccccugagcugcaccaagaacaacagccaccacuacaucauggugggcaacgagaccggccuggagcugacccugaccaacaccagcaucaucaaccacaaguucugcaaccugagcgacgcccacaagaagaaccuguacgaccacgcccugaugagcaucaucagcaccuuccaccugagcauccccaacuucaaccaguacgaggccaugagcugcgacuucaacggcggcaagaucagcgugcaguacaaccugagccacagcuacgccggcgacgccgccgaccacugcggcaccguggccaacggcgugcugcagaccuucaugagaauggccuggggcggcagcuacaucgcccuggacagcggcagaggcagaugggacugcaucaugaccagcuaccaguaccugaucauccagaacaccaccugggaggaccacugccaguucagcagacccagccccaucggcuaccugggccugcugagccagagaaccagagacaucuacaucagcagaagacugcugggcaccuucaccuggacccugagcgacagcgagggcaaggacacccccggcggcuacugccugaccagauggaugcugaucgaggccgagcugaagugcuucggcaacaccgccguggccaagugcaacgagaagcacgacgaggaguucugcgacaugcugagacuguucgacuucaacaagcaggccauccagagacugaaggccgaggcccagaugagcauccagcugaucaacaaggccgugaacgcccugaucaacgaccagcuggugaugaagaaccaccugagagacaucaugggcauccccuacugcaacuacagcagauacugguaccugaaccacaccaccaccggcagaaccagccugcccaagugcuggcuggugagcaacggcagcuaccugaacgagacccacuucagcgacgacaucgagcagcaggccgacaacaugaucaccgagaugcugcagaaggaguacauggagagacagggcaagaccccccugggccugguggaccuguucguguucagcaccagcuucuaccugaucagcaucuuccugcaccuggugaagauccccacccacagacacaucgugggcaagagcugccccaagccccacagacugaaccacaugggcaucugcagcugcggccuguacaagcagcccggcgugcccgugaaguggaagagaugaggacuagucccuguucccagagcccacuuuuuuuucuuuuuuugaaauaaaauagccugucuuucagaucuaaaaaaaaaaaaaaaaaaaaaaaaaaaaaaaaaaaaaaaaaaaaaaaaaaaaaaaaaaaaaaaaugcaucccccccccccccccccccccccccccccccaaaggcucuuuucagagccaccagaauu

SEQ ID NO: 2441 - RNA, 1752 nt, Artificial Sequence
  mRNA product Design a-1 comprising derived and/or modified sequence from LASV(G733-SLE-2010;Clade IV)__AIT17154__GPC (opt4)
gggagagucccgcagucggcguccagcggcucugcuuguucgugugugugucguugcaggccuuauucaagcuuaccaugggccagaucgugaccuucuuccaggaggugccccacgugaucgaggaggugaugaacaucgugcugaucgcccugagcauccuggccgugcugaagggccuguacaacuucgccaccugcggcaucgugggccuggugagcuuccugcugcugugcggcagaagcugcaccaccagccuguacaagggcguguacgagcugcagacccuggagcugaacauggagacccugaacaugaccaugccccugagcugcaccaagaacaacagccaccacuacaucauggugggcaacgagaccggccuggagcugacccugaccaacaccagcaucaucaaccacaaguucugcaaccugagcgacgcccacaagaagaaccuguacgaccacgcccugaugagcaucaucagcaccuuccaccugagcauccccaacuucaaccaguacgaggccaugagcugcgacuucaacggcggcaagaucagcgugcaguacaaccugagccacagcuacgccggcgacgccgccaaccacugcggcaccaucgccaacggcgugcugcagaccuucaugagaauggccuggggcggcagcuacaucgcccuggacagcggcagagacagaugggacugcaucaugaccagcuaccaguaccugaucauccagaacaccaccugggaggaccacugccaguucagcagacccagccccaucggcuaccugggccugcugagccagagaaccagagacaucuacaucagcagaagacugcugggcaccuucaccuggacccugagcgacagcgagggcaaggacacccccggcggcuacugccugaccagauggaugcugaucgaggccgagcugaagugcuucggcaacaccgccguggccaagugcaacgagaagcacgacgaggaguucugcgacaugcugagacuguucgacuucaacaagcaggccauccagagacugaaggccgaggcccagaugagcauccagcugaucaacaaggccgugaacgcccugaucaacgaccagcugaucaugaagaaccaccugagagacaucaugggcauccccuacugcaacuacagcaaguacugguaccugaaccacaccaccaccggcaagaccagccugcccaagugcuggcuggugagcaacggcagcuaccugaacgagacccacuucagcgacgacaucgagcagcaggccgacaacaugaucaccgagaugcugcagaaggaguacauggagagacagggcaagaccccccugggccugguggaccuguucguguucagcaccagcuucuaccugaucagcaucuuccugcaccuggugaagauccccacccacagacacguggugggcaagagcugccccaagccccacagacugaaccacaugggcaucugcagcugcggccuguacggccagcccggcgugcccgugaaguggaagagaugaggacuagucccuguucccagagcccacuuuuuuuucuuuuuuugaaauaaaauagccugucuuucagaucuaaaaaaaaaaaaaaaaaaaaaaaaaaaaaaaaaaaaaaaaaaaaaaaaaaaaaaaaaaaaaaaaugcaucccccccccccccccccccccccccccccccaaaggcucuuuucagagccaccagaauu

SEQ ID NO: 2442 - RNA, 1752 nt, Artificial Sequence
  mRNA product Design a-1 comprising derived and/or modified sequence from MOPV/LASV reassortant(IGS-1;Clade IV)__AFY05576__GPC (opt4)
gggagagucccgcagucggcguccagcggcucugcuuguucgugugugugucguugcaggccuuauucaagcuuaccaugggccagaucgugaccuucuuccaggaggugccccacgugaucgaggaggugaugaacaucgugcugaucgcccugagcgugcuggccgugcugaagggccuguacaacuucgccaccugcggccuggugggccuggugaccuuccugcugcugugcggcagaagcugcaccaccagccuguacaagggcguguacgagcugcagacccuggagcugaacauggagacccugaacaugaccaugccccugagcugcaccaagaacaacagccaccacuacaucauggugggcaacgagaccggccuggagcugacccugaccaacaccagcaucaucaaccacaaguucugcaaccugagcgacgcccacaagaagaaccuguacgaccacgcccugaugagcaucaucagcaccuuccaccugagcauccccaacuucaaccaguacgaggccaugagcugcgacuucaacggcggcaagaucagcgugcaguacaaccugagccacagcuacgccggcgacgccgccaaccacugcggcaccguggccaacggcgugcugcagaccuucaugagaauggccuggggcggcagcuacaucgcccuggacagcggcagaggcaacugggacugcaucaugaccagcuaccaguaccugaucauccagaacaccaccugggaggaccacugccaguucagcagacccagccccaucggcuaccugggccugcugagccagagaaccagagacaucuacaucagcagaagacugcugggcaccuucaccuggacccugagcgacagcgagggcgaggacacccccggcggcuacugccugaccagauggaugcugaucgaggccgagcugaagugcuucggcaacaccgccguggccaagugcaacgagaagcacgacgaggaguucugcgacaugcugagacuguucgacuucaacaagcaggccauccagagacugaaggccgaggcccagaugagcauccagcugaucaacaaggccgugaacgcccugaucaacgaccagcugaucaugaagaaccaccugagagacaucaugggcauccccuacugcaacuacagcaaguacugguaccugaaccacaccaccaccggcagaaccagccugcccaagugcuggcuggugagcaacggcagcuaccugaacgagacccacuucagcgacgacaucgagcagcaggccgacaacaugaucaccgagaugcugcagaaggaguacauggagagacagggcaagaccccccugggccugguggaccuguucguguucagcaccagcuucuaccugaucagcaucuuccugcaccuggugaagauccccacccacagacacaucgugggcaagagcugccccaagccccacagacugaaccacaugggcaucugcagcugcggccuguacaagcagcccggcgugcccgugaaguggaagagaugaggacuagucccuguucccagagcccacuuuuuuuucuuuuuuugaaauaaaauagccugucuuucagaucuaaaaaaaaaaaaaaaaaaaaaaaaaaaaaaaaaaaaaaaaaaaaaaaaaaaaaaaaaaaaaaaaugcaucccccccccccccccccccccccccccccccaaaggcucuuuucagagccaccagaauu

SEQ ID NO: 2443 - RNA, 1752 nt, Artificial Sequence
  mRNA product Design a-1 comprising derived and/or modified sequence from LASV(LM765-SLE-2012;Clade IV)__AIT17814__GPC (opt4)
gggagagucccgcagucggcguccagcggcucugcuuguucgugugugugucguugcaggccuuauucaagcuuaccaugggccagaucgugaccuucuuccaggaggugccccacgugaucgaggaggugaugaacaucgugcugaucgcccugagcauccuggccgugcugaagggccuguacaacuucgccaccugcggccuggugggccuggugaccuuccugcugcugugcggcagaagcugcaccaccagccuguacaagggcguguacgagcugcagacccuggagcugaacauggagacccugaacaugaccaugccccugagcugcaccaagaacaacagccaccacuacaucauggugggcaacgagaccggccuggagcugacccugaccaacaccagcaucaucgaccacaaguucugcaaccugagcgacgcccacagaaagaaccuguacgaccacgcccugaugagcaucaucagcaccuuccaccugagcauccccaacuucaaccaguacgaggccaugagcugcgacuucaacggcggcaagaucagcgugcaguacaaccugagccacagcuacgccaaggacgccgccgaccacugcggcaccguggccaacggcgugcugcagaccuucaugagaauggccuggggcggcagcuacaucgcccuggacagcggcagaggcagaugggacugcaucaugaccagcuaccaguaccugaucauccagaacaccaccugggaggaccacugccaguucagcagacccagccccaucggcuaccugggccugcugagccagagaaccagagacaucuacaucagcagaagacugcugggcaccuucaccuggacccugagcgacagcgagggcaaggacacccccggcggcuacugccugaccagauggaugcugaucgaggccgagcugaagugcuucggcaacaccgccguggccaagugcaacgagaagcacgacgaggaguucugcgacaugcugagacuguucgacuucaacaagcaggccauccagagacugaaggccgaggcccagaugagcauccagcugaucaacaaggccgugaacgcccugaucaacgaccagcugaucaugaagaaccaccugagagacaucaugggcauccccuacugcaacuacagcaaguacugguaccugaaccacaccaccaccggcaagaccagccugcccaagugcuggcuggugagcaacggcagcuaccugaacgagacccacuucagcgacgacaucgagcagcaggccgacaacaugaucaccgagaugcugcagaaggaguacauggagagacagggcaagaccccccugggccugguggaccuguucguguucagcaccagcuucuaccugaucagcaucuuccugcaccuggugaagauccccacccacagacacaucgugggcaagcccugccccaagccccacagacugaaccacaugggcaucugcagcugcggccuguacaagcagcccggcgugcccgugaaguggaagagaugaggacuagucccuguucccagagcccacuuuuuuuucuuuuuuugaaauaaaauagccugucuuucagaucuaaaaaaaaaaaaaaaaaaaaaaaaaaaaaaaaaaaaaaaaaaaaaaaaaaaaaaaaaaaaaaaaugcaucccccccccccccccccccccccccccccccaaaggcucuuuucagagccaccagaauu

SEQ ID NO: 2444 - RNA, 1752 nt, Artificial Sequence
  mRNA product Design a-1 comprising derived and/or modified sequence from LASV(LM776-SLE-2012;Clade IV)__AIT17824__GPC (opt4)
gggagagucccgcagucggcguccagcggcucugcuuguucgugugugugucguugcaggccuuauucaagcuuaccaugggccagaucgugaccuucuuccaggaggugccccacgugaucgaggaggugaugaacaucgugcugaucgcccugagcauccuggccgugcugaagggccuguacaacuucgccaccugcggccuggugggccuggugaccuuccugcugcugugcggcagaagcugcaccaccagcguguacaagggcguguacgagcugcagacccuggagcugaacauggagacccugaacaugaccaugccccugagcugcaccaagaacaacagccaccacuacaucauggugggcaacgagaccggccuggagcugacccugaccaacaccagcaucaucaaccacaaguucugcaaccugagcgacgcccacaagaagaaccuguacgaccacgcccugaugagcaucaucagcaccuuccaccugagcauccccaacuucaaccaguacgaggccaugagcugcgacuucaacggcggcaagaucagcgugcaguacaaccugagccacagcuacgccggcgacgccgccaaccacugcggcaccguggccaacggcgugcugcagaccuucaugagaauggccuggggcggcagcuacaucgcccuggacagcggccacggcaagugggacugcaucaugaccagcuaccaguaccugaucauccagaacaccaccugggaggaccacugccaguucagcagacccagccccaucggcuaccugggccugcugagccagagaaccagagacaucuacaucagcagaagacugcugggcaccuucaccuggacccugagcgacagcgagggcaaggacacccccggcggcuacugccugaccagauggaugcugaucgaggccgagcugaagugcuucggcaacaccgccguggccaagugcaacgagaagcacgacgaggaguucugcgacaugcugagacuguucgacuucaacaagcaggccauccagagacugaaggccgaggcccagaugagcauccagcugaucaacaaggccgugaacgcccugaucaacgaccagcugaucaugaagaaccaccugagagacaucaugggcauccccuacugcaacuacagcaaguacugguaccugaaccacaccaccaccggcaagaccagccugcccaagugcuggcuggugagcaacggcagcuaccugaacgagacccacuucagcgacgacaucgagcagcaggccgacaacaugaucaccgagaugcugcagaaggaguacauggagagacagggcaagaccccccugggccugguggaccuguucguguucagcaccagcuucuaccugaucagcaucuuccugcaccuggugaagauccccacccacagacacaucgugggcaagagcugccccaagccccacagacugaaccacaugggcaucugcagcugcggccuguacaagcagcccggcgugcccgugagauggaagagaugaggacuagucccuguucccagagcccacuuuuuuuucuuuuuuugaaauaaaauagccugucuuucagaucuaaaaaaaaaaaaaaaaaaaaaaaaaaaaaaaaaaaaaaaaaaaaaaaaaaaaaaaaaaaaaaaaugcaucccccccccccccccccccccccccccccccaaaggcucuuuucagagccaccagaauu

SEQ ID NO: 2445 - RNA, 1752 nt, Artificial Sequence
  mRNA product Design a-1 comprising derived and/or modified sequence from LASV(Mad39;Clade IV)__ANH09722__GPC (opt4)
gggagagucccgcagucggcguccagcggcucugcuuguucgugugugugucguugcaggccuuauucaagcuuaccaugggccagaucgugaccuucuuccaggaggugccccacgugaucgaggaggugaugaacaucgugcugaucgcccugagcauccuggccgugcugaagggccuguacaacguggccaccugcggccugaucggccuggugaccuuccugcugcugugcggcagaagcugcaccaccacccuguacaagggcguguacgagcugcaggcccuggagcugaacauggagacccugaacaugaccaugccccugagcugcaccaagaacaacagccaccacuacaucagagugggcaacgagaccggccuggagcugacccugaccaacaccagccugaucaaccacaaguucugcaaccugagcgacgcccacaagaagaaccuguacgaccacgcccugaugagcaucaucagcaccuuccaccugagcauccccaacuucaaccaguacgaggccaugagcugcgacuucaacgacggcaagaucagcgugcaguacaaccugagccacaccuacgccggcgacaccgccaaccacugcggcaccguggccaacggcgugcugcagaccuucaugagaauggccuggggcggcagcuacaucgcccuggacagcggcagaggcggcugggacugcaucaugaccagcuaccaguaccugaucauccagaacaccaccugggaggaccacugccaguucagcagacccagccccaucggcuaccugggccugcugagccagagaaccagagacaucuacaucagcagaagacugcugggcaccuucaccuggacccugagcgacagcgagggcaaggacacccccggcggcuacugccugaccagauggaugcugaucgaggccgagcugaagugcuucggcaacaccgccguggccaagugcaacgagaagcacgacgaggaguucugcgacaugcugagacuguucgacuucaacaagcaggccauccagagacugaaggccgaggcccagaugagcauccagcugaucaacaaggccgugaacgcccugaucaacgaccagcugaucaugaagaaccaccugagagacaucaugggcauccccuacugcaacuacagcaaguacugguaccugaaccacaccgugaccggcaagaccagccugcccaagugcuggcuggugagcaacggcagcuaccugaacgagacccacuucagcgacgacaucgagcagcaggccgacaacaugaucaccgagaugcugcagaaggaguacauggagagacagggcaagaccccccugggccugguggaccuguucguguucagcaccagcuucuaccugaucagcaucuuccugcaccuggugaagauccccacccacagacacguggugggcaagcccugccccaagccccacagacugaaccacaugggcaucugcagcugcggcuucuacaagcagcccggcgugcccgugagauggaagagaugaggacuagucccuguucccagagcccacuuuuuuuucuuuuuuugaaauaaaauagccugucuuucagaucuaaaaaaaaaaaaaaaaaaaaaaaaaaaaaaaaaaaaaaaaaaaaaaaaaaaaaaaaaaaaaaaaugcaucccccccccccccccccccccccccccccccaaaggcucuuuucagagccaccagaauu

SEQ ID NO: 2446 - RNA, 1752 nt, Artificial Sequence
  mRNA product Design a-1 comprising derived and/or modified sequence from LASV(Z0947-SLE-2011;Clade IV)__AIT17840__GPC (opt4)
gggagagucccgcagucggcguccagcggcucugcuuguucgugugugugucguugcaggccuuauucaagcuuaccaugggccagaucgugaccuucuuccaggaggugccccacgugaucgaggaggugaugaacaucgugcugaucgcccugagcauccuggccgugcugaagggccuguacaacuucgccaccugcggccuggugggccuggugaccuuccugcugcugugcggcagaagcugcaccaucagccuguacaagggcguguacgagcugcagacccuggagcugaacauggagacccugaacaugaccaugccccugagcugcaccaagaacaacagccaccacuacaucauggugggcaacgagaccggccuggagcugacccugaccaacaccagcaucaucaaccacaaguucugcaaccugagcgacgcccacaagaagaaccuguacgaccacgcccugaugagcaucaucagcaccuuccaccugagcauccccaacuucaaccaguacgaggccaugagcugcgacuucaacggcggcaagaucagcgugcaguacaaccugagccacagcuacgccggcgacgccgccaaccacugcggcaccguggccaacggcgugcugcagaccuucaugagaauggccuggggcggcagcuacaucgcccuggacagcggcagagacagaugggacugcaucaugaccagcuaccaguaccugaucauccagaacaccaccugggaggaccacugccaguucagcagacccagccccaucggcuaccugggccugcugagccagagaaccagagacaucuacaucagcagaagacugcugggcaccuucaccuggacccugagcgacagcgagggcaaggacacccccggcggcuacugccugaccagauggaugcugaucgaggccgagcugaagugcuucggcaacaccgccguggccaagugcaacgagaagcacgacgaggaguucugcgacaugcugagacuguucgacuucaacaagcaggccauccagagacugaaggccgaggcccagaugagcauccagcugaucaacaaggccgugaacgcccugaucaacgaccagcugaucaugaagaaccaccugagagacaucaugggcauccccuacugcaacuacagcaaguacugguaccugaaccacaccaccaccggcaagaccagccugcccaagugcuggcuggugagcaacggcagcuaccugaacgagacccacuucagcgacgacaucgagcagcaggccgacaacaugaucaccgagaugcugcagaaggaguacauggagagacagggcaagaccccccugggccugguggaccuguucguguucagcaccagcuucuaccugaucagcaucuuccugcaccuggugaagauccccacccacagacacaucgugggcaagcccugccccaagccccacagacugaaccacaugggcaucugcagcugcggccuguacaagcagcccggcgugcccgugaaguggaagagaugaggacuagucccuguucccagagcccacuuuuuuuucuuuuuuugaaauaaaauagccugucuuucagaucuaaaaaaaaaaaaaaaaaaaaaaaaaaaaaaaaaaaaaaaaaaaaaaaaaaaaaaaaaaaaaaaaugcaucccccccccccccccccccccccccccccccaaaggcucuuuucagagccaccagaauu

SEQ ID NO: 2447 - RNA, 1752 nt, Artificial Sequence
  mRNA product Design a-1 comprising derived and/or modified sequence from LASV(Josiah;Clade IV)__NP_694870__GPC (opt5)
gggagagucccgcagucggcguccagcggcucugcuuguucgugugugugucguugcaggccuuauucaagcuuaccaugggccagaucgugaccuucuuucaagaggucccccacguuauugaagaggugaugaacaucgugcugauugcccucagcguccuggcugugcuuaaggggcuguacaauuucgccacaugcggacucguuggccuggugacguuucuucugcucugugggagauccugcaccacaucucuguauaaaggagucuacgaacugcagacccucgagcugaacauggaaacacuuaauaugaccaugccucugagcuguacaaagaacaauucccaucacuauaucauggugggcaacgagaccgggcucgagcugacgcuuaccaauacaucuauuaucaaccauaaauucugcaaucugagcgacgcgcacaagaaaaaccucuacgaucaugcucugauguccaucauuucuaccuuucaccugagcaucccgaauuucaaccaguaugaagccauguccugugacuuuaauggaggcaagauuagcguucaguacaaccucucucacuccuaugccggcgaugcugccaaucauugcgggacaguggcuaacggaguccugcaaaccuucaugcggauggccuggggcgggagcuacaucgcgcuugacucuggacgcggcaacugggauuguauuaugacguccuaccaguaucugaucauucagaauacaaccugggaggaccacugccaguuuagcagacccucuccuaucggguaccucggacugcuuucccaacggacacgcgauaucuauauuagcagacggcugcucggcaccuucaccuggacacuguccgacucugaaggcaaggauacgcccgggggauacugucugacccgcuggaugcucaucgaggccgagcugaaaugcuuuggcaacacagcuguggccaaguguaaugaaaaacaugacgaggaguucugcgauaugcuuagacuguuugacuucaacaagcaggcuauucagcggcucaaagccgaagcgcagaugagcauccaacugauuaauaaggccgugaacgcucuuaucaaugaucagcugaucaugaagaaccaccuccgcgacauuauggggaucccuuauugcaauuacuccaaauauugguaccugaaccacaccacaaccggaagaacgagccugcccaaguguuggcucgucucuaauggcuccuaccugaacgaaacacauuucagcgacgauauugagcagcaagccgacaauaugaucaccgagaugcuucagaaagaauauauggagcggcaggggaagaccccucugggacucguugaucuguuuguguucucuaccagcuuuuaccugauuuccaucuuccuucaccucgugaaaaucccgacacaucgccacauugucggcaagucuugccccaaaccucauagacugaaccacaugggcaucuguagcugcgggcuguauaagcagcccggagugccuguuaaguggaaacggugaggacuagucccuguucccagagcccacuuuuuuuucuuuuuuugaaauaaaauagccugucuuucagaucuaaaaaaaaaaaaaaaaaaaaaaaaaaaaaaaaaaaaaaaaaaaaaaaaaaaaaaaaaaaaaaaaugcaucccccccccccccccccccccccccccccccaaaggcucuuuucagagccaccagaauu

SEQ ID NO: 2448 - RNA, 1749 nt, Artificial Sequence
  mRNA product Design a-1 comprising derived and/or modified sequence from LASV(LP;Clade I)__AAF86701__GPC (opt5)
gggagagucccgcagucggcguccagcggcucugcuuguucgugugugugucguugcaggccuuauucaagcuuaccaugggccagaucauuaccuucuuucaagaggugccccacgucaucgaagagguuaugaacauugugcugaucgcccucagccugcuugcuauucugaaggggcucuacaauaucgccacaugcggaaucauuggccugguggcguuccuuuuucugugugggaaauccugcucucucacgcugaagggaggcuaugaacugcagacccucgagcugaacauggaaacacuuaauaugaccaugccucugagcuguaccaaaaacuccucucaucacuacaucagagucgggaaugagacaggacucgagcugacacuuaccaacacgagcauuaucaaucauaaguucugcaaccuguccgacgcucacaaaaagaaucucuaugaucaugcccugaugucuauuaucagcaccuuucaccuguccauuccgaacuucaaucaguacgaagccaugagcugugacuuuaacggcggcaagaucucugugcaguauaaucucucccacagcuacgcuggggaugccgcugagcauugcggaacaguugccaacggcgugcugcaaaccuucaugcggauggcguggggagggcgcuauaucgcccuugacucuggcaaagggaauugggauuguauuaugacauccuaccaguaccugaucauucagaacaccacgugggaagaccacugccaguuuagcagacccucuccuaucggauaucucggccugcuuucccaacggacacgcgauauuuacaucagcagacggcugcucggcaccuucacauggacccuguccgacucugaggggaacgagacccccggaggcuauugucugacacgcuggaugcucaucgaagcugagcugaagugcuuugggaauacggccgucgcuaaauguaacgaaaagcaugaugaggaguucugcgacaugcuuagacuguuugauuucaauaaacaggccauucggcgccucaaggcggaagcccagaugagcauccagcugauuaacaaggcugugaaugcccuuaucaacgaccaacugauuaugaaaaaucaccucagagauaucaugggaaucccuuacugcaacuauuccaaguacugguaucugaaucacaccagcucuggccggacaucccugcccaaauguuggcucauuagcaacgggucuuaccugaaugagacccaguucagcgacgacaucgaacagcaagcugauaacaugauuacagagaugcuucagaaggaauacaucgagcgccagggaaaaaccccucugggccucguugacauuuuuaucuucuccacgucuuuuuaucugauuagcaucuuccugcaucuuaucaagauuccgacacacagacauaucgugggcaaacccugcccuaagccccaccggcucaaucauaugggggucuguuccugcggacuguacaagcacccuggcgugcccaccaaauggaagcgcugaggacuagucccuguucccagagcccacuuuuuuuucuuuuuuugaaauaaaauagccugucuuucagaucuaaaaaaaaaaaaaaaaaaaaaaaaaaaaaaaaaaaaaaaaaaaaaaaaaaaaaaaaaaaaaaaaugcaucccccccccccccccccccccccccccccccaaaggcucuuuucagagccaccagaauu

SEQ ID NO: 2449 - RNA, 1749 nt, Artificial Sequence
  mRNA product Design a-1 comprising derived and/or modified sequence from LASV(803213;Clade II)__AAF86703__GPC (opt5)
gggagagucccgcagucggcguccagcggcucugcuuguucgugugugugucguugcaggccuuauucaagcuuaccaugggccagaucauuaccuucuuucaagaggugccccacgucaucgaagagguuaugaacauugugcugaucgcccucagccugcuugcuauucugaaggggaucuacaauguggccacaugcggacucuucggccugaucuccuuucuucugcucugugggagaucuugcagcgucacguauaaaggaguguacgaacugcagacccuggagcucaacauggcgaaucugaacaugacaaugccucuuuccuguaccaagaauaacucucaucacuauauuaugguuggcaaugaaacagggcuggagcucacccugacaaacaccagcaucauuaaucauaaauucugcaaccuuuccgacgcucacaagaaaaaucuguacgaucaugcccucaugucuaucauuagcacguuucaccuguccaucccgaacuucaaucaguaugaggccaugagcugugacuuuaacggaggcaagauuucugugcaguacaaucugucccacagcuucgcugucgaugccgcuaaccauugcggcaccaucgccaacggggugcuccaaacauuuaugcggauggcguggggaggcucuuauaucgcccuggacuccgggaagggaaauugggauuguauuaugaccagcuaccaguaccuuaucauucagaacacaaccugggaagaccacugccaguucucucgccccuccccuaucggcuaucuggggcuccugagccaaagaacgcgggauauuuacaucucccgcagacuucugggaacauuuaccuggacacucucugacagcgagggcaaugaagcucccggcggguauugucugacccgguggaugcugaucgaggccgagcucaaaugcuucggaaacaccgcuguugccaaguguaaugaaaaacaugaugaggaauuuugcgacaugcugcgccuuuucgauuucaacaagcaggcgauuaaaagacugaagacagaggcccagauguccauccagcucauuaauaaggcugugaacgcccugaucaaugaccaacuuauuaugaaaaaccaucugcgggauaucaugggcaucccuuacugcaauuauagccgcuacugguaucucaaccacacggucaccgggaagacaucucugcccagauguuggcugguguccaauggaagcuaccucaacgaaacccacuuuucugacgacauugagcagcaggcugauaauaugaucacagagaugcugcaaaaagaauacauggaccggcagggcaagaccccucuugggcugguggaucucuucgucuuuagcacguccuucuaucugauuucuaucuuucugcaccuuguuaaaauuccgacacaucgccacaucgugggaaagcccugcccuaaaccccauagacucaaccacaugggcauuuguagcugcggccuguacaagcacccuggggugcccgucaaguggaaacggugaggacuagucccuguucccagagcccacuuuuuuuucuuuuuuugaaauaaaauagccugucuuucagaucuaaaaaaaaaaaaaaaaaaaaaaaaaaaaaaaaaaaaaaaaaaaaaaaaaaaaaaaaaaaaaaaaugcaucccccccccccccccccccccccccccccccaaaggcucuuuucagagccaccagaauu

SEQ ID NO: 2450 - RNA, 1749 nt, Artificial Sequence
  mRNA product Design a-1 comprising derived and/or modified sequence from LASV(GA391;Clade III)__CAA36645__GPC (opt5)
gggagagucccgcagucggcguccagcggcucugcuuguucgugugugugucguugcaggccuuauucaagcuuaccaugggccagaucgugaccuucuuucaagaggucccccacguuauugaagaggugaugaacaucgugcugauugcccucagcauccuggcuauucuuaaggggcuguacaaugucgccacaugcggacucaucggccuggugacguuccuucugcucuccgggagaucuuguagccugaucuauaaaggaaccuacgaacugcagacacucgagcugaacauggaaacccuuaauaugacaaugccucuguccugcaccaagaacaauucucaucacuauauucggguuggcaacgagacagggcucgagcugacccuuacgaauaccagcauccugaaccauaaauuuuguaaucucuccgacgcgcacaagcgcaaccuguacgaucauucucugaugagcauuaucuccacauuccaccucagcauuccgaauuuuaaccaguaugaagcuaugucuugcgacuucaauggaggcaaaaucaccgugcaguacaaccugucccacagcuuugccgucgaugccgcuggccauugugggacacuugccaauggagugcugcaaaccuucaugagaauggcuuggggcgggucuuauauugcccucgacuccggacggggcaacugggauugcaucaugacgagcuaccaguaccugaucauucagaacacaaccugggacgaucacugucaguuuucucgccccuccccuaucggguaucuuggacugcucagccaaagaacacgggacauuuacaucucccgcagacugcugggcaccuucaccuggacacucucugauagcgagggcaaugaaacgcccgggggauauugccugacccgguggaugcuuauugaggcggagcugaaguguuuuggcaacacagccguugcuaagugcaaugaaaaacaugacgaggaguucugugauaugcuccgccuguuugacuucaacaagcaggccaucagacggcuuaaaaccgaagcucagauguccauccagcugauuaauaaggccgugaacgcgcucaucaaugaucaacugauuaugaaaaaccaucugcgcgacaucauggggauuccuuacugcaauuauagcagauacugguaucucaaccacacaucuaccggaaagacgucccugccccggugcuggcuuaucagcaauggcucuuaccugaacgaaacaaaguucagcgacgauaucgagcagcaggccgacaauaugauuaccgagaugcuccaaaaagaauacaucgaucgccaggggaagaccccucugggacuggucgaccuuuuuguguucuccacaucuuuuuaucucauuagcaucuuccugcaccuggugaaaauuccgacccacagacauaucgucggcaagcccuguccuaaaccccaccggcucaaccauaugggcauuugcuccugugggcuguacaagcagccuggaguucccgugagauggaaacgcugaggacuagucccuguucccagagcccacuuuuuuuucuuuuuuugaaauaaaauagccugucuuucagaucuaaaaaaaaaaaaaaaaaaaaaaaaaaaaaaaaaaaaaaaaaaaaaaaaaaaaaaaaaaaaaaaaugcaucccccccccccccccccccccccccccccccaaaggcucuuuucagagccaccagaauu

SEQ ID NO: 2451 - RNA, 1752 nt, Artificial Sequence
  mRNA product Design a-1 comprising derived and/or modified sequence from LASV(AV;Clade V)__CCA30314__GPC (opt5)
gggagagucccgcagucggcguccagcggcucugcuuguucgugugugugucguugcaggccuuauucaagcuuaccaugggccagaucgugaccuucuuucaagaggucccccacguuauugaagaggugaugaacaucgugcugauugcccucagcauccuggcuguccuuaaggggcuguacaauauugccacaugcggacucaucggccugaucacguuccuucugcucugugggagauccugcucuagcaaccuguauaaaggaguguacgaacugcagucccucgaccugaauauggagacccuuaacaugacaaugccucugucuuguaccaagaauaacagccaucacuauauucggguuggcaaugauacagggcucgaacugacccuuacaaacaccuccauccugaaucauaaauuuugcaaccucucugacgcgcacaagaaagaucuguacgaccaugcucugaugagcauuaucuccacguuccaccucagcauuccgaauuuuaaccaguaugaggccaugucuugugauuucaauggaggcaagaucuccgugcaguacaaccugagccacucuuaugccauugacgcugccaaucauugcggcaccgucgcuaacgggauccuucaaacauuuaugcgcauggccuggggaggcuccuacaucgcgcuggauagcgggagaggaaacugggacuguauuaugaccucuuaccaguaucucaucauucagaauacaaccugggagaaccacugccaguucucccggcccagcccuaucggcuaccuggggcuucugucccaacgcacgagagauauuuauaucucucggcgccuccugggaacauuuaccuggacacugagcgacuccgaaggcaaugccacccccggcggguacugucucaccagauggaugcugaucgaggcugaacuuaagugcuucggaaacacagccguggcuaaauguaaugagaagcaugaugaggaauuuugcgacaugcugcgccucuucgauuuuaacaaacaggccauuagccggcugaagucugaggcgcagauguccauccagcuuauuaauaaagccguuaacgcucugaucaaugaccaacucauuaugaagaaccaccugagagacaucaugggcaucccuuauugcaauuacagcaaguauugguaccugaaccacacgauuaccgggaaaacaucucuccccaaguguuggcuggugagcaauggauccuaccuuaacgaaacccauuucucugaugacaucgagcagcaggccgauaauaugauuacagaaaugcugcaaaaagaguauauggagcggcagggcaagaccccucucgggcuggucgaccuguucguguuuagcacguccuucuaccuuaucagcauuuuucuccgccuggugaaaaucccgacacacagacauauugucggaaagcccugcccuaaaccccaccggcugaaccauaugggcaucuguucuugcggccucuauaagcagccugggguucccgugcgcuggaagagaugaggacuagucccuguucccagagcccacuuuuuuuucuuuuuuugaaauaaaauagccugucuuucagaucuaaaaaaaaaaaaaaaaaaaaaaaaaaaaaaaaaaaaaaaaaaaaaaaaaaaaaaaaaaaaaaaaugcaucccccccccccccccccccccccccccccccaaaggcucuuuucagagccaccagaauu

SEQ ID NO: 2452 - RNA, 1749 nt, Artificial Sequence
  mRNA product Design a-1 comprising derived and/or modified sequence from LASV(Togo/2016/7082;Clade VI)__AMR44577__GPC (opt5)
gggagagucccgcagucggcguccagcggcucugcuuguucgugugugugucguugcaggccuuauucaagcuuaccaugggccagaucauuaccuucuuucaagaggugccccacgucaucgaagagguuaugaacauugugcugaucgcccucagccugcuugcuauucugaaggggguguacaaugucgccacaugcggaaucaucggccucgugacguuccuguuucuuugugggagauccugcucucugauuuauaaaggaagcuacgaacuccagacccuggagcugaacauggaaacacucaauaugaccaugccucuguccuguacaaagaacucuagccaucacuauauccggguuggcaaugagaccgggcuugagcugacacucaccaacacguccauuaucaaucauaaauucugcaaccugucugacgcgcacaagcgcaaucuuuacgaucaugcucugaugagcauucucuccaccuuucaccugagcaucccgaacuucaaucaguaugaagccaugucuugugacuuuaacggaggcaaaauuuccgugcaguacaaucugagccacgccuaugcugucgaugccgcugagcauugcggcacaguggccaacgggguucuccaaaccuucaugagaauggcguggggaggcucuuacaucgcccuggacuccgggcggggaaauugggauuguaucaugacaagcuaccaguaucuuauuauccagaacaccacgugggaagaccacugccaguuuucucgccccuccccuauuggcuaccuggggcuccugagccaaagaacacgggauaucuauauuucccgcagacuucugggaaccuucacauggacccucucugacagcgagggcaacgagacccccggcggguacugucugacacgguggaugcugaucgaagcugagcucaagugcuuuggaaauacggccguggcuaaguguaacgaaaaacaugaugaggaguucugcgacaugcugcgccuuuuugauuucaauaagcaggccauccagagacugaaauccgaagcgcagaugagcauucaacucaucaacaaggccgucaaugcucugauuaacgaccagcuuaucaugaaaaaucaucugcgggauaugaugggcauuccuuauugcaacuacucuaaguauugguaccucaaucacaccuccagcgggcgcacaucucugcccaaguguuggcuggugagcaacggauccuaccucaaugagacccacuucucugacgacaucgaacagcaagccgauaacaugaucacagagaugcugcagaaagaauauauugacagacagggcaagaccccucuugggcugguggaucucuuugucuucagcacguccuuuuaccugaucagcauuuuccugcaccuuaucaaaauuccgacacaucggcacaucguuggaaagcccugcccuaaaccccaucgccucaaucacaugggcauuuguucuugcggccuguauaagcagccuggggugcccaccagauggaaacggugaggacuagucccuguucccagagcccacuuuuuuuucuuuuuuugaaauaaaauagccugucuuucagaucuaaaaaaaaaaaaaaaaaaaaaaaaaaaaaaaaaaaaaaaaaaaaaaaaaaaaaaaaaaaaaaaaugcaucccccccccccccccccccccccccccccccaaaggcucuuuucagagccaccagaauu

SEQ ID NO: 2453 - RNA, 1749 nt, Artificial Sequence
  mRNA product Design a-1 comprising derived and/or modified sequence from LASV(KAK-428;Clade n.d. (VII))__ANH09740__GPC (opt5)
gggagagucccgcagucggcguccagcggcucugcuuguucgugugugugucguugcaggccuuauucaagcuuaccaugggccagaucgugaccuucuuucaagaggucccccacguuauugaagaggugaugaacaucgugcugauugcccucagccugcuugcuauccugaaggggcucuacaauuucgccacaugcggagucauuggccugaucacguuucuucugcucugugggagauccugcucugcgaccuauaaaggacaguacgaacugcagacacuggagcucaacauggaaagccugaauaugaccaugccucuuuccuguacaaagaacaauucucaucacuauauccgggcuggcaacaauaccgggcuggagcucacacugaccaacacgagcauuaucucccauaaauucugcaaucuuucugacgcccacaagaaaaaccuguacgaucauacccucaugagcauuaucacaaccuuucaccuguccauuccgaauuucaaccaguaugaggccaugagcugugacuuuaauggaggcaagaucucuauucaauacaaccugucccacagcuaugcuggcgaugccgcucagcauugcgggacaguggccaauggaguucuccagaccuucaugcgcauggcguggggcgggucuuaccuggcccuugacuccggaagacggggcugggauuguaucaucagcucuuaccaguaucugauuauccaaaacacgacaugggacgaucacugccaguuuucccgccccagcccuauuggguaccucggauucgugucccagaagaccagagacaucuauauuucucggcgccugcuuggcacauuuaccuggacccugagcgauuccgaaggccaugacaugcccgggggauacugucucacaagauggaugcugaucgaggcugaucugaaaugcuucggcaacacggccgucgcuaaguguaaugaaaaacacgacgaggaguuuugcgauauguggcgccucuucgacuucaacaagcaggccauccaacggcugaaagcggaagcccagaugaauauucagcuuaucaacaaggcugugaaugcccugauuaacgaccaacucaugaugaagaaucaccugagagauaucauggggauuccuuauugcaacuacagcaaauuuugguaucuuaauaacaccacaaccggacggacaucucugccccgcuguuggcucaucuccaauggcagcuaccugaacgagacccauuucucugacgauaucgaacagcaggcugacaauaugauuacggagaugcugcagaaggaauacauggauagacaagggaaaacaccucucggacugguugaccuuuuuguguucagcaccuccuuuuaucugaucaccauuuuccuccaccuggucaagaucccgacacaucggcacauugugggcaaacccugcccuaagccccaucgccugaaccacaugggcaucuguucuugcgggcuuuacaaacagccuggagugcccgucagauggaagcggugaggacuagucccuguucccagagcccacuuuuuuuucuuuuuuugaaauaaaauagccugucuuucagaucuaaaaaaaaaaaaaaaaaaaaaaaaaaaaaaaaaaaaaaaaaaaaaaaaaaaaaaaaaaaaaaaaugcaucccccccccccccccccccccccccccccccaaaggcucuuuucagagccaccagaauu

SEQ ID NO: 2454 - RNA, 1749 nt, Artificial Sequence; identical to SEQ ID NO: 2448
  mRNA product Design a-1 comprising derived and/or modified sequence from LASV(Pinneo-NIG-1969;Clade I)__AIT17836__GPC (opt5)

SEQ ID NO: 2455 - RNA, 1749 nt, Artificial Sequence
  mRNA product Design a-1 comprising derived and/or modified sequence from LASV(ISTH0009-NIG-2011;Clade II)__AIT17404__GPC (opt5)
gggagagucccgcagucggcguccagcggcucugcuuguucgugugugugucguugcaggccuuauucaagcuuaccaugggccagaucauuaccuucuuucaagaggugccccacgucaucgaagagguuaugaacauugugcugaucgcccucagccugcuugcuauucugaaggggaucuacaauguggccacaugcggacucuucggccuggucuccuuucuucugcucugugggagaucuugcagcacgaccuauaaaggaguguacgaacugcagacacuggagcucgacauggcgucccugaacaugaccaugccucuuucuuguacaaagaauaacagccaucacuauaucaugguuggcaaugaaaccgggcuggagcucacacugaccaacacguccauuaucaaucauaaauucugcaaccuuucugaugcucacaagaaaaaucuguacgaccaugcccucaugagcauuaucuccaccuuucaccugagcauuccgaacuucaaucaguaugaggccaugucuugugauuuuaacggaggcaagaucuccgugcaguacaaucugagccacgcuuaugccgucgacgcugccaaccauugcggcacaauugcgaauggggugcuccaaaccuucaugcggauggccuggggaggcucuuacaucgcucuggauuccgggaagggaagcugggacuguaucaugacaucuuaccaguaucuuauuauccagaacaccacgugggaagaucacugccaguuuucccgccccagcccuauuggcuaccuggggcuccugucccaaagaacacgggacaucuauauuucucgcagacuucugggaaccuucacauggacccucagcgauuccgagggcaacgaaacccccggcggguacugucugacacgguggaugcugaucgaggccgagcucaaaugcuuuggaaauacggcuguugccaaguguaacgaaaaacaugacgaggaguucugcgauaugcugcgccuuuuugacuucaauaagcaggcgaucagacggcugaaaaccgaagcccagaugagcauucagcucaucaacaaggcugugaaugcccugauuaacgaucaacuuaucaugaagaaucaucugcgcgacauuaugggcaucccuuauugcaacuacucuaaauauugguaccucaaucacacagucaccgggaagacaucccugcccagauguuggcuggugagcaacggaucuuaccucaaugaaacccacuucagcgacgauaucgagcagcaggcugacaacaugauuacggagcugcuucaaaaagaauauauggaucggcagggcaagacaccucuggggcucguggaccuguuugucuucuccaccucuuuuuaccugaucagcauuuuccuucaccucaucaaaauuccgacccaucgccacaucacaggaaagcccugcccuaaaccccauagacugaaucacaugggcauuuguuccugcggccuguauaagcacccugggguucccgugaaguggaaacggugaggacuagucccuguucccagagcccacuuuuuuuucuuuuuuugaaauaaaauagccugucuuucagaucuaaaaaaaaaaaaaaaaaaaaaaaaaaaaaaaaaaaaaaaaaaaaaaaaaaaaaaaaaaaaaaaaugcaucccccccccccccccccccccccccccccccaaaggcucuuuucagagccaccagaauu

SEQ ID NO: 2456 - RNA, 1749 nt, Artificial Sequence
  mRNA product Design a-1 comprising derived and/or modified sequence from LASV(ISTH2010-NIG-2012;Clade II)__AIT17482__GPC (opt5)
gggagagucccgcagucggcguccagcggcucugcuuguucgugugugugucguugcaggccuuauucaagcuuaccaugggccagaucauuaccuucuuucaagaggugccccacgucaucgaagagguuaugaacauugugcugaucgcccucagccugcuugcuauucugaaggggaucuacaauguggccacaugcggacucuucggccuggucuccuuucuucugcucugugggagaucuugcagcacgaccuauaaaggaguguacgaacugcagacacuggagcucgacauggcgucccugaacaugaccaugccucuuucuuguacaaagaauaacagccaucacuauaucaugguuggcaaugaaaccgggcuggagcucacacugaccaacacguccauuaucaaucauaaauucugcaaccuuucugaugcucacaagaaaaaucuguacgaccaugcccucaugagcauuaucuccaccuuucaccugagcauuccgaacuucaaucaguaugaggccaugucuugugauuuuaacggaggcaagaucuccgugcaguacaaucugagccacgcuuaugccgucgacgcugccaaccauugcggcacaauugcgaauggggugcuccaaaccuucaugcggauggccuggggaggcucuuacaucgcucuggauuccgggaagggaagcugggacuguaucaugacaucuuaccaguaucuuauuauccagaacauuaccugggaagaucacugccaguuuucccgccccagcccuaucggcuaccuggggcuccugucccaaagaacgcgggacauuuauaucucucgcagacuucugggaacauucaccuggacacucagcgauuccgagggcaacgaaacccccggcggguacugucugacccgguggaugcugaucgaggccgagcucaaaugcuuuggaaauacagcuguugccaaguguaacgaaaaacaugacgaggaguucugcgauaugcugcgccuuuuugacuucaauaagcaggcgauuagacggcugaaaacggaagcccagaugagcauccagcucauuaacaaggcugugaaugcccugaucaacgaucaacuuauuaugaagaaucaucugcgcgacaucaugggcaucccuuauugcaacuacucuaaauauugguaccucaaucacaccgucacagggaagaccucccugcccagauguuggcuggugagcaacggaucuuaccucaaugaaacacacuucagcgacgauauugagcagcaggcugacaacaugaucaccgagcugcuucaaaaagaauauauugaucggcagggcaagacgccucuggggcucguggaccuguuugucuucuccacaucuuuuuaccugaucagcauuuuccuucaccucguuaaaaucccgacccaucgccacguggugggaaagcccugcccuaaaccccauagacugaaucacaugggcauuuguuccugcggccuguauaagcacccugggguccccgugaaguggaaacggugaggacuagucccuguucccagagcccacuuuuuuuucuuuuuuugaaauaaaauagccugucuuucagaucuaaaaaaaaaaaaaaaaaaaaaaaaaaaaaaaaaaaaaaaaaaaaaaaaaaaaaaaaaaaaaaaaugcaucccccccccccccccccccccccccccccccaaaggcucuuuucagagccaccagaauu

SEQ ID NO: 2457 - RNA, 1749 nt, Artificial Sequence
  mRNA product Design a-1 comprising derived and/or modified sequence from LASV(Lassa virus/H.sapiens-wt/NGA/2015/ISTH_0543;Clade II)__AVO03639__GPC (opt5)
gggagagucccgcagucggcguccagcggcucugcuuguucgugugugugucguugcaggccuuauucaagcuuaccaugggccagaucauuaccuucuuucaagaggugccccacgucaucgaagagguuaugaacauugugcugaucgcccucagccugcuugcuauucugaaggggaucuacaauguggccacaugcggacucuucggccuggucuccuuucuucugcucugugggagaucuugcagcacgaccuauaaaggaguguacgaacugcagacacuggagcucgacauggcgaaccugaauaugaccaugccucuuuccuguacaaagaacaauucucaucacuauaucaugguuggcaacgaaaccgggcuggagcucacacugaccaauacgagcauuaucaaccauaaauucugcaaucuuuccgaugcucacaagaaaaaccuguacgaccaugcccucaugucuauuaucagcaccuuucaccuguccauuccgaauuucaaccaguaugaggccaugagcugugauuuuaauggaggcaagaucucugugcaguacaaccugucccacacauaugcugucgacgccgcuaaucauugcggcaccauugccaacggggugcuccaaacauucaugcggauggcguggggaggcagcuacaucgcccuggauucugggaagggauccugggacuguaucaugaccagcuaccaguaucuuguuauucagaacacgacaugggaagaucacugccaguuuucucgccccuccccuaucggcuaccuggggcuccugagccaaagaacccgggacauuuauaucucccgcagacuucugggaacauucaccuggacccucucugauagcgagggcaaugaaacacccggcggguacugucugacgcgguggaugcugauugaggcugagcucaaaugcuuuggaaacaccgccguggcuaaguguaaugaaaaacaugacgaggaguucugcgauaugcugcgccuuuuugacuucaacaagcaggccaucagacggcugaaaacagaagcgcagauguccauccagcucauuaauaaggccgucaacgcucugaucaaugaucaacuuauuaugaagaaccaucugcgcgacaucaugggcauuccuuauugcaauuacagcaaauauugguaccucaaccacaccgugacagggaagaccucucugcccagauguuggcugguguccaauggaagcuaccucaacgaaacgcacuucucugacgauaucgagcagcaggccgacaauaugaucacagagcugcuucaaaaagaauauauugaucggcagggcaagaccccucuggggcucgucgaccuguuuguuuucagcaccuccuuuuaccugaucucuauuuuccuucaccucgugaaaaucccgacacaucgccacauuaccggaaagcccugcccuaaaccccauagacugaaccacaugggcaucuguagcugcggccuguauaagcacccuggggugcccgucaaguggaaacggugaggacuagucccuguucccagagcccacuuuuuuuucuuuuuuugaaauaaaauagccugucuuucagaucuaaaaaaaaaaaaaaaaaaaaaaaaaaaaaaaaaaaaaaaaaaaaaaaaaaaaaaaaaaaaaaaaugcaucccccccccccccccccccccccccccccccaaaggcucuuuucagagccaccagaauu

SEQ ID NO: 2458 - RNA, 1749 nt, Artificial Sequence
  mRNA product Design a-1 comprising derived and/or modified sequence from LASV(Lassa virus/H.sapiens-wt/NGA/2016/ISTH_0009;Clade II)__AVO03571__GPC (opt5)
gggagagucccgcagucggcguccagcggcucugcuuguucgugugugugucguugcaggccuuauucaagcuuaccaugggccagaucauuaccuucuuucaagaggugccccacgucaucgaagagguuaugaacauugugcugaucgcccucagccugcuugcuauucugaaggggaucuacaauguggccacaugcggacuccugggccuugucuccuuccugcuccugugugggagaucuugcagcacgaccuauaaaggaguguacgaacugcagacacucgagcuggacauggcgucccuuaacaugaccaugccucugucuuguacaaagaauaacagccaucacuauaucaugguuggcaaugaaaccgggcucgagcugacacuuaccaacacguccauuaucaaucauaaauuuugcaaccugucugaugcucacaagaaaaaucucuacgaccaugcccugaugagcauuaucuccaccuuccaccugagcauuccgaacuuuaaucaguaugaggccaugucuugugauuucaacggaggccggaucuccgugcaguacaaucucagccacucuuaugcugucgacgccgcuaaccauugcggcacaauugccaauggggugcugcaaaccuuuaugcgcauggcguggggaggcuccuacaucgcccuugauagcgggaagggaucuugggacuguaucaugacauccuaccaguaucugauuauccagaacaccacgugggaagaucacugccaguucagcagacccuccccuauuggcuaccucgggcugcuuucucaacggacacgcgacaucuauauuagcagacggcugcucggaaccuuuacauggacccuguccgauagcgagggcaacgaaacccccggcggguacugucugacacgcuggaugcucaucgaggcugagcugaagugcuucggaaauacggccguugcuaaauguaacgaaaagcaugacgaggaauuuugcgauaugcuuagacuguucgacuuuaauaaacaggccauccggcgccucaagaccgaggcgcagaugucuauucagcugaucaacaaagccgugaaugcucuuauuaacgaucaacugaucaugaagaaucaccucagagacauuaugggcaucccuuauugcaacuacuccaaguauugguaccugaaucacacagucaccgggaaaacaagccugccccgguguuggcucgugucuaacggaagcuaccugaaugaaacccauuucuccgacgauaucgagcagcaggccgacaacaugauuacggagcuucugcaaaaggaauauaucgaucgccagggcaaaacaccucucgggcugguggaccuguucgucuuuucuaccagcuucuaccuuauuuccaucuuucuccaccugguuaagauuccgacccauagacacaucacaggaaaacccugcccuaagccccaucggcugaaucacaugggcauuuguagcugcggccucuauaaccacccuggggugcccgugaaauggaagcgcugaggacuagucccuguucccagagcccacuuuuuuuucuuuuuuugaaauaaaauagccugucuuucagaucuaaaaaaaaaaaaaaaaaaaaaaaaaaaaaaaaaaaaaaaaaaaaaaaaaaaaaaaaaaaaaaaaugcaucccccccccccccccccccccccccccccccaaaggcucuuuucagagccaccagaauu

SEQ ID NO: 2459 - RNA, 1749 nt, Artificial Sequence
  mRNA product Design a-1 comprising derived and/or modified sequence from LASV(Lassa virus/H.sapiens-wt/NGA/2016/ISTH_0017;Clade II)__AVO03567__GPC (opt5)
gggagagucccgcagucggcguccagcggcucugcuuguucgugugugugucguugcaggccuuauucaagcuuaccaugggccagaucauuaccuucuuucaagaggugccccacgucaucgaagagguuaugaacauugugcugaucgcccucagccugcuugcuauucugaaggggaucuacaauguggccacaugcggacucuucggccuggucuccuuucuucugcucugugggagaucuugcagcacgaccuauaaaggaguguacgaacugcagacacuggagcucgacauggcgucccugaacaugaccaugccucuuucuuguacaaagaauaacagccaucacuauaucaugguuggcaaugaaaccgggcuggagcucacacugaccaacacguccauuaucaaucauaaauucugcaaccuuucugaugcucacaagaaaaaucuguacgaccaugcccucaugagcauuaucuccaccuuucaccugagcauuccgaacuucaaucaguaugaggccaugucuugugauuuuaacggaggcaagaucuccgugcaguacaaucugagccacacauaugcuauugacgccgcuaaccauugcggcaccaucgccaaugggguccuccaaacauucaugcggauggcguggggaggcucuuacaucgcccuggauuccgggaagggaagcugggacuguauuaugaccucuuaccaguaucuuaucauucagaacacgacaugggaagaucacugccaguuuucccgccccagcccuaucggcuaccuggggcuccugucccaaagaacccgggacauuuauaucucucgcagacuucugggaacauucaccuggacccucagcgauuccgagggcaacgaaacacccggcggguacugucugacgcgguggaugcugaucgaggcugagcucaaaugcuuuggaaauaccgccguggcuaaguguaacgaaaaacaugacgaggaguucugcgauaugcugcgccuuuuugacuucaauaagcaggccauuagacggcugaaaacagaagcgcagaugagcauccagcucauuaacaaggccguuaaugcucugaucaacgaucaacuuauuaugaagaaucaucugcgcgacaucaugggcaucccuuauugcaacuacucuaaauauugguaccucaaucacaccgugacagggaagaccucccugcccagauguuggcuggucagcaacggaucuuaccucaaugaaacgcacuucagcgacgauauugagcagcaggccgacaacaugaucacagagcugcuucaaaaagaauauauggaucggcagggcaagaccccucuggggcucguggaccuguuuguguucuccaccucuuuuuaccugauuagcaucuuccuucaccucguccgcauuccgacacauagacacguuaucggaaaacccugcccuaagccccaucggcugaaucacaugggcauuuguuccugcggccuguauaaacacccuggggugcccgugaaguggaagcgcugaggacuagucccuguucccagagcccacuuuuuuuucuuuuuuugaaauaaaauagccugucuuucagaucuaaaaaaaaaaaaaaaaaaaaaaaaaaaaaaaaaaaaaaaaaaaaaaaaaaaaaaaaaaaaaaaaugcaucccccccccccccccccccccccccccccccaaaggcucuuuucagagccaccagaauu

SEQ ID NO: 2460 - RNA, 1749 nt, Artificial Sequence
  mRNA product Design a-1 comprising derived and/or modified sequence from LASV(Lassa virus/H.sapiens-wt/NGA/2018/ISTH_0959;Clade II)__AVV65099__GPC (opt5)
gggagagucccgcagucggcguccagcggcucugcuuguucgugugugugucguugcaggccuuauucaagcuuaccaugggccagaucauuaccuucuuucaagaggugccccacgucaucgaagagguuaugaacauugugcugaucgcccucagccugcuugcuauucugaaggggaucuacaauguggucacaugcggacucuucggccugguguccuuucuucugcucugugggagaucuugcagcacgaccuauaaaggaguuuacgaacugcagacacuggagcucgacauggccucccugaacaugaccaugccucuuucuuguacaaagaauaacagccaucacuauaucauggugggcaaugaaaccgggcuggagcucacacugaccaacacguccauuaucaaucauaaauucugcaaccuuucugaugcgcacaagaaaaaucuguacgaccaugcucucaugagcauuaucuccaccuuucaccugagcauuccgaacuucaaucaguaugaggccaugucuugugauuuuaacggaggcaagaucuccguccaguacaaucugagccacgccuaugcuauugacgccgcuaaccauugcggcacaaucgccaauggggugcuccaaaccuucaugcggauggcguggggaggcucuuacaucgcccuggauuccgggaagggaagcugggacuguauuaugacaucuuaccaguaucuuaucauucagaacaccacgugggaagaucacugccaguuuucccgccccagcccuaucggcuaccuggggcuccugucccaaagaacacgggacauuuauaucucucgcagacuucugggaaccuucacauggacccucagcgauuccgagggcaacgaaacccccggcggguacugucugacacgguggaugcugaucgaggcugagcucaaaugcuuuggaaauacggccguugcuaaguguaacgaaaaacaugacgaggaguucugcgauaugcugcgccuuuuugacuucaauaagcaggccauuagacggcugaaaaccgaagcgcagaugagcauccagcucauuaacaaggccgugaaugcucugaucaacgaucaacuuauuaugaagaaucaucugcgcgacaucaugggcaucccuuauugcaacuacucuaaauauugguaccucaaucacacagucaccgggaagacaucccugcccagauguuggcuggugagcaacggaucuuaccucaaugaaacccacuucagcgacgauauugagcagcaggccgacaacaugaucacggagcugcuucaaaaagaauauauugaucggcagggcaagacaccucuggggcucguggaccuguuugucuucuccaccucuuuuuaccugaucagcauuuuccuucaccucguuaaaaucccgacccaucgccacgugauuggaaagcccugcccuaaaccccauagacugaaucacaugggcaucuguuccugcggccuguauaagcacccuggggugcccgucaaguggaaacggugaggacuagucccuguucccagagcccacuuuuuuuucuuuuuuugaaauaaaauagccugucuuucagaucuaaaaaaaaaaaaaaaaaaaaaaaaaaaaaaaaaaaaaaaaaaaaaaaaaaaaaaaaaaaaaaaaugcaucccccccccccccccccccccccccccccccaaaggcucuuuucagagccaccagaauu

SEQ ID NO: 2461 - RNA, 1749 nt, Artificial Sequence
  mRNA product Design a-1 comprising derived and/or modified sequence from LASV(LASV003-NIG-2008;Clade II)__AIT17580__GPC (opt5)
gggagagucccgcagucggcguccagcggcucugcuuguucgugugugugucguugcaggccuuauucaagcuuaccaugggccagaucauuaccuucuuucaagaggugccccacgucaucgaagagguuaugaacauugugcugaucgcccucagccugcuugcuauucugaaggggaucuacaauguggccacaugcggacucuucggccuggucuccuuucuucugcucugugggagaucuugcagcacgaccuauaaaggaguguacgaacugcagacacuggagcucgacauggcgucccugaacaugaccaugccucuuucuuguacaaagaauaacagccaucacuauaucaugguuggcaaugaaaccgggcuggagcucacacugaccaacacguccauuaucaaucauaaauucugcaaccuuucugaugcucacaagaaaaaucuguacgaccaugcccucaugagcauuaucuccaccuuucaccugagcauuccgaacuucaaucaguaugaggccaugucuugugauuuuaacggaggcaagaucuccgugcaguacaaucugagccacacauaugcugucgacgccgcuaaccauugcggcaccauugccaauggggugcuccaaacauucaugcggauggcguggggaggcucuuacaucgcccuggauuccgggaagggaagcugggacuguaucaugaccucuuaccaguaucuuauuauccagaacacgacaugggaagaucacugccaguuuucccgccccagcccuauuggcuaccuggggcuccugucccaaagaacccgggacaucuauauuucucgcagacuucugggaacauucaccuggacccucagcgauuccgagagcaacgaaacacccggcggcuacugucugacgcgguggaugcugaucgaggcugagcucaaaugcuuugggaauaccgccguugcuaaguguaacgaaaaacaugacgaggaguucugcgauaugcugcgccuuuuugacuucaauaagcaggccaucagacggcugaaagcggaagcccagaugucuauucagcucaucaacaaggcugugaaugcccugauuaacgaucaacuuaucaugaagaaucaucugcgcgacauuaugggaaucccuuauugcaacuacuccaaauauugguaccucaaucacacagucaccggcagaacaagccugccccgguguuggcuggugucuaacgggagcuaccucaaugaaacccacuucuccgacgauaucgagcagcaggcugacaacaugauuacggagcugcuucaaaaggaauauauggaucgccagggaaaaacaccucugggccucguggaccuguuugucuucucuaccagcuuuuaccugaucuccauuuuccuucaccucguuaagaucccgacccauagacacgugauugggaaacccugcccuaagccccaucggcugaaucacaugggaaucuguagcugcggccuguauaaacacccuggcgugcccgucaaguggaagcgcugaggacuagucccuguucccagagcccacuuuuuuuucuuuuuuugaaauaaaauagccugucuuucagaucuaaaaaaaaaaaaaaaaaaaaaaaaaaaaaaaaaaaaaaaaaaaaaaaaaaaaaaaaaaaaaaaaugcaucccccccccccccccccccccccccccccccaaaggcucuuuucagagccaccagaauu

SEQ ID NO: 2462 - RNA, 1749 nt, Artificial Sequence
  mRNA product Design a-1 comprising derived and/or modified sequence from LASV(LASV035-NIG-2009;Clade II)__AIT17588__GPC (opt5)
gggagagucccgcagucggcguccagcggcucugcuuguucgugugugugucguugcaggccuuauucaagcuuaccaugggccagaucauuaccuucuuucaagaggugccccacgucaucgaagagguuaugaacauugugcugaucgcccucagccugcuugcuauucugaaggggaucuacaauguggccacaugcggacucuucggccuggucuccuuucuucugcucugugggagaucuugcagcacgaccuauaaaggaguguacgaacugcagacacuggagcucgacauggcgucccugaacaugaccaugccucuuucuuguacaaagaauaacagccaucacuauaucaugguuggcaaugaaaccgggcuggagcucacacugaccaacacguccauuaucaaucauaaauucugcaaccuuucugaugcucacaagaaaaaucuguacgaccaugcccucaugagcauuaucuccaccuuucaccugagcauuccgaacuucaaucaguaugaggccaugucuugugauuuuaacggaggcaagaucuccgugcaguacaaucugagccacgcuuaugccgucgacgcugccaaccauugcggcacaauugcgaauggggugcuccaaaccuucaugcggauggccuggggaggcucuuacaucgcucuggauuccgggaagggaagcugggacuguaucaugacaucuuaccaguaucuuauuauccagaacaccacgugggaagaucacugccaguuuucccgccccagcccuauuggcuaccuggggcuccugucccaaagaacacgggacaucuauauuucucgcagacuucugggaaccuucacauggacccucagcgauuccgagggcaacgaaacccccggcggguacugucugacacgguggaugcugaucgaggccgagcucaaaugcuuuggaaauacggcuguugccaaguguaacgaaaaacaugacgaggaguucugcgauaugcugcgccuuuuugacuucaauaagcaggcgaucagacggcugaaagccgaagcucagaugagcauucagcucaucaacaaggccgugaaugcucugauuaacgaucaacuuaucaugaagaaucaucugcgcgacauuaugggcaucccuuauugcaacuacucuaaauauugguaccucaaucacaccgucacagggaagaccucccugcccagauguuggcuggugagcaacggaucuuaccucaaugaaacacacuucagcgacgauaucgagcagcaggccgacaacaugauuaccgagcugcuucaaaaagaauauaucgaucggcagggcaagacgccucuggggcucguggaccuguuugucuucuccacaucuuuuuaccugauuagcaucuuccuucaccucguuaaaauuccgacccaucgccacgugaucggaaagcccugcccuaaaccccauagacugaaucacaugggcauuuguuccugcggccuguauaagcacccuggggugcccgucaaguggaaacggugaggacuagucccuguucccagagcccacuuuuuuuucuuuuuuugaaauaaaauagccugucuuucagaucuaaaaaaaaaaaaaaaaaaaaaaaaaaaaaaaaaaaaaaaaaaaaaaaaaaaaaaaaaaaaaaaaugcaucccccccccccccccccccccccccccccccaaaggcucuuuucagagccaccagaauu

SEQ ID NO: 2463 - RNA, 1749 nt, Artificial Sequence
  mRNA product Design a-1 comprising derived and/or modified sequence from LASV(LASV1000-NIG-2009;Clade II)__AIT17782__GPC (opt5)
gggagagucccgcagucggcguccagcggcucugcuuguucgugugugugucguugcaggccuuauucaagcuuaccaugggccagaucauuaccuucuuucaagaggugccccacgucaucgaagagguuaugaacauugugcugaucgcccucagccugcuugcuauucugaaggggaucuacaauguggccacaugcggacucuucggccuggucuccuuucuucugcucugugggagaucuugcagcacgaccuauaaaggaguguacgaacugcagacacuggagcucgacauggcgucccugaacaugaccaugccucuuucuuguacaaagaauaacagccaucacuauaucaugguuggcaaugaaaccgggcuggagcucacacugaccaacacguccauuaucaaucauaaauucugcaaccuuucugaugcucacaagaaaaaucuguacgaccaugcccucaugagcauuaucuccaccuuucaccugagcauuccgaacuucaaucaguaugaggccaugucuugugauuuuaacggaggcaagaucuccgugcaguacaaucugagccacacauaugcugucgacgccgcuaaccauugcggcaccauugccaauggggugcuccaaacauucaugcggauggcguggggaggcucuuacaucgcccuggauuccgggaagggaagcugggacuguaucaugaccucuuaccaguaucuuauuauccagaacacgacaugggaagaucacugccaguuuucccgccccagcccuauuggcuaccuggggcuccugucccaaagaacccgggacaucuauauuucucgcagacuucugggaacauucaccuggacccucagcgauuccgagggcaacgaaacacccggcggguacugucugacgcgguggaugcugaucgaggcugagcucaaaugcuuuggaaauaccgccguugcuaaguguaacgaaaaacaugacgaggaguucugcgauaugcugcgccuuuuugacuucaauaagcaggccaucaaaagacugaagacagaagcgcagaugagcauucagcucaucaacaaggccgugaaugcucugauuaacgaucaacuuaucaugaaaaaucaucugcgggacauuaugggcaucccuuauugcaacuacucuaaguauugguaccucaaucacaccgucacagggaaaaccucccugccccgcuguuggcuggugagcaacggaucuuaccucaaugaaacgcacuucagcgacgauaucgagcagcaggccgacaacaugauuacagagcugcuucaaaaggaauauaucgauagacagggcaaaaccccucuggggcucguggaccuguuugucuucuccaccucuuuuuaccugauuagcaucuuccuucaccucguuaagauuccgacacaucggcacguggugggaaaacccugcccuaagccccaucgccugaaucacaugggcaucuguuccugcggccuguauaagcacccugggguccccgugaaauggaagagaugaggacuagucccuguucccagagcccacuuuuuuuucuuuuuuugaaauaaaauagccugucuuucagaucuaaaaaaaaaaaaaaaaaaaaaaaaaaaaaaaaaaaaaaaaaaaaaaaaaaaaaaaaaaaaaaaaugcaucccccccccccccccccccccccccccccccaaaggcucuuuucagagccaccagaauu

SEQ ID NO: 2464 - RNA, 1749 nt, Artificial Sequence
  mRNA product Design a-1 comprising derived and/or modified sequence from LASV(LASV221-NIG-2010;Clade II)__AIT17624__GPC (opt5)
gggagagucccgcagucggcguccagcggcucugcuuguucgugugugugucguugcaggccuuauucaagcuuaccaugggccagaucauuaccuucuuucaagaggugccccacgucaucgaagagguuaugaacauugugcugaucgcccucagccugcuugcuauucugaaggggaucuacaauguggccacaugcggacucuucggccuggucuccuuucuucugcucugugggagaucuugcagcacgaccuauaaaggaguguacgaacugcagacacuggagcucgacauggcgucccugaacaugaccaugccucuuucuuguacaaagaauaacagccaucacuauaucaugguuggcaaugaaaccgggcuggagcucacacugaccaacacguccauuaucaaucauaaauucugcaaccuuucugaugcucacaagaaaaaucuguacgaccaugcccucaugagcauuaucuccaccuuucaccugagcauuccgaacuucaaucaguaugaggccaugucuugugauuuuaacggaggcaagaucuccgugcaguacaaucugagccacacauaugcuauugacgccgcuaaccauugcggcaccaucgccaaugggguccuccaaacauucaugcggauggcguggggaggcucuuacaucgcccuggauuccgggaagggaagcugggacuguauuaugaccucuuaccaguaucuuaucauucagaacacgacaugggaagaucacugccaguuuucccgccccagcccuaucggcuaccuggggcuccugucccaaagaacccgggacauuuauaucucucgcagacuucugggaacauucaccuggacccucagcgauuccgagggcaacgaaacacccggcggguacugucugacgcgguggaugcugaucgaggcugagcucaaaugcuuuggaaauaccgccguggcuaaguguaacgaaaaacaugacgaggaguucugcgauaugcugcgccuuuuugacuucaauaagcaggccauuagacggcugaaaacagaagcgcagaugagcauccagcucauuaacaaggccguuaaugcucugaucaacgaucaacuuauuaugaagaaucaucugcgcgacaucaugggcaucccuuauugcaacuacucuaaauauugguaccucaaucacaccgugacagggaagaccucccugcccagauguuggcuggucagcaacggaucuuaccucaaugaaacgcacuucagcgacgauauugagcagcaggccgacaacaugaucacagagaugcugcaaaaagaauauauggaucggcagggcaagaccccucuugggcugguggaccucuuuguguucuccaccucuuuuuaccugauuagcaucuuccugcaccuugucaaaauuccgacacaucgccacguuaucggaaagcccugcccuaaaccccauagacucaaucacaugggcauuuguuccugcggccuguauaagcacccuggggugcccgugaaguggaaacggugaggacuagucccuguucccagagcccacuuuuuuuucuuuuuuugaaauaaaauagccugucuuucagaucuaaaaaaaaaaaaaaaaaaaaaaaaaaaaaaaaaaaaaaaaaaaaaaaaaaaaaaaaaaaaaaaaugcaucccccccccccccccccccccccccccccccaaaggcucuuuucagagccaccagaauu

SEQ ID NO: 2465 - RNA, 1749 nt, Artificial Sequence
  mRNA product Design a-1 comprising derived and/or modified sequence from LASV(LASV237-NIG-2010;Clade II)__AIT17638__GPC (opt5)
gggagagucccgcagucggcguccagcggcucugcuuguucgugugugugucguugcaggccuuauucaagcuuaccaugggccagaucauuaccuucuuucaagaggugccccacgucaucgaagagguuaugaacauugugcugaucgcccucagccugcuugcuauucugaaggggaucuacaauguggccacaugcggacucuucggccuggucuccuuucuucugcucugugggagaucuugcagcacgaccuauaaaggaguguacgaacugcagacacuggagcucgacauggcgucccugaacaugaccaugccucuuucuuguacaaagaauaacagccaucacuauaucaugguuggcaaugaaaccgggcuggagcucacacugaccaacacguccauuaucaaucauaaauucugcaaccuuucugaugcucacaagaaagaccuguacgaucaugcccucaugagcauuaucuccaccuuucaccugagcauuccgaauuucaaccaguaugaggccaugucuugugacuuuaauggaggcaagaucuccgugcaguacaaccugagccacacauaugcugucgaugccgcuaaucauugcggcaccauugccaacggggugcuccaaacauucaugcggauggcguggggaggcucuuacaucgcccuggacuccgggaagggaagcugggauuguaucaugaccucuuaccaguaucuuauuauccagaauacgacaugggaagaccacugccaguuuucccgccccagcccuauuggcuaccuggggcuccugucccaaagaacccgggauaucuauauuucucgcagacuucugggaacauucaccuggacccucagcgacuccgagggcaacgaaacacccggcggguacugucugacgcgguggaugcugaucgaggcugagcucaaaugcuuuggaaacaccgccguugcuaaguguaaugaaaaacaugaugaggaguucugcgacaugcugcgccuuuuugauuucaacaagcaggccaucagacggcugaaaacagaagcgcagaugagcauucagcucaucaauaaggccgugaacgcucugauuaaugaccaacuuaucaugaagaaccaucugcgcgacauuaugggcaucccuuauugcaauuacucuaaauauugguaccucaaccacaccgucacagggaagaccucccugcccagauguuggcuggugagcaauggaucuuaccucaacgaaacgcacuucagcgaugacaucgagcagcaggccgauaauaugauuacagagcugcuucaaaaagaauauauggaccggcagggcaagaccccucuggggcucguggaucuguuugucuucuccaccucuuuuuaccugaucagcauuuuccuucaccucaucaaaauuccgacacaucgccacaucaccggaaagcccugcccuaaaccccauagacugaaccacaugggcauuuguuccugcggccuguauaagcacccugggguucccgugaaguggaaacggugaggacuagucccuguucccagagcccacuuuuuuuucuuuuuuugaaauaaaauagccugucuuucagaucuaaaaaaaaaaaaaaaaaaaaaaaaaaaaaaaaaaaaaaaaaaaaaaaaaaaaaaaaaaaaaaaaugcaucccccccccccccccccccccccccccccccaaaggcucuuuucagagccaccagaauu

SEQ ID NO: 2466 - RNA, 1749 nt, Artificial Sequence
  mRNA product Design a-1 comprising derived and/or modified sequence from LASV(LASV253-NIG-2011;Clade II)__AIT17670__GPC (opt5)
gggagagucccgcagucggcguccagcggcucugcuuguucgugugugugucguugcaggccuuauucaagcuuaccaugggccagaucauuaccuucuuucaagaggugccccacgucaucgaagagguuaugaacauugugcugaucgcccucagccugcuugcuauucugaaggggaucuacaauguggccacaugcggacucuucggccuggucuccuuucuucugcucugugggagaucuugcagcacgaccuauaaaggaguguacgaacugcagacacuggagcucgacauggcgucccugaacaugaccaugccucuuucuuguacaaagaauaacagccaucacuauaucaugguuggcaaugaaaccgggcuggagcucacacugaccaacacguccauuaucaaucauaaauucugcaaccuuucugaugcucacaagaaaaaucuguacgaccaugcccucaugagcauuaucuccaccuuucaccugagcauuccgaacuucaaucaguaugaggccaugucuugugauuuuaacggaggcaagaucuccgugcaguacaaucugagccacacauaugcugucgacgccgcuaaccauugcggcaccauugccaauggggugcuccaaacauucaugcggauggcguggggaggcucuuacaucgcccuggauuccgggaagggaagcugggacuguaucaugaccucuuaccaguaucuuauuauccagaacacgacaugggaagaucacugccaguuuucccgccccagcccuauuggcuaccuggggcuccugucccaaagaacccgggacaucuauauuucucgcagacuucugggaacauucaccuggacccucagcgauuccgagggcaacgaaacacccggcggguacugucugacgcgguggaugcugaucgaggcugagcucaaaugcuuuggaaauaccgccguugcuaaguguaacgaaaaacaugacgaggaguucugcgauaugcugcgccuuuuugacuucaauaagcaggccaucagacggcugaaagcggaagcccagaugagcauucagcucaucaacaaggcugugaaugcccugauuaacgaucaacuuaucaugaagaaucaucugcgcgacauuaugggcaucccuuauugcaacuacucuaaauauugguaccucaaucacacagucaccgggagaacaucccugccccgguguuggcuggugagcaacggaucuuaccucaaugaaacccacuucagcgacgauaucgagcagcaggcugacaacaugauuacggagcugcuucaaaaggaauauaucgaucgccagggcaaaacaccucuggggcucguggaccuguuugucuucuccaccucuuuuuaccugauuagcaucuuccuucaccucguuaagauuccgacccauagacacaucauuggaaaacccugcccuaagccccaucggcugaaucacaugggcaucuguuccugcggccuguauaaacacccuggggugcccgugaaguggaagcgcugaggacuagucccuguucccagagcccacuuuuuuuucuuuuuuugaaauaaaauagccugucuuucagaucuaaaaaaaaaaaaaaaaaaaaaaaaaaaaaaaaaaaaaaaaaaaaaaaaaaaaaaaaaaaaaaaaugcaucccccccccccccccccccccccccccccccaaaggcucuuuucagagccaccagaauu

SEQ ID NO: 2467 - RNA, 1749 nt, Artificial Sequence
  mRNA product Design a-1 comprising derived and/or modified sequence from LASV(LASV254-NIG-2011;Clade II)__AIT17674__GPC (opt5)
gggagagucccgcagucggcguccagcggcucugcuuguucgugugugugucguugcaggccuuauucaagcuuaccaugggccagaucauuaccuucuuucaagaggugccccacgucaucgaagagguuaugaacauugugcugaucgcccucagccugcuugcuauucugaaggggaucuacaauguggccacaugcggacucuucggccuggucuccuuucuucugcucugugggagaucuugcagcacgaccuauaaaggaguguacgaacugcagacacuggagcucgacaugaccaaccugaauaugacaaugccucuuuccuguaccaagaacaauucucaucacuauaucaugguuggcaacgaaacagggcuggagcucacccugacgaauaccagcauuaucaaccauaaauucugcaaucuuuccgaugcgcacaagaaaaaccuguacaaucaugcucucaugucuauuaucagcacauuucaccuguccauuccgaacuucaaucaguaugaggccaugagcugugacuuuaacggaggcaagaucucugugcaguacaaucugucccacagcuaugccgucgaugcugccaaccauugcggcaccauugcuaacggggugcuccaaacauucaugcggauggccuggggaggcucuuacaucgcgcuggacuccgggaagggaaauugggauuguaucaugaccagcuaccaguaucuuauuauccagaacacgacaugggaagaccacugccaguuuucucgccccuccccuauuggcuaccuggggcuccugagccaaagaacccgggauaucuauauuucccgcagacuucugggaacauucaccuggacccucucugacagcgagggcaaugaaacacccggcggguacugucugacgcgguggaugcugaucgaggccgagcucaaaugcuuuggaaacaccgcuguugccaaguguaaugaaaaacaugaugaggaguucugcgacaugcugcgccuuuuugauuucaacaagcaggcuaucagacggcugaaaacagaagcccaggcgaauauucagcucaucaacaaggccgugaaugcucugauuaacgaccaacuuaucaugaagaaucaucugcgcgauauuaugggcaucccuuauugcaacuacuccaaauauugguaccucaaucacaccgucacagggaagaccagccugcccagauguuggcuggugucuaacggauccuaccucaaugaaacgcacuucagcgacgacaucgagcagcaggccgauaacaugauuacagagcugcuucaaaaagaauauauggaccggcagggcaagaccccucuggggcucguggaucuguuugucuucucuaccagcuuuuaccugaucuccauuuuccuucaccucguuaaaaucccgacacaucgccacgugauuggaaagcccugcccuaaaccccauagacugaaccacaugggcaucuguucuugcggccuguauaagcacccuggggugcccgucaaguggaaacggugaggacuagucccuguucccagagcccacuuuuuuuucuuuuuuugaaauaaaauagccugucuuucagaucuaaaaaaaaaaaaaaaaaaaaaaaaaaaaaaaaaaaaaaaaaaaaaaaaaaaaaaaaaaaaaaaaugcaucccccccccccccccccccccccccccccccaaaggcucuuuucagagccaccagaauu

SEQ ID NO: 2468 - RNA, 1749 nt, Artificial Sequence
  mRNA product Design a-1 comprising derived and/or modified sequence from LASV(Nig08-A19;Clade III)__ADU56618__GPC (opt5)
gggagagucccgcagucggcguccagcggcucugcuuguucgugugugugucguugcaggccuuauucaagcuuaccaugggccagaucgugaccuucuuucaagaggucccccacguuauugaagaggugaugaacaucgugcugauugcccucagcauccuggcuauucuuaaggggcuguacaauaucgccacaugcggacucaucggccuggucacguuccuucugcucuccgggagaucuuguagcaugaccuauaaaggaguguacgaacugcagacacuggagcucaacaugaauacccugaacaugacaaugccucuuuccugcaccaagaauaacucucaucacuauauuaugguuggcaaugaaacagggcuggagcucacccugacgaacaccagccuucugcaucacaaauuuuguaaucucuccgacgcgcauaagaaaaaccuguacgaucacacacugaugucuaucauuagcaccuuccaccucuccaucccgaauuuuaaccaguaugaggcuaugagcugcgacuucaauggaggcaagauuacagugcaguacaaccugucucauuccuaugccaucgaugccgcuaaucacuguggcaccgucgccaacggggugcuucaaacguuuaugcggauggcuuggggaggcagcuacauugcccuggacucugggcgcggaaagugggauugcaucaugacauccuaccaguaucucaucauucagaacaccacaugggaagaccauugucaguucagcagacccucuccuaucggcuaccuggggcuucugucccaacggacccgcgauauuuauaucagcagacggcuccugggaaccuuuacauggacgcuguccgacucugagggcaaugaaacccccggcggguacugccucacacgcuggaugcugauugaggcggagcuuaaauguuucggaaacaccgccguugcuaagugcaaugaaaaacacgaugaggaauuuugugacaugcugagacucuucgauuuuaacaagcaggccauccggcgccugaaagcugaggcccagaugagcauccagcuuauuaauaaggcggugaacgcccugaucaaugaccaacucauuaugaagaaccaccugagagauaucaugggcauuccuuauugcaauuacuccaaauauugguaccugaaccauacaagcaccgggcggacgucucucccccgcugcuggcuggucuccaauggaagcuaccuuaacgaaacacacuucucugacgacaucgagcagcaggcugauaauaugaucaccgagaugcugcaaaaggaauaucucgacagacagggcaaaaccccucuggggcugguggaucuuuucguguuuagcacauccuucuaccucauuucuaucuuucugcaucuggucaagauuccgacccaccggcauaucguuggaaaacccuguccuaagccccaccgccucaaccacaugggcauuugcagcuguggccuguauaaacagccuggggugcccgugagauggaagcggugaggacuagucccuguucccagagcccacuuuuuuuucuuuuuuugaaauaaaauagccugucuuucagaucuaaaaaaaaaaaaaaaaaaaaaaaaaaaaaaaaaaaaaaaaaaaaaaaaaaaaaaaaaaaaaaaaugcaucccccccccccccccccccccccccccccccaaaggcucuuuucagagccaccagaauu

SEQ ID NO: 2469 - RNA, 1752 nt, Artificial Sequence
  mRNA product Design a-1 comprising derived and/or modified sequence from LASV(G1180-SLE-2010;Clade IV)__AIT17168__GPC (opt5)
gggagagucccgcagucggcguccagcggcucugcuuguucgugugugugucguugcaggccuuauucaagcuuaccaugggccagaucgugaccuucuuucaagaggucccccacguuauugaagaggugaugaacaucgugcugauugcccucagcauccuggcuguccuuaaggggcuguacaauuucgccacaugcggacucgugggccugcuuacguuucugcuccugugugggagauccugcaccgcgucucgguauaaaggaguuuacgaacugcagacacucgagcugaacauggaaacccuuaauaugacaaugccucugagcuguaccaagaacaauucccaucacuauauuauggugggcaacgagacagggcucgagcugacccuuacgaauaccucuaucaucaaccauaaauucugcaaucugagcgacgcucacaagaaaaaccucuacgaucaugcccugauguccauuaucucuacauuucaccugagcauuccgaauuucaaccaguaugaagccauguccugugacuuuaauggaggcaagaucagcguccaguacaaccucucucacuccuaugcuggcgaugccgcuaaucauugcgggaccguggccaacggaguucugcaaacauucaugcgcauggcguggggcgggagcuacauugcccuugacucuggacacggcuccugggauuguaucaugaccagcuaccaguaucugauuauccagaacacgacaugggaggaccauugccaguuuucuagacccuccccuaucggguaccucggacugcuuagccaacggacccgcgauauuuauaucuccagacggcugcucggcacauucaccuggacccugucugacagcgaaggcaaggauacacccgggggauacugucugacgcgcuggaugcucauugaggcugagcugaaaugcuuuggcaauaccgccguggcuaaguguaacgaaaaacacgacgaggaguucugcgauaugcuuagacuguuugacuucaauaagcaggccauccagcggcucaaagcggaagcccagauguccauucaacugaucaacaaggcugucaaugcccuuaucaacgaucagcugauuaugaagaaucaccuccgcgacaucauggggauuccuuauugcaacuacagcaaauauugguaccugaaucauacaaccacaggaaagaccucucugcccaaauguuggcucguguccaacggcagcuaccugaaugaaacgcacuucucugacgauaucgagcagcaagcugacaacaugauuacagagaugcuucagaaggaauauauggagagacaggggaaaaccccucugggacucguggaucuguuugucuucagcaccuccuuuuaccugaucucuaucuuccuucaucucguuaagauuccgacacaccggcauaucgugggcaaaagcugccccaagccucaccgccugaaucacaugggcauuuguuccugcgggcuguauaagcagcccggagugccugucaaauggaagagaugaggacuagucccuguucccagagcccacuuuuuuuucuuuuuuugaaauaaaauagccugucuuucagaucuaaaaaaaaaaaaaaaaaaaaaaaaaaaaaaaaaaaaaaaaaaaaaaaaaaaaaaaaaaaaaaaaugcaucccccccccccccccccccccccccccccccaaaggcucuuuucagagccaccagaauu

SEQ ID NO: 2470 - RNA, 1752 nt, Artificial Sequence
  mRNA product Design a-1 comprising derived and/or modified sequence from LASV(G1442-SLE-2011;Clade IV)__AIT17180__GPC (opt5)
gggagagucccgcagucggcguccagcggcucugcuuguucgugugugugucguugcaggccuuauucaagcuuaccaugggccagaucgugaccuucuuucaagaggucccccacguuauugaagaggugaugaacaucgugcugauugcccucagcauccuggcuguccuuaaggggcuguacaauguggccacaugcggacucauuggccugguuacguuccuucugcucugugggagauccugcaccacaacccuguauaaaggaguguacgaacugcagacacucgagcugaacauggaaacccuuaauaugacaaugccucugucuuguaccaagaacaauagccaucacuauauccgggucggcaacgagacggggcucgagcugacccuuacaaauaccuccaucauuaaccauaaauuuugcaaucugucugacgcgcacaagaaaaaccucuacgaucaugcucugaugagcaucauuuccacauuccaccugucuaucccgaauuuuaaccaguaugaagccaugagcugugacuucaauggaggcaagauuuccgugcaguacaaccucagccacucuuaugccggcgaugcugccaaucauugcgggaccguugcuaacggagugcugcaaacguuuaugcgcauggccuggggcggguccuacaucgcgcuugacagcggaagaggcaacugggauuguauuaugacaucuuaccaguaucugaucauccagaauaccacaugggacgaucacugccaguucucccggcccagcccuauuggguaccucggacugcuuucucaacgcaccagagacgucuauaucucccggcgccugcucggcaccuuuacauggacgcugagcgauuccgagggcaaggacacccccgggggauacugucugacaagauggaugcucauugaagccgagcugaaaugcuucggcaacaccgcuguggccaaguguaaugagaaacaugaugaagaguuuugcgacaugcuucggcuguucgauuuuaacaagcaggcuauccagcgccucaaagccgaagcgcagaugucuauucaacugaucaauaaggccgugaacgcucuuaucaaugaccagcugauuaugaagaaccaccucagagacaucauggggauuccuuauugcaauuacagcaaauauugguaccugaacaauacagccaccggaaagacgucccugcccaaauguuggcucaucagcaacggcucuuaccugaaugagacacacuucuccgaugacauugaacaggaggcugauaacaugaucaccgagaugcuucaaaaggaauauauggagcggcaggggaaaaccccucugggacucgucgaccuguucguuuuuagcacaucuuucuaccugaucagcauuuuucuucaucucgugaagaucccgacccaccgccauauugugggcaaauccugccccaagccucacagacugaaucauaugggcaucuguucuugcgggcuguauaagcagcccggagucccugugcgguggaaacgcugaggacuagucccuguucccagagcccacuuuuuuuucuuuuuuugaaauaaaauagccugucuuucagaucuaaaaaaaaaaaaaaaaaaaaaaaaaaaaaaaaaaaaaaaaaaaaaaaaaaaaaaaaaaaaaaaaugcaucccccccccccccccccccccccccccccccaaaggcucuuuucagagccaccagaauu

SEQ ID NO: 2471 - RNA, 1752 nt, Artificial Sequence
  mRNA product Design a-1 comprising derived and/or modified sequence from LASV(G3010-SLE-2013;Clade IV)__AIT17344__GPC (opt5)
gggagagucccgcagucggcguccagcggcucugcuuguucgugugugugucguugcaggccuuauucaagcuuaccaugggccagaucgugaccuucuuucaagaggucccccacguuauugaagaggugaugaacaucgugcugauugcccucagcauccuggcuguccuuaaggggcuguacaauuucgccacaugcggacucgugggccugguuacguuucuucugcucugugggagauccugcaccacaucucuguauaaaggaguguacgaacugcagacccucgagcugaacauggaaacacuuaauaugaccaugccucugagcuguacaaagaacaauucccaucacuauauuauggucggcaacgagaccgggcucgagcugacgcuuaccaauacaucuaucaucaaccauaaauucugcaaucugagcgacgcgcacaagaaaaaccucuacaaucaugcucugauguccauuaucucuaccuuucaccugagcauuccgaacuucaaucaguaugaagccauguccugugauuuuaacggaggcaagaucagcgugcaguacaaucucucucacuccuaugccggcgacgcugccagccauugcgggacaguugcuaacggagugcugcaaaccuucaugcggauggccuggggcgggucuuacauugcgcuugauuccggauacggcaagugggacuguaucaugacgagcuaucaguaccugauuauccagaacacaaccugggaggaucacugccaguuuucucgccccuccccuaucggguaucucggacugcuuagccaaagaacacgggacauuuacaucucccgcagacugcucggcaccuucaccuggacacugucugauagcgaaggcaaagacacgcccgggggauauugucugacccgguggaugcucauugaggccgagcugaagugcuuuggcaauacagcugucgccaaauguaacgaaaagcaugaugaggaguucugcgacaugcuucgccuguuugauuucaauaaacaggcuauccagagacucaagaccgaagcccagauguccauucaacugaucaacaaggcggugaaugcccuuaucaacgaccagcugauuaugaaaaaucaccuccgggauaucauggggauuccuuacugcaacuauagcaaguacugguaccugaaucacacaaccacgggaaaaacaucucugcccaaguguuggcucguguccaacggcagcuaucugaaugaaacccauuucucugacgacaucgagcagcaagcugauaacaugauuaccgagaugcuucagaaagaauacauggagcgccaggggaagacaccucugggacucgucgaccuguuuguuuucagcaccuccuuuuaucugaucucuaucuuccuucaccucgugaaaauuccgacacauagacacaucgugggcaagagcugccccaagccucaucggcugaaucacaugggcauuuguuccugcgggcuguacaaacagcccggagucccugugcgcuggaagagaugaggacuagucccuguucccagagcccacuuuuuuuucuuuuuuugaaauaaaauagccugucuuucagaucuaaaaaaaaaaaaaaaaaaaaaaaaaaaaaaaaaaaaaaaaaaaaaaaaaaaaaaaaaaaaaaaaugcaucccccccccccccccccccccccccccccccaaaggcucuuuucagagccaccagaauu

SEQ ID NO: 2472 - RNA, 1752 nt, Artificial Sequence
  mRNA product Design a-1 comprising derived and/or modified sequence from LASV(G502-SLE-2009;Clade IV)__AIT17126__GPC (opt5)
gggagagucccgcagucggcguccagcggcucugcuuguucgugugugugucguugcaggccuuauucaagcuuaccaugggccagaucgugaccuucuuucaagaggucccccacguuauugaagaggugaugaacaucgugcugauugcccucagcauccuggcuguccuuaaggggcuguacaauuucgccacaugcggacucgugggccugcuuacguuucugcuccugugugggagauccugcaccacaggacuguauaaaggcguuuacgaacuccagacccuggagcuuaacauggaaacacugaauaugaccaugccucucucuuguacaaagaacaauagccaucacuauauuaugguggggaacgagaccggacuggagcuuacgcugaccaauacauccaucaucaaccauaaauucugcaaucucucugacgcgcacaagaaaaaccuguacgaucaugcucugaugagcauuaucuccaccuuucaccucucuauuccgaauuucaaccaguaugaagccaugagcugugacuuuaauggcggcaagaucuccguccaguacaaccugagccacucuuaugccggggaugcugccgaccauugcggaacaguggcuaauggcguucuucaaaccuucaugcggauggccuggggaggguccuacauugcgcuggauagcggccgcgggagaugggacuguaucaugacgucuuaccaguaucucauuauccagaacacaaccugggaggaucacugccaguuuucccggcccagcccuaucggauaccugggccuucugucucaacgcacaagagacauuuauaucucccggcgccuccugggcaccuucaccuggacacugagcgauuccgaagggaaggacacgcccggaggcuacugucucaccagauggaugcugauugaggccgagcuuaaaugcuuugggaacacagcuguggccaaguguaaugaaaaacaugaugaggaguucugcgacaugcugcggcucuuugauuucaacaagcaggcuauccagcgccugaaagccgaagcgcagaugucuauucaacuuaucaauaaggccgucaacgcucugaucaaugaccagcucgugaugaagaaccaccugagagacauuaugggaaucccuuauugcaauuacagccgguauugguaccugaaccacaccacaaccggccgcacgucccuccccaaauguuggcuggugagcaaugggucuuaccuuaacgaaacacauuucuccgaugacauugagcagcaagccgauaauaugaucaccgagaugcugcagaaggaauauauggagagacagggaaaaaccccucucggccuggucgaccuguuuguuuucagcacaucuuuuuaccuuauuagcaucuuccuccaccuggugaagaucccgacccaucggcacauugugggcaaauccugccccaagccucaucgccugaaccacauggggaucuguucuugcggacucuauaaacagcccggcgucccugugaaguggaagagaugaggacuagucccuguucccagagcccacuuuuuuuucuuuuuuugaaauaaaauagccugucuuucagaucuaaaaaaaaaaaaaaaaaaaaaaaaaaaaaaaaaaaaaaaaaaaaaaaaaaaaaaaaaaaaaaaaugcaucccccccccccccccccccccccccccccccaaaggcucuuuucagagccaccagaauu

SEQ ID NO: 2473 - RNA, 1752 nt, Artificial Sequence
  mRNA product Design a-1 comprising derived and/or modified sequence from LASV(G733-SLE-2010;Clade IV)__AIT17154__GPC (opt5)
gggagagucccgcagucggcguccagcggcucugcuuguucgugugugugucguugcaggccuuauucaagcuuaccaugggccagaucgugaccuucuuucaagaggucccccacguuauugaagaggugaugaacaucgugcugauugcccucagcauccuggcuguccuuaaggggcuguacaauuucgccacaugcggaauugugggccucguuuccuuucugcuucugugugggagaucuugcacgaccagccucuauaaaggaguguacgaacugcagacacuggagcucaacauggaaacccugaauaugacaaugccucuuuccuguaccaagaacaauucucaucacuauaucauggucggcaacgagacagggcuggagcucacccugacgaauaccagcaucauuaaccauaaauucugcaaucuuuccgacgcgcacaagaaaaaccuguacgaucaugcucucaugucuaucauuagcacauuucaccuguccaucccgaauuucaaccaguaugaagccaugagcugugacuuuaauggaggcaagauuucugugcaguacaaccugucccacagcuaugccggcgaugcugccaaucauugcgggaccaucgcuaacggaguucuccaaacauucaugcggauggccuggggcgggucuuacauugcgcuggacuccggacgcgauagaugggacuguaucaugaccagcuaccaguaucuuaucauucagaacacgacaugggaggaucacugccaguuuucucggcccuccccuaucggcuaccuggggcuccugagccaacgcaccagagacauuuauaucucccggcgccuucugggaacauucaccuggacccucucugauagcgaaggcaaggacacacccggcggguacugucugacgagauggaugcugauugaggccgagcucaaaugcuuuggaaauaccgcuguggccaaguguaacgaaaaacaugaugaggaguucugcgacaugcugcggcuuuuugauuucaauaagcaggcuauccagcgccugaaagccgaagcgcagauguccauccaacucauuaacaaggccgucaaugcucugaucaacgaccagcuuauuaugaagaaucaccugagagacaucaugggcauuccuuauugcaacuacagcaaauauugguaccucaaucacacaaccacagggaagaccucucugcccaaauguuggcugguguccaacggaagcuaccucaaugaaacgcauuucucugaugacaucgagcagcaagccgauaacaugaucacagagaugcugcagaaggaauauauggagcggcagggcaaaaccccucuugggcugguggaccucuuugucuucagcaccuccuuuuaccugauuucuaucuuccugcaccuuguuaagauuccgacacaucgccacguggugggaaaaagcugccccaagccucauagacucaaucacaugggcaucuguuccugcggccuguaugggcagcccggagucccugugaaguggaaacggugaggacuagucccuguucccagagcccacuuuuuuuucuuuuuuugaaauaaaauagccugucuuucagaucuaaaaaaaaaaaaaaaaaaaaaaaaaaaaaaaaaaaaaaaaaaaaaaaaaaaaaaaaaaaaaaaaugcaucccccccccccccccccccccccccccccccaaaggcucuuuucagagccaccagaauu

SEQ ID NO: 2474 - RNA, 1752 nt, Artificial Sequence
  mRNA product Design a-1 comprising derived and/or modified sequence from MOPV/LASV reassortant(IGS-1;Clade IV)__AFY05576__GPC (opt5)
gggagagucccgcagucggcguccagcggcucugcuuguucgugugugugucguugcaggccuuauucaagcuuaccaugggccagaucgugaccuucuuucaagaggucccccacguuauugaagaggugaugaacaucgugcugauugcccucagcguccuggcugugcuuaaggggcuguacaauuucgccacaugcggacucguuggccuggugacguuucuucugcucugugggagauccugcaccacaucucuguauaaaggagucuacgaacugcagacccucgagcugaacauggaaacacuuaauaugaccaugccucugagcuguacaaagaacaauucccaucacuauaucauggugggcaacgagaccgggcucgagcugacgcuuaccaauacaucuauuaucaaccauaaauucugcaaucugagcgacgcgcacaagaaaaaccucuacgaucaugcucugauguccaucauuucuaccuuucaccugagcaucccgaauuucaaccaguaugaagccauguccugugacuuuaauggaggcaagauuagcguucaguacaaccucucucacuccuaugccggcgaugcugccaaucauugcgggacaguggcuaacggaguccugcaaaccuucaugcggauggccuggggcgggagcuacaucgcgcuugacucuggacgcggcaacugggauuguauuaugacguccuaccaguaucugaucauucagaauacaaccugggaggaccacugccaguuuagcagacccucuccuaucggguaccucggacugcuuucccaacggacacgcgauaucuauauuagcagacggcugcucggcaccuucaccuggacacuguccgacucugaaggcgaggauacgcccgggggauacugucugacccgcuggaugcucaucgaggccgaacugaagugcuuuggcaacacagcuguggccaaauguaaugagaagcaugacgaagaguucugcgauaugcuuagacuguuugacuucaacaaacaggcuauucagcggcucaaggccgaagcgcagaugagcauccaacugauuaauaaagccgugaacgcucuuaucaaugaucagcugaucaugaagaaccaccuccgcgacauuauggggaucccuuauugcaauuacuccaaguauugguaccugaaccacaccacaaccggaagaacgagccugcccaaauguuggcucgucucuaauggcuccuaccugaacgagacacauuucagcgacgauauugagcagcaagccgacaauaugaucaccgaaaugcuucagaaggaguauauggaacggcaggggaaaaccccucugggacucguugaucuguuuguguucucuaccagcuuuuaccugauuuccaucuuccuucaccucgugaagaucccgacacaucgccacauugucggcaaaucuugccccaagccucauagacugaaccacaugggcaucuguagcugcgggcuguauaaacagcccggagugccuguuaaguggaagcggugaggacuagucccuguucccagagcccacuuuuuuuucuuuuuuugaaauaaaauagccugucuuucagaucuaaaaaaaaaaaaaaaaaaaaaaaaaaaaaaaaaaaaaaaaaaaaaaaaaaaaaaaaaaaaaaaaugcaucccccccccccccccccccccccccccccccaaaggcucuuuucagagccaccagaauu

SEQ ID NO: 2475 - RNA, 1752 nt, Artificial Sequence
  mRNA product Design a-1 comprising derived and/or modified sequence from LASV(LM765-SLE-2012;Clade IV)__AIT17814__GPC (opt5)
gggagagucccgcagucggcguccagcggcucugcuuguucgugugugugucguugcaggccuuauucaagcuuaccaugggccagaucgugaccuucuuucaagaggucccccacguuauugaagaggugaugaacaucgugcugauugcccucagcauccuggcuguccuuaaggggcuguacaauuucgccacaugcggacucgugggccugguuacguuucuucugcucugugggagauccugcaccacaucucuguauaaaggaguguacgaacugcagacccucgagcugaacauggaaacacuuaauaugaccaugccucugagcuguacaaagaacaauucccaucacuauauuauggucggcaacgagaccgggcucgagcugacgcuuaccaauacaucuaucaucgaccauaaauucugcaaccugagcgaugcgcaccggaagaaucucuacgaccaugcucugauguccauuaucucuaccuuucaccugagcauuccgaacuucaaucaguaugaagccauguccugugauuuuaacggaggcaaaaucagcgugcaguacaaucucucucacuccuaugccaaggacgcugccgaucauugcggcacaguugcuaacggggugcugcaaaccuucaugcgcauggccuggggaggcagcuacauugcgcuugacucugggagaggacggugggauuguaucaugacguccuaccaguaucugauuauccagaauacaaccugggaggaccacugccaguuuagccgccccucuccuaucggcuaccucgggcugcuuucccaaagaacacgggauauuuauaucagccgcagacugcucggaaccuucaccuggacacuguccgacucugaaggcaaggauacgcccggcggguacugucugacccgguggaugcucauugaggccgagcugaaaugcuuuggaaacacagcugucgccaaguguaacgaaaaacaugacgaggaguucugcgauaugcuucgccuguuugacuucaauaagcaggcuauccagagacucaaagccgaagcgcagaugagcauucaacugaucaacaaggccgugaaugcucuuaucaacgaccagcugauuaugaagaaucaccuccgggauaucaugggcauuccuuauugcaacuacuccaaauauugguaccugaaucacaccacaaccgggaagacgagccugcccaaauguuggcucgugucuaacggauccuaccugaaugaaacacauuucagcgacgauaucgagcagcaagccgacaacaugauuaccgagaugcuucagaaggaauauauggagcgccagggcaaaaccccucuggggcucgucgaucuguuuguuuucucuaccagcuuuuaccugaucuccaucuuccuucaccucgugaagauuccgacacauagacacaucgugggaaaacccugcccuaagccccaucggcugaaucacaugggcauuuguucuugcggccuguauaagcagccugggguccccgugaaauggaagcgcugaggacuagucccuguucccagagcccacuuuuuuuucuuuuuuugaaauaaaauagccugucuuucagaucuaaaaaaaaaaaaaaaaaaaaaaaaaaaaaaaaaaaaaaaaaaaaaaaaaaaaaaaaaaaaaaaaugcaucccccccccccccccccccccccccccccccaaaggcucuuuucagagccaccagaauu

SEQ ID NO: 2476 - RNA, 1752 nt, Artificial Sequence
  mRNA product Design a-1 comprising derived and/or modified sequence from LASV(LM776-SLE-2012;Clade IV)__AIT17824__GPC (opt5)
gggagagucccgcagucggcguccagcggcucugcuuguucgugugugugucguugcaggccuuauucaagcuuaccaugggccagaucgugaccuucuuucaagaggucccccacguuauugaagaggugaugaacaucgugcugauugcccucagcauccuggcuguccuuaaggggcuguacaauuucgccacaugcggacucgugggccugguuacguuucuucugcucugugggagauccugcaccacaucuguguauaaaggagucuacgaacugcagacccuggagcucaacauggaaacacugaauaugaccaugccucuuagcuguacaaagaacaauucccaucacuauauuauggugggcaacgagaccgggcuggagcucacgcugaccaauacaucuaucaucaaccauaaauucugcaaucuuagcgacgcgcacaagaaaaaccuguacgaucaugcucucauguccauuaucucuaccuuucaccugagcauuccgaauuucaaccaguaugaagccauguccugugacuuuaauggaggcaagaucagcguucaguacaaccugucucacuccuaugccggcgaugcugccaaucauugcgggacaguggcuaacggaguccuccaaaccuucaugcggauggccuggggcgggagcuacauugcgcuggacucuggacacggcaagugggauuguaucaugacguccuaccaguaucuuauuauccagaacacaaccugggaggaccauugccaguuuagccgccccucuccuaucggguaccugggacuccugucccaaagaacacgggauauuuauaucagccgcagacuucugggcaccuucaccuggacacucuccgacucugaaggcaaagauacgcccgggggauacugucugacccgguggaugcugauugaggccgagcucaagugcuuuggcaauacagcuguggccaaauguaacgaaaagcacgacgaggaguucugcgauaugcugcgccuuuuugacuucaauaaacaggcuauccagagacugaaggccgaagcgcagaugagcauucaacucaucaacaaggccgugaaugcucugaucaacgaucagcuuauuaugaaaaaucaucugcgggacaucauggggauuccuuauugcaacuacuccaaguauugguaccucaaucacaccacaaccggaaaaacgagccugcccaaguguuggcuggucucuaacggcuccuaccucaaugaaacacacuucagcgacgauaucgagcagcaagccgacaacaugauuaccgagaugcugcagaaagaauauauggagcgccaggggaagaccccucuuggacugguugaucucuuuguguucucuaccagcuuuuaccugaucuccaucuuccugcaucuugugaaaauuccgacacacagacauaucgucggcaagucuugccccaagccucaccggcucaaucacaugggcauuuguagcugcgggcuguauaaacagcccggagugccuguucgcuggaagagaugaggacuagucccuguucccagagcccacuuuuuuuucuuuuuuugaaauaaaauagccugucuuucagaucuaaaaaaaaaaaaaaaaaaaaaaaaaaaaaaaaaaaaaaaaaaaaaaaaaaaaaaaaaaaaaaaaugcaucccccccccccccccccccccccccccccccaaaggcucuuuucagagccaccagaauu

SEQ ID NO: 2477 - RNA, 1752 nt, Artificial Sequence
  mRNA product Design a-1 comprising derived and/or modified sequence from LASV(Mad39;Clade IV)__ANH09722__GPC (opt5)
gggagagucccgcagucggcguccagcggcucugcuuguucgugugugugucguugcaggccuuauucaagcuuaccaugggccagaucgugaccuucuuucaagaggucccccacguuauugaagaggugaugaacaucgugcugauugcccucagcauccuggcuguccuuaaggggcuguacaauguggccacaugcggacucauuggccugguuacguuccuucugcucugugggagauccugcaccacaacccuguauaaaggaguguacgaacugcaggcgcucgagcugaacauggaaacacuuaauaugaccaugccucugucuuguacaaagaacaauagccaucacuauauccgggucggcaacgagaccgggcucgagcugacgcuuaccaauacaucccugaucaaccauaaauuuugcaaucucucugacgcucacaagaaaaaccuguacgaucaugcccugaugagcauuaucuccaccuuccaccucucuauuccgaauuuuaaccaguaugaagccaugagcugugacuucaaugauggaaagaucuccgugcaguacaaccugagccacacauaugcuggcgacaccgccaaucauugcggcacgguugcuaacggggugcuucaaacauuuaugcgcauggccuggggaggcucuuacauugcgcuggauuccgggagaggaggcugggacuguaucaugaccagcuaccaguaucucauuauccagaacacaaccugggaggaucacugccaguucucucggcccuccccuaucggguaccugggacuucugagccaacgcaccagagacauuuauaucucucggcgccuccugggcacauuuacguggacccuguccgauagcgaaggcaaggacacacccgggggauacugucucaccagauggaugcugauugaggccgagcuuaaaugcuucggcaauacagcugucgccaaguguaacgaaaaacaugaugaggaauuuugcgacaugcugcgccucuucgauuuuaauaagcaggcuauccagcggcugaaagccgaggcgcagauguccauucaacuuaucaacaaggccgugaaugcucugaucaacgaccagcucauuaugaagaaucaccugagagacaucauggggauuccuuauugcaacuacucuaaauauugguaccugaaucacaccgugacgggaaagacaagccuccccaaauguuggcuggucuccaacggcagcuaccuuaaugaaacccauuucucugaugacaucgagcagcaagccgauaacaugauuaccgagaugcugcagaaggaauauauggagcggcaggggaaaacaccucucggacugguugaccuguucguguuuuccaccagcuucuaccuuaucucuaucuuucuccaccuggugaagauuccgacacaucgccacgucgugggcaaacccugcccuaagccccauagacugaaucacaugggcaucuguagcugcggguucuauaagcagccuggaguucccgugcgguggaaacgcugaggacuagucccuguucccagagcccacuuuuuuuucuuuuuuugaaauaaaauagccugucuuucagaucuaaaaaaaaaaaaaaaaaaaaaaaaaaaaaaaaaaaaaaaaaaaaaaaaaaaaaaaaaaaaaaaaugcaucccccccccccccccccccccccccccccccaaaggcucuuuucagagccaccagaauu

SEQ ID NO: 2478 - RNA, 1752 nt, Artificial Sequence
  mRNA product Design a-1 comprising derived and/or modified sequence from LASV(Z0947-SLE-2011;Clade IV)__AIT17840__GPC (opt5)
gggagagucccgcagucggcguccagcggcucugcuuguucgugugugugucguugcaggccuuauucaagcuuaccaugggccagaucgugaccuucuuucaagaggucccccacguuauugaagaggugaugaacaucgugcugauugcccucagcauccuggcuguccuuaaggggcuguacaauuucgccacaugcggacucgugggccugguuacguuucuucugcucugugggagauccugcaccauuucucuguauaaaggaguguacgaacugcagacacucgagcugaacauggaaacccuuaauaugacaaugccucugagcuguaccaagaacaauucccaucacuauaucauggucggcaacgagacagggcucgagcugacccuuacgaauaccucuaucauuaaccauaaauucugcaaucugagcgacgcgcacaagaaaaaccucuacgaucaugcucugauguccaucauuucuacauuucaccugagcaucccgaauuucaaccaguaugaagccauguccugugacuuuaauggaggcaagauuagcgugcaguacaaccucucucacuccuaugccggcgaugcugccaaucauugcgggaccguugcuaacggagugcugcaaacauucaugcggauggccuggggcgggagcuacaucgcgcuugacucuggacgcgauagaugggacuguauuaugaccuccuaccaguaucugaucauccagaacacgacaugggaggaucacugccaguuuagccggcccucuccuauuggcuaccucgggcugcuuucccaacgcaccagagacaucuauauuagccggcgccugcucggaacauucaccuggacccuguccgauucugaaggcaaggacacacccggcggguacugucugacgagauggaugcucaucgaggccgagcugaaaugcuuuggaaauaccgcugucgccaaguguaacgaaaaacaugaugaggaguucugcgacaugcuucggcuguuugauuucaauaagcaggcuauucagcgccucaaagccgaagcgcagaugagcauccaacugaucaacaaggccgugaaugcucuuauuaacgaccagcugaucaugaagaaucaccucagagacauuaugggcaucccuuauugcaacuacuccaaauauugguaccugaaucacacaaccacagggaagaccagccugcccaaauguuggcucgugucuaacggauccuaccugaaugaaacgcauuucagcgaugacauugagcagcaagccgauaacaugaucacagagaugcuucagaaggaauauauggagcggcagggcaaaaccccucuggggcucgucgaccuguuuguuuucucuaccagcuuuuaccugaucuccauuuuccuucaccucgugaagaucccgacacaucgccacauugugggaaaacccugcccuaagccccauagacugaaucacaugggcaucuguucuugcggccuguauaagcagccugggguccccgugaaauggaagcggugaggacuagucccuguucccagagcccacuuuuuuuucuuuuuuugaaauaaaauagccugucuuucagaucuaaaaaaaaaaaaaaaaaaaaaaaaaaaaaaaaaaaaaaaaaaaaaaaaaaaaaaaaaaaaaaaaugcaucccccccccccccccccccccccccccccccaaaggcucuuuucagagccaccagaauu

SEQ ID NO: 2479 - RNA, 1752 nt, Artificial Sequence
  mRNA product Design a-1 comprising derived and/or modified sequence from LASV(Josiah;Clade IV)__NP_694870__GPC (opt6)
gggagagucccgcagucggcguccagcggcucugcuuguucgugugugugucguugcaggccuuauucaagcuuaccaugggccaaauaguaaccuucuuucaagaaguaccacacguaauagaagaaguaaugaauauaguacuaauagcucuaagcguucucgccgucuuaaaaggacuauacaacuucgcaacauguggccuaguaggauuaguaacauuucuacuccuaugcggacgaucaugcacaacaucacuauauaaaggaguauacgaacugcaaacacuagaacuaaacauggaaacacuaaauaugacaaugcccuuaaguugcacuaaaaacaacucccaccacuauauaauggucggaaacgaaacaggccucgaauuaacauuaacaaacacaaguauaauaaaucacaaauuuuguaaucuaagcgaugcacacaaaaagaauuuauaugaccacgcacuaaugucaauaauaaguaccuuucauuuaucaaucccuaacuuuaaccaauaugaagcaaugucuugcgauuucaacggaggaaaaauaucaguacaauauaacuuaucacacaguuacgcaggagaugcagccaaccacugcggcacuguagcaaacggaguacuccaaaccuucaugagaauggcauggggcggauccuauauugcacucgacaguggaagagguaacugggauugcaucaugaccucauaccaauauuuaauaauacagaauacaacaugggaagaccauugccaauuuucuagaccaucaccuauagguuacuuaggcuuauuaucacaaagaacacgagauauauacauauccagaagauuacuaggaacauuuacauggacacuaagugauagcgaaggcaaagacaccccaggagguuacugcuuaaccagauggauguuaauagaagcagaauuaaaauguuuuggcaauacagcaguagcaaaaugcaacgaaaaacacgaugaagaauuuugcgauaugcucagacuuuucgacuucaacaaacaagcaauccaaagauuaaaagcugaagcacaaaugagcauacaacuaaucaauaaagcaguuaaugccuuaauaaacgaccaacuaauaaugaaaaaccacuuaagagacauaaugggaauaccauacugcaacuauaguaaauacugguaucuaaaucacacaacuacaggccguacuucacugccaaaauguuggcuaguaagcaacggaucauauuuaaacgaaacacauuuuucagacgauauagaacaacaagcugauaacaugauaaccgaaaugcuucaaaaagaauacauggaaagacaaggcaaaacaccccucggucuaguagaccuauuugucuucagcacaaguuuuuacuuaauaucaauauucuuacaccuuguaaaaauaccaacacauagacacauaguaggaaaaucauguccaaaaccacauagacuaaaccacaugggaauauguagcugcggucuauauaaacaaccaggagucccaguaaaauggaaacgauaaggacuagucccuguucccagagcccacuuuuuuuucuuuuuuugaaauaaaauagccugucuuucagaucuaaaaaaaaaaaaaaaaaaaaaaaaaaaaaaaaaaaaaaaaaaaaaaaaaaaaaaaaaaaaaaaaugcaucccccccccccccccccccccccccccccccaaaggcucuuuucagagccaccagaauu

SEQ ID NO: 2480 - RNA, 1749 nt, Artificial Sequence
  mRNA product Design a-1 comprising derived and/or modified sequence from LASV(LP;Clade I)__AAF86701__GPC (opt6)
gggagagucccgcagucggcguccagcggcucugcuuguucgugugugugucguugcaggccuuauucaagcuuaccaugggacaaauuauaacauucuuucaagaaguaccccauguaauagaagaagucaugaacauaguucuaauagcacuaucuuuauuagcaauucuaaaaggcuuauauaacauagcaaccugcggcauaaucggccuagucgcuuuccuauucuuaugcggaaaaaguugcucauuaacacuaaaaggaggauaugaacuacaaacucucgaauuaaacauggaaacauuaaacaugacaaugccuuuaucuugcacaaaaaauucaucacaucacuacauaagagucggaaaugaaacaggacuagaacuuacacuaacaaacacaucaauaauuaaccacaaauuuugcaaccucucugacgcacauaaaaaaaaccuauacgaccaugcacuaaugucaauaauaucgacauuccaccuaucaauaccaaacuuuaaccaauaugaagccaugucaugcgacuucaacggugguaaaauauccguccaauacaaucuaucccauuccuacgcaggagacgccgcagaacauugcggaacugucgcaaacggaguacuacaaacuuucaugagaauggcauggggaggaagauauauugcccuagauucaggaaaaggaaacugggacugcaucaugaccucauaccaauaccuuauaauacaaaauacuacaugggaagaccacugccaauucucacgaccaucuccuaucggauaucuaggacuacuaucacaacgaacucgagacauauacauaagcagacgauuauuaggcacauuuacuuggacuuuaucagacucagaaggcaaugaaacaccaggaggauacuguuuaacacgauggaugcucauagaagcagaauuaaaauguuucggaaauacagcaguagcaaaaugcaacgaaaaacacgacgaagaauucugcgacauguuaagauuauucgacuucaauaaacaagcaauacguagacuaaaagcagaagcucaaaugucaauacaacuuauaaacaaagccguaaacgcacuaaucaacgaccaauuaaucaugaaaaaucauuuacgagacauuauggguauaccauacugcaacuacucuaaauacugguaucuaaaucacacaucuucaggacgaacaucauuaccaaaaugcuggcuuauaaguaacggaucauacuuaaaugaaacacaauucucagacgacauagaacaacaagcagauaacaugauaacugaaaugcuacaaaaagaauacauagaacgucaaggaaaaacacccuuaggacuaguagacauauucauauuuuccacaucauuuuacuuaauuucaaucuuccuacaccucauaaaaaucccuacccacagacacauaguaggaaaaccaugcccaaaaccacauagacuaaaccauaugggaguaugcucaugcggcuuauacaaacauccaggaguaccaacaaaauggaaacgauaaggacuagucccuguucccagagcccacuuuuuuuucuuuuuuugaaauaaaauagccugucuuucagaucuaaaaaaaaaaaaaaaaaaaaaaaaaaaaaaaaaaaaaaaaaaaaaaaaaaaaaaaaaaaaaaaaugcaucccccccccccccccccccccccccccccccaaaggcucuuuucagagccaccagaauu

SEQ ID NO: 2481 - RNA, 1749 nt, Artificial Sequence
  mRNA product Design a-1 comprising derived and/or modified sequence from LASV(803213;Clade II)__AAF86703__GPC (opt6)
gggagagucccgcagucggcguccagcggcucugcuuguucgugugugugucguugcaggccuuauucaagcuuaccaugggacaaauaauaaccuucuuccaagaaguaccacacguaauagaagaagucaugaacauagucuuaauagcauuaucauuauuagcaauauuaaaaggaauauacaacguagcaacaugcggauuauucggacuaauauccuuucuauuauuaugcggacgcagcugcucugucacauacaaaggagucuaugaacuacaaacauuagaacuaaacauggcaaacuuaaacaugacaaugccacuauccugcacaaaaaacaauucccaccacuacauaaugguuggcaacgaaacaggacucgaacuaacccuuacaaacacuucuauaauuaaccauaaauucugcaaccuaucagaugcacacaaaaaaaaccucuaugaccacgcacuaaugucuauaauaucaacauuucaccuaucuauaccaaacuuuaaccaauaugaagcaauguccugugauuuuaaugguggcaaaauaucuguacaauacaacuuaucacauucauucgcaguagacgcagcaaaccacugcggaacaauagcaaacggaguucuccaaacauuuaugagaauggccuggggaggaucauacaucgcacuagacucaggaaaaggaaauugggacuguauaaugaccucauaccaauaccuaaucauacaaaacacaacaugggaagaucauugccaauucucacgucccucuccaauaggauaucuaggccuccuaucacaaagaacaagagauaucuacauaucaagacgacuacucggaacauucacauggacacuaagcgacuccgaaggaaacgaagccccaggaggauacugccuuacacgauggaugcuaaucgaagccgaacuaaaaugcuuuggaaacacagcagucgcaaaauguaaugaaaaacaugaugaagaauuuugcgauaugcuaagacuauuugacuucaacaaacaagcaauaaaaagacucaaaacagaagcccaaaugucuauucaacucauaaauaaagcaguaaaugcauuaauuaacgaccaacuaaucaugaaaaaccaucuuagagauauuaugggaauaccauacuguaacuacucaagauacugguaccuaaaccacacaguaacuggaaaaacaucucuaccacgaugcuggcucguaucuaacgguucauaccuaaaugaaacacacuuuucugacgacaucgaacaacaagcagacaacaugauaacagaaaugcuacaaaaagaauacauggacagacaaggaaaaacaccacuaggucuaguagauuuauucguauucaguacaucuuucuaccuaauaucaauauuccuacaccucguaaaaauacccacacaccgccacauaguaggaaaaccauguccaaaaccacaccgacuaaaccacaugggcaucugcucaugcggacuauauaaacaccccggaguaccagucaaauggaaaagauaaggacuagucccuguucccagagcccacuuuuuuuucuuuuuuugaaauaaaauagccugucuuucagaucuaaaaaaaaaaaaaaaaaaaaaaaaaaaaaaaaaaaaaaaaaaaaaaaaaaaaaaaaaaaaaaaaugcaucccccccccccccccccccccccccccccccaaaggcucuuuucagagccaccagaauu

SEQ ID NO: 2482 - RNA, 1749 nt, Artificial Sequence
  mRNA product Design a-1 comprising derived and/or modified sequence from LASV(GA391;Clade III)__CAA36645__GPC (opt6)
gggagagucccgcagucggcguccagcggcucugcuuguucgugugugugucguugcaggccuuauucaagcuuaccaugggacaaauaguaacauucuuccaagaaguaccacauguaauugaagaaguaaugaacauaguacuaauagcacuaucaauccuagcaauauuaaaaggauuauauaaugucgcuacuuguggacuaauaggacucguaacauuucuacuauuaucagguagaucaugcagccuuauauacaaaggaacauacgaauuacaaacauuagaacuaaacauggaaacccuaaacaugaccaugccacuauccuguaccaaaaacaacucacaccauuacauuagaguaggaaacgaaacaggucuugaacuaacauugacaaacacaagcauacuaaaccauaaauucugcaaccuaucagaugcacacaaaagaaaccuauaugaccauucacuuaugucuauaaucucaacauuucauuuauccauaccuaacuucaaucaauaugaagcaaugucuugcgauuucaacggcggaaaaauaacaguacaauacaaccucucccauuccuucgcaguagacgcagcaggccacugcgguacauuagcaaacggcguacuacaaacauuuaugagaauggcauggggcggaucauacauagcuuuagacucagguagaggaaacugggauugcaucaugacaaguuaucaauaccuaauaauucaaaacacaacaugggacgaccacugccaauucucaagaccuucaccaauaggauauuuaggucuacucucccaaagaacacgcgacauauauauaucaagaagacuacuagguacauucacauggacacuaucagauucagaaggaaacgaaacaccaggaggauacuguuuaacacgcuggaugcucauagaagcugaacuaaaaugcuuuggcaacacagcaguagcaaaauguaacgaaaaacacgacgaagaauuuugcgacauguuacgacuauucgacuuuaacaaacaagcaauaagaagacuaaaaacagaagcacaaaugucaauccaacucauuaacaaagcaguaaacgcuuuaauaaacgaccaauuaauaaugaaaaaccaccuacgagacauaaugggaauacccuauuguaacuacucacgauauugguaucuaaaccauaccucaacaggaaaaaccucccuacccagaugcuggcuaaucucaaacggaucauaccuaaacgaaacaaaauucucugacgacauagaacaacaagcugacaacaugauaaccgaaauguuacaaaaagaauacauagauagacaaggcaaaacaccacuaggauuaguagacuuauucguauucucaacaucauucuacuuaauaaguaucuuccuacaccuagugaaaauaccaacccacagacacaucgucgguaaaccauguccaaaaccacacagacuaaaucacauggguauaugcucaugcggcuuauauaaacaaccaggaguaccaguuagauggaaaagauaaggacuagucccuguucccagagcccacuuuuuuuucuuuuuuugaaauaaaauagccugucuuucagaucuaaaaaaaaaaaaaaaaaaaaaaaaaaaaaaaaaaaaaaaaaaaaaaaaaaaaaaaaaaaaaaaaugcaucccccccccccccccccccccccccccccccaaaggcucuuuucagagccaccagaauu

SEQ ID NO: 2483 - RNA, 1752 nt, Artificial Sequence
  mRNA product Design a-1 comprising derived and/or modified sequence from LASV(AV;Clade V)__CCA30314__GPC (opt6)
gggagagucccgcagucggcguccagcggcucugcuuguucgugugugugucguugcaggccuuauucaagcuuaccaugggacaaauaguuaccuucuuccaagaaguaccacacguaauagaagaaguaaugaacauaguacucaucgcauuaagcauacuagcuguauuaaaaggucuauauaauauagcuaccuguggacuaaucggacucaucacauuuuuacuuuuaugcggucgaucauguucuucaaaccucuacaaaggaguauaugaauuacaaucauuagaccuaaauauggaaacauuaaacaugacaaugccacuaucaugcacaaaaaacaacucccaccacuacaucagaguaggaaaugauaccggacuagaacuaacucuaacaaacacaucaauacucaaccacaaauucugcaaccuaucugaugcacacaaaaaagaucuauacgaccaugcauuaauguccauaauaaguacuuuucacuuauccauaccaaacuucaaccaauacgaagcuaugucaugcgacuucaacggaggaaaaauauccguacaauauaaucuaucucacuccuacgcaauagacgcagcaaaucacugcggaaccguagcaaacgguaucuuacaaacuuucaugcgaauggccuggggaggaucauacauagccuuagacucaggaagaggaaacugggacuguauaaugacauccuaccaauaccuaaucauacaaaacacaaccugggaaaaccacugccaauucucuagaccaucacccaucggcuacuuaggauuacuaucacaacgaacuagagauauauacauaucaagaagacuacuaggaacuuuuacauggacauuauccgacucagaaggcaacgcaacaccaggaggauacugccuaacaagauggaugcuaauugaagcagaacuaaaaugcuucggcaauacagcaguagcaaaaugcaacgaaaaacacgacgaagaauuuugcgauaugcuaagauuauucgacuuuaauaaacaagcaauauccagacuaaaaucagaagcacaaaugucaauacaauuaauaaacaaagcuguuaaugcucuaauaaaugaucaacuuauaaugaaaaaccacuuacgagacauaaugggaauaccauauugcaacuacucaaaauacugguacuuaaaccauacaauaacaggaaaaacaucacuuccaaaauguuggcuagucuccaacggaucauaucuaaacgaaacccacuuuucagacgacauagaacaacaagcagacaacaugauaacagaaaugcuacaaaaagaauacauggaaagacagggaaaaacaccauuaggacuaguagaccucuucguauuuucuacaaguuucuaucuaauaucgauauuccuacgacuaguaaaaauacccacccacagacauaucgucggaaaaccaugcccaaaaccacauagacuaaaccauaugggaauaugcucauguggacuauacaaacaaccaggcguaccugucagauggaaaagauaaggacuagucccuguucccagagcccacuuuuuuuucuuuuuuugaaauaaaauagccugucuuucagaucuaaaaaaaaaaaaaaaaaaaaaaaaaaaaaaaaaaaaaaaaaaaaaaaaaaaaaaaaaaaaaaaaugcaucccccccccccccccccccccccccccccccaaaggcucuuuucagagccaccagaauu

SEQ ID NO: 2484 - RNA, 1749 nt, Artificial Sequence
  mRNA product Design a-1 comprising derived and/or modified sequence from LASV(Togo/2016/7082;Clade VI)__AMR44577__GPC (opt6)
gggagagucccgcagucggcguccagcggcucugcuuguucgugugugugucguugcaggccuuauucaagcuuaccaugggacaaauaauaacauuuuuccaagaaguaccacacgucauugaagaaguaaugaacauaguacuaauagcacuaucauuacuagcaauacuaaaaggaguuuacaacguagcuacaugcggcauuauaggucucguaacauuccuauucuuauguggaagauccugcucacucaucuauaaaggaucauaugaacuacaaacucuagaacucaacauggaaacauuaaacaugacaaugccacucucuugcacuaaaaauucaagccaccacuacauaagaguuggaaacgaaacaggacucgaacuaaccuuaacaaauaccuccauaauaaaccacaaauucuguaauuuaucagacgcacauaaaagaaaucuauacgaccaugcauuaaugucaauacuauccacauuucaccuaucaauccccaacuucaaccaauacgaagcuaugucaugcgacuucaauggcggaaaaauaucaguccaauauaacuuaucccacgcauacgcuguagacgcagcagaacauugcggcacagucgcaaacggaguacuacaaacauucaugagaauggcauggggaggaucauacauagcacuugauucaggcagaggaaacugggauugcauaaugacaucauaccaauacuuaauaauucaaaacacaacaugggaagaucacugccaauuuucgagaccaucacccauaggauaccuaggccuacuaucacaaagaacacgcgacauauacaucucucguagacuacuaggaacauucaccuggacacuaagcgacuccgaaggcaacgaaacacccggaggauauugccuaaccagauggauguuaauagaagcugaacuaaaauguuucggaaacacugcuguagcuaaauguaaugaaaaacacgaugaggaguucugcgacaugcuaagacuauucgacuucaauaaacaagcaauccaaagauuaaaaucagaagcacaaaugucuauacaacuaauaaacaaagccguaaacgcacuaauaaaugaucaacuaaucaugaaaaaucaccucagagauaugauggguauaccauauugcaauuacucaaaauacugguaucuaaaccacacgaguucuggaagaacaucccuaccaaaaugcuggcuaguaagcaauggcagcuaccuaaacgaaacacacuucucagacgacauagaacaacaggcagacaacaugauaacagaaauguuacaaaaagaauacaucgaccgacaaggaaaaacuccacuaggccuaguugaccuauucguauuuucaacaucauuuuacuuaauaucaauauuccuacaucuaauaaaaauaccaacacauagacacauaguaggaaaaccuugccccaagccacacagauuaaaccauaugggaauaugcuccuguggacuauacaaacaaccaggaguaccaacaagauggaaaagauaaggacuagucccuguucccagagcccacuuuuuuuucuuuuuuugaaauaaaauagccugucuuucagaucuaaaaaaaaaaaaaaaaaaaaaaaaaaaaaaaaaaaaaaaaaaaaaaaaaaaaaaaaaaaaaaaaugcaucccccccccccccccccccccccccccccccaaaggcucuuuucagagccaccagaauu

SEQ ID NO: 2485 - RNA, 1749 nt, Artificial Sequence
  mRNA product Design a-1 comprising derived and/or modified sequence from LASV(KAK-428;Clade n.d. (VII))__ANH09740__GPC (opt6)
gggagagucccgcagucggcguccagcggcucugcuuguucgugugugugucguugcaggccuuauucaagcuuaccaugggacaaauaguaacauucuuccaagaaguaccacacgucaucgaagaaguaaugaacauaguacuaauagcccucucauuauuagcaauauuaaaaggacuauacaacuucgcaacuuguggaguaauaggccuuauaacauuccuucuacuaugcggcagaucaugcuccgcaacauacaaaggacaauacgaauuacaaacauuagaacuaaauauggaaagcuuaaacaugaccaugccacucucaugcacaaaaaacaacucccaccacuauauacgcgccggaaacaacacaggacuugaauuaacccuaaccaacaccucuaucauaucacacaaauuuugcaaucuaucagacgcucacaaaaaaaaucuuuacgaccacacccuaauguccauaauaacaacauuccacuuaucuauaccaaacuucaaccaauacgaagcaaugucaugugauuucaacggaggaaagauuuccauacaauacaacuuaucucacucuuacgccggagacgccgcacaacacugcggaacaguagcaaacggaguacuucaaacauucaugagaauggcauggggaggauccuaccucgcauuagauucaggaagacgaggaugggacuguauaauauccucauaucaauaccuaaucauacaaaacacaacaugggacgaucauugccaauucucaagaccuucaccaauuggauaccuuggauucguuucacaaaaaacacgagauauuuacaucucacgcagauuauuaggaacauucaccuggacacucagcgacucagaaggccacgauaugccaggcgguuacugccuaacaagauggauguuaauagaagcagaccuaaaaugcuucggaaacacugccguagcaaaauguaacgaaaaacacgacgaagaauucugcgacauguggcgccuauucgacuucaacaaacaagcaauccaaagauuaaaagcugaagcacaaaugaauauacaacuaauaaauaaagccguaaacgcacucauaaacgaccaacuaaugaugaaaaaccaucuaagagacauaaugggaaucccauacugcaacuacuccaaauucugguaucucaauaacacaaccacaggaagaaccucuuuaccaagaugcuggcuaauaucaaacggaagcuacuuaaacgaaacacacuucucagacgacauagaacaacaagcugauaacaugauuacagaaaugcuacaaaaagaauacauggauagacaaggaaaaaccccacuaggacuuguugaccuauuuguauuuucaacaaguuucuaccuaauaacaaucuuccuacaucucguaaaaauaccuacacacagacacauaguaggaaaaccaugccccaaaccacacagacuaaaccacauggguauaugcucauguggacucuacaaacaaccaggcguuccaguccgauggaaacgauaaggacuagucccuguucccagagcccacuuuuuuuucuuuuuuugaaauaaaauagccugucuuucagaucuaaaaaaaaaaaaaaaaaaaaaaaaaaaaaaaaaaaaaaaaaaaaaaaaaaaaaaaaaaaaaaaaugcaucccccccccccccccccccccccccccccccaaaggcucuuuucagagccaccagaauu

SEQ ID NO: 2486 - RNA, 1749 nt, Artificial Sequence
  mRNA product Design a-1 comprising derived and/or modified sequence from LASV(Pinneo-NIG-1969;Clade I)__AIT17836__GPC (opt6)
gggagagucccgcagucggcguccagcggcucugcuuguucgugugugugucguugcaggccuuauucaagcuuaccaugggacaaauaaucacauucuuucaagaagucccccacguuauagaagaaguaaugaauauaguacuaauagcacucucauuacucgcaauacuaaaaggacuauauaacauagccacaugcggaauuauaggauuaguagcauuccuuuucuuaugcggaaaauccugcucacuaacacuaaaaggcggauacgaacuacaaacacuagaauuaaacauggaaacacuaaauaugacaaugccccuaucauguaccaaaaacuccucacaccauuacaucagaguaggaaaugaaacaggacuagaauuaaccuuaacaaacacaucuauaauuaaccacaaauuuugcaaccuauccgacgcacacaaaaaaaacuuauaugaucacgcacuaaugucaauuauaucaacuuuccaccuaucaaucccaaauuuuaaucaauacgaagcaaugucaugcgacuucaacggaggaaaaauauccguacaauauaaccucucucacucauacgcaggagacgcagcagaacacuguggaacaguagcaaacgguguucuacaaacauucaugagaauggcauggggaggacgauacauagcauuagacuccggaaaaggaaauugggauugcauuaugacaucauaucaauaucuuaucauacaaaacacaacaugggaagaccacugccaauuuucacgaccaagccccauagguuacuuagguuuacucucccaaagaacaagagauauauacauuucuagaagauuauuaggaacuuucacuuggaccuuaucugacucugaaggaaacgaaacaccaggaggauauugcuuaacuagauggaugcuaauugaagccgaauuaaaaugcuucggaaacacagcagucgccaaaugcaacgaaaaacaugacgaagaauuuugugacaugcuaagacuuuucgacuucaacaaacaagcuauaagaagauuaaaagcagaagcacaaaugucaauacaauuaauaaacaaagcuguaaacgcauuaauaaacgaccaauuaauaaugaaaaaccaccuaagagacauuaugggaauacccuacuguaauuacucaaaauacugguacuuaaaccauaccucauccgggcgaaccucucuacccaaaugcuggcucauaagcaacggauccuacuuaaacgaaacacaauuuucagacgacauagaacaacaagcagauaauaugauaacagaaaugcuacaaaaagaauauauagaaagacaaggaaaaaccccacuaggauuaguugacauauuuauauucucaaccucauuuuaccucauaucaauauuuuuacaucuaauaaaaauaccaacucacagacauauaguaggaaaaccaugcccaaaaccacauagauuaaaccacaugggaguauguuccugcggacuauacaaacauccaggaguacccacaaaauggaaacgauaaggacuagucccuguucccagagcccacuuuuuuuucuuuuuuugaaauaaaauagccugucuuucagaucuaaaaaaaaaaaaaaaaaaaaaaaaaaaaaaaaaaaaaaaaaaaaaaaaaaaaaaaaaaaaaaaaugcaucccccccccccccccccccccccccccccccaaaggcucuuuucagagccaccagaauu

SEQ ID NO: 2487 - RNA, 1749 nt, Artificial Sequence
  mRNA product Design a-1 comprising derived and/or modified sequence from LASV(ISTH0009-NIG-2011;Clade II)__AIT17404__GPC (opt6)
gggagagucccgcagucggcguccagcggcucugcuuguucgugugugugucguugcaggccuuauucaagcuuaccaugggacaaaucauaacauucuuucaagaagucccacacguaauagaagaaguaaugaauaucguauuaauagcacuauccuuacuagcaauauuaaaaggaauauacaauguagccacauguggacuauucgguuuaguaucauucuuacuucuaugcggaagaucuugcucaaccacuuacaaaggaguauacgaacuucaaacacucgaacuagauauggcaagucuaaacaugaccaugccacuaucaugcacaaaaaacaauucccaccauuacauaauggucggaaaugaaacaggauuagaauuaacauuaacaaacacaucuauuauaaaccacaaauucugcaaucuaucagacgcucacaaaaaaaaccuauacgaccacgcacucauguccauaauauccacuuuucaccuaucaauaccaaacuucaaccaauacgaagcaaugucaugugacuucaauggaggaaaaauaucaguacaauacaaccuaucccaugcauaugcaguagacgcagccaaucacuguggaacuauagcaaacgguguucuacaaacauuuaugcgaauggccugggguggauccuacauagcacuagacucuggaaaaggaucaugggauugcauaaugacuucauaccaauaccuaauaauacaaaacacaacaugggaagaccacugucaauucucaagacccucuccaauaggauaccuagguuuacuaucucaaagaacaagagauauauacaucagcagacgacuacuuggaacauucacauggacccuauccgacucagaaggaaaugaaacaccuggcggcuacugccuuaccagauggauguuaauagaagcugaauuaaaaugcuucggaaacacagccguagcaaaaugcaacgaaaaacaugacgaagaauuuugugacaugcuuagauuauucgacuuuaacaaacaagcuauacgcagauuaaaaacagaagcacaaaugaguauacaacuaauaaauaaagcaguaaacgcauuaauaaacgaccaacuaaucaugaaaaaccacuuaagagacauaaugggaauaccauacugcaacuacucaaaauacugguacuuaaaccacacugucacuggaaaaaccucauuaccacgcugcuggcuaguaucaaacggaaguuauuuaaaugaaacacauuucucagaugacauagaacaacaagcagacaauaugauaaccgaacucuuacaaaaagaauacauggacagacaaggaaaaacaccauuaggacuaguagaccucuucguuuucucaacaucauucuacuuaauaagcauuuuccuacacuuaauaaaaauaccaacacaccgccacauaaccggaaaaccaugcccaaaaccacacagauuaaaccauaugggaaucugcaguuguggucuauauaaacauccaggagucccaguaaaauggaaaagauaaggacuagucccuguucccagagcccacuuuuuuuucuuuuuuugaaauaaaauagccugucuuucagaucuaaaaaaaaaaaaaaaaaaaaaaaaaaaaaaaaaaaaaaaaaaaaaaaaaaaaaaaaaaaaaaaaugcaucccccccccccccccccccccccccccccccaaaggcucuuuucagagccaccagaauu

SEQ ID NO: 2488 - RNA, 1749 nt, Artificial Sequence
  mRNA product Design a-1 comprising derived and/or modified sequence from LASV(ISTH2010-NIG-2012;Clade II)__AIT17482__GPC (opt6)
gggagagucccgcagucggcguccagcggcucugcuuguucgugugugugucguugcaggccuuauucaagcuuaccaugggacaaaucauaacuuucuuucaagaaguaccccacguaauagaagaaguaaugaacauaguauuaauagcacuaucucuacucgccauacucaaaggcaucuauaauguagcaacaugcggcuuauuuggauuaguaucuuuucucuuauuauguggacgauccugcucaacaacauauaaagguguauacgaauuacaaacacuagaacuagacauggccucacuaaacaugacaaugccacuaucaugcaccaaaaauaacucacaccauuauauuaugguaggcaacgaaacaggacucgaacuaacccuaacaaacacaucaauaauaaaccacaaauucugcaauuuaucugacgcacacaaaaaaaaucucuaugaccaugcccuaaugucaauaauaucaacuuuccaccuaucaaucccaaacuucaaccaauaugaagcaaugucaugcgacuuuaacggaggcaaaaucuccguacaauacaaucucucccacgcauacgcaguagacgccgcaaaccauuguggcacaauagcaaauggugucuuacaaacauucaugcguauggcauggggaggaucauacauagcucuagacagcggaaaaggcucaugggauuguauaaugacuucauaucaauacuuaauaauacaaaacauaaccugggaagaccacugucaauuuucacgacccucacccauagguuacuuaggacuacuaagccaaagaaccagagauauauacauaucuagaagauuacuaggaacauucacauggacacuaucagacuccgaaggcaacgaaacaccaggaggauacuguuuaacuagauggaugcuaauagaagcagaacuaaaaugcuucggaaauacagcaguagccaaauguaaugaaaaacaugaugaagaauucugcgauaugcuacgucuauucgacuucaacaaacaagcaauucgaagauuaaaaacagaagcacaaaugucaauacaacuaauuaacaaagcaguaaacgcauuaauaaacgaucaauuaauuaugaaaaaccacuuaagagacauaaugggaaucccauauugcaacuacucaaaauacugguauuuaaaucauacaguuacaggcaaaacaucccuaccaagaugcuggcuagucucaaacggaucuuaccugaaugaaacacacuuuucagacgacauagaacaacaagcagauaacaugauaacagaacuauuacaaaaagaauacauagacagacaaggaaaaacuccacuaggacuuguagaccuauucguauucaguacaucauucuaccucauaagcauauucuuacaccuaguaaaaauaccaacacauagacauguagucggaaaaccuugcccaaaaccacacagguuaaaccauauggguauaugcucuugcggacuauauaaacacccaggaguaccugucaaauggaaacgauaaggacuagucccuguucccagagcccacuuuuuuuucuuuuuuugaaauaaaauagccugucuuucagaucuaaaaaaaaaaaaaaaaaaaaaaaaaaaaaaaaaaaaaaaaaaaaaaaaaaaaaaaaaaaaaaaaugcaucccccccccccccccccccccccccccccccaaaggcucuuuucagagccaccagaauu

SEQ ID NO: 2489 - RNA, 1749 nt, Artificial Sequence
  mRNA product Design a-1 comprising derived and/or modified sequence from LASV(Lassa virus/H.sapiens-wt/NGA/2015/ISTH_0543;Clade II)__AVO03639__GPC (opt6)
gggagagucccgcagucggcguccagcggcucugcuuguucgugugugugucguugcaggccuuauucaagcuuaccaugggccaaauaauaaccuucuuucaagaagucccacacguuauagaagaaguaaugaacauaguacuaauagcauuaucacuacuagcaauccuaaaaggaauauacaacguagcaacuugcggccuauucggacuaguaucauuccuccuacuaugcggacguuccugcuccacaacauacaaaggcguauacgaacuacaaacauuagaacuagacauggcaaacuuaaacaugaccaugccauuauccugcacaaaaaacaacucucaccauuauauaaugguuggaaacgaaacaggacucgaauuaacuuuaaccaacacaucaauaauuaaucauaaauucugcaacuuauccgacgcacacaaaaaaaaccuauacgaucacgcacuaaugagcauaauaucuacuuuccaucuaucaauaccaaauuucaaucaauacgaagcaaugucaugugauuucaauggcggaaaaauauccguacaauauaauuuaucccauacauacgcaguagaugcagcaaaccauugcggaacaauugcaaacggaguccuacaaacauuuaugcgaauggcauggggcggaagcuacauagcacucgauucaggaaaagguuccugggauuguauaaugacuucuuaucaauacuuagucauccaaaacacuacaugggaagaucacugccaauuuucuagaccauccccaauuggauaucugggacuacuuucccaaagaacaagagacauauacaucuccagaagacuauuaggaacauucacauggaccuuaucagacucagaaggaaacgaaacaccaggugguuacugccuaaccagauggaugcuaauagaagcagaacuaaaaugcuuuggaaacaccgcagucgcaaaauguaacgaaaaacacgacgaagaauucugcgauaugcuaagacuauuugacuucaauaaacaagccauaagaagauuaaaaacugaagcacaaaugucaauacaacuaauaaacaaagcaguaaacgcacucauaaacgaccaauuaauaaugaaaaaccacuuacgagacauaaugggcaucccauacugcaacuauucaaaauacugguaccucaaucauacaguaacaggaaaaacaucacuaccaagaugcuggcucguauccaacggaucauacuuaaacgaaacacacuuuucagacgacaucgaacaacaagcagacaauaugauaacagaacuacuccaaaaagaauauauagauagacaaggaaaaaccccacuaggacuagucgaccuauucgucuucagcacaagcuucuaccuaauauccauuuuccuucaucucguaaaaauacccacucacagacacauaacuggaaaaccaugcccaaaaccacacagauuaaaccacaugggaauaugcucauguggacuauacaaacacccagguguuccaguaaaauggaaaagauaaggacuagucccuguucccagagcccacuuuuuuuucuuuuuuugaaauaaaauagccugucuuucagaucuaaaaaaaaaaaaaaaaaaaaaaaaaaaaaaaaaaaaaaaaaaaaaaaaaaaaaaaaaaaaaaaaugcaucccccccccccccccccccccccccccccccaaaggcucuuuucagagccaccagaauu

SEQ ID NO: 2490 - RNA, 1749 nt, Artificial Sequence
  mRNA product Design a-1 comprising derived and/or modified sequence from LASV(Lassa virus/H.sapiens-wt/NGA/2016/ISTH_0009;Clade II)__AVO03571__GPC (opt6)
gggagagucccgcagucggcguccagcggcucugcuuguucgugugugugucguugcaggccuuauucaagcuuaccaugggccaaauaauaacauucuuccaagaaguaccacacguaauagaagaaguaaugaacauuguauuaauagcacuaucacuacuagcaaucuuaaaaggaauauacaacguagccacaugcggacuacuaggacuagucucauuccuauuacuaugcggaagaucuugcucaacaacauacaaaggcguauacgaacuacaaacauuagaacuagauauggcaucucuaaacaugacaaugccauuaagcugcacaaaaaauaauucacaccauuacauaaugguaggcaacgaaacaggcuuagaacucacauuaacaaauaccucaaucauaaaucauaaauucugcaaucuaucagacgcacauaaaaaaaaccuuuaugaccacgcacuaaugucaauaauaucaacauuccacuuaucuauaccaaauuuuaaucaauaugaagcaaugucuugcgauuuuaacggaggaagaauaucaguccaauacaaucucucacacuccuacgcaguagacgcagcaaaccauugugggacaauagcaaacggaguacuacaaacauuuaugcgaauggcauggggugguaguuacauagcacuagacucaggaaaaggcucaugggacugcauaaugacaucauaccaauaccucauaauacaaaacaccaccugggaggaccacugccaauucucacgaccaucaccaauaggauauuuaggucuucucagucaaagaacaagagacauauauauaucuagaagacuacuaggaaccuucacauggacacuaucagacucagaagggaaugaaacaccaggaggauacugcuuaacaagauggauguuaauagaagcagaacuaaaaugcuucgguaacacagcaguagcaaaaugcaacgaaaaacacgacgaagaauucugcgacaugcuuagacuguucgauuucaauaaacaagcaauaaggagauuaaaaacagaagcacaaaugucaauacaauuaauaaacaaagcaguaaaugcauuaauaaacgaccaacucauaaugaaaaaucacuuaagagauauaaugggaauaccauacuguaacuacucaaaauacugguaucuaaaccauaccguaacaggcaaaaccucauuaccaagaugcugguuaguaucaaacggcuccuacuuaaacgaaacccacuucucagacgauauagaacaacaagcagacaacaugauaacagaacuacuccaaaaagaauacauagaucgacaaggaaaaacaccacuaggucuaguagaccuauucguauucucaacaagcuucuaccuaauaucaaucuuucuacaccuaguaaaaauaccaacacacagacacauaacagguaaaccaugcccaaaaccccauagacuaaaccacaugggcauauguucauguggcuuauacaaccacccaggaguaccaguaaaauggaaacgauaaggacuagucccuguucccagagcccacuuuuuuuucuuuuuuugaaauaaaauagccugucuuucagaucuaaaaaaaaaaaaaaaaaaaaaaaaaaaaaaaaaaaaaaaaaaaaaaaaaaaaaaaaaaaaaaaaugcaucccccccccccccccccccccccccccccccaaaggcucuuuucagagccaccagaauu

SEQ ID NO: 2491 - RNA, 1749 nt, Artificial Sequence
  mRNA product Design a-1 comprising derived and/or modified sequence from LASV(Lassa virus/H.sapiens-wt/NGA/2016/ISTH_0017;Clade II)__AVO03567__GPC (opt6)
gggagagucccgcagucggcguccagcggcucugcuuguucgugugugugucguugcaggccuuauucaagcuuaccaugggacaaauaauaaccuucuuucaagaaguaccacacgucauagaagaaguaaugaacauagucuuaauugcacucucacuacuugcaauauuaaaaggaaucuacaaugucgcaacaugcggacuauuugggcuaguaaguuuucuauuauuaugcggccgauccugcuccacaacauacaaaggaguauacgaacuacaaacacuagaauuagauauggcauccuuaaacaugacaaugcccuuauccugcacuaaaaauaacucacaccacuacauaaugguaggcaaugaaacaggcuuagaauuaacacuaaccaauacaaguauaauaaaucacaaauucugcaaucuaucagaugcacacaaaaaaaaccuuuaugaccaugcauuaaugagcauuauauccaccuuccaccuuucaauaccuaacuucaaccaauacgaagcaaugucgugcgacuucaauggcggaaaaaucucaguacaauauaaccucucacacacauacgcaauagacgccgcaaaccacugcgggacuauagcaaacggaguacuacaaacauuuaugagaauggcauggggaggcucauacauagcacuagacucaggaaaaggaucaugggauugcauaaugacaucauaccaauaccuaaucauacaaaacaccacaugggaagaucauugccaauuuucaagacccucaccaauaggauaccuaggacuauuaucacaaagaacacgugacaucuacauaucaagacgacuacucggaacauucacauggacuuuaucagauuccgaagguaacgaaacccccggagguuacugccuaacaagauggaugcuaauagaagcagaauuaaaaugcuucggaaacacagcaguagcaaaauguaacgaaaaacacgaugaagaauucugugacaugcuaagacuauuugacuucaacaaacaagcaaucagaagacuaaaaacagaagcacaaaugucaauacaacuaauaaauaaagcaguaaacgcucuaauaaaugaccaacuaauaaugaaaaaccaccucagagacaucaugggaauaccauauugcaauuauuccaaauacugguaccuaaaccauaccguuacaggcaaaacaucauuaccaagauguuggcuaguaucaaauggcucauaucuaaacgaaacccacuucucagacgacauagaacaacaagcugacaacaugauaacugaacuauuacaaaaagaauacauggaccgccaaggcaaaacaccucuaggccuaguagaucucuucguauuuucaaccaguuuuuaccuaauaucaauauuccuacaccuaguaagaauaccaacucacagacacguaauaggaaaaccaugcccaaaaccacauagacuuaaccauauggguauaugcucauguggauuauacaaacaccccggcguaccaguaaaauggaaaagauaaggacuagucccuguucccagagcccacuuuuuuuucuuuuuuugaaauaaaauagccugucuuucagaucuaaaaaaaaaaaaaaaaaaaaaaaaaaaaaaaaaaaaaaaaaaaaaaaaaaaaaaaaaaaaaaaaugcaucccccccccccccccccccccccccccccccaaaggcucuuuucagagccaccagaauu

SEQ ID NO: 2492 - RNA, 1749 nt, Artificial Sequence
  mRNA product Design a-1 comprising derived and/or modified sequence from LASV(Lassa virus/H.sapiens-wt/NGA/2018/ISTH_0959;Clade II)__AVV65099__GPC (opt6)
gggagagucccgcagucggcguccagcggcucugcuuguucgugugugugucguugcaggccuuauucaagcuuaccaugggccaaauuauaacauucuuccaagaaguaccacauguaauagaagaaguaaugaacaucguauuaauugcacucucauuauuagcuauacucaaagguaucuacaacgucgucacaugcggacuauucggccuaguuucauucuuacuccuuuguggaagaucaugcagcacaacauacaaaggaguauacgaacuacaaaccuuagaacuagauauggcaucacuaaacaugacaaugcccuuauccugcacaaaaaauaacucacaccauuacauaauggucggaaacgaaacaggauuagaauuaacauuaacaaacacauccauaauaaaucauaaauucuguaaccucucagacgcacauaaaaaaaaucuauaugaucacgcauuaaugucaaucaucucaacauuccaccuuucaauaccaaauuucaaccaauacgaagcaaugucaugcgacuucaacgguggaaaaauaucuguacaauacaauuuaucacacgccuaugcaauagaugcagcaaaucacugcggaacaaucgccaacggaguauuacaaacauucaugagaauggcauggggaggaucauacauugcacuagacucaggcaaaggaucuugggacuguaucaugacaucauaucaauacuuaauaauacaaaacacaacaugggaagaccacugccaauucucacgaccaucacccauaggauacuuaggacuacuaucacaacgaacacgagacauauacauaucaagacgacuauuaggaacauuuacuuggacacuauccgacucagaaggaaacgaaaccccugguggauauugucuaaccagauggaugcucauagaagcagaacuaaaaugcuuuggaaacaccgcaguagccaaaugcaacgaaaaacacgacgaagaauucugcgacauguuacgacuauucgauuuuaacaaacaagcaauacgaagacuaaaaacagaagcacaaaugucaauacaacuaauaaacaaagcaguaaacgcacuaauaaacgaccaacuaauaaugaaaaaccacuuacgagacauaaugggaauacccuacugcaacuacucaaaauacugguauuuaaaccacacaguaaccggaaaaacaucacuaccccgauguugguuaguauccaacggaucauaucucaacgaaacacacuucucagaugacauagaacaacaagcagacaacaugauaacagaacuccuucaaaaagaauacauagauagacaaggaaaaacaccucuaggacuaguagacuuauucguauucuccacuucauucuaucuaauaaguauuuucuuacaucuuguuaaaauaccaacacacagacacguuauaggaaaacccuguccaaaaccacacagacuaaaccauaugggcaucuguucaugcggacuauacaaacacccaggaguacccguuaaauggaaaagauaaggacuagucccuguucccagagcccacuuuuuuuucuuuuuuugaaauaaaauagccugucuuucagaucuaaaaaaaaaaaaaaaaaaaaaaaaaaaaaaaaaaaaaaaaaaaaaaaaaaaaaaaaaaaaaaaaugcaucccccccccccccccccccccccccccccccaaaggcucuuuucagagccaccagaauu

SEQ ID NO: 2493 - RNA, 1749 nt, Artificial Sequence
  mRNA product Design a-1 comprising derived and/or modified sequence from LASV(LASV003-NIG-2008;Clade II)__AIT17580__GPC (opt6)
gggagagucccgcagucggcguccagcggcucugcuuguucgugugugugucguugcaggccuuauucaagcuuaccaugggacaaauaauaacauucuuccaagaaguaccacauguaauagaagaagucaugaacauaguacuaauagcuuuaucauuacuagcaauacuaaaaggcauauacaacguugcaacaugcggauuauucggauuaguuuccuucuuacuacuauguggaagaucauguucaacaacauauaaaggagucuacgaacuccaaacacuagaauuagacauggcaagucuaaauaugacaaugccauuaucaugcaccaaaaacaacucacaccacuacauuauggucggaaacgaaacaggacucgaacucacacuaacaaacaccucuauaaucaaucacaaauucugcaaccuaucggaugcccacaagaaaaaucuauacgaucacgccuuaauguccauuauaucaacauuccaucucucaauaccaaacuucaaucaauacgaagcaaugucaugugauuucaacgguggcaaaauaucaguacaauacaauuuaucccauacauacgccguagacgcagcaaaccauugcggaacgauagccaacggcguauuacaaaccuucaugagaauggcuuggggaggaucauauauagccuuagacucaggaaaaggauccugggacugcauaaugacaucauaccaauauuuaauaauacaaaacacaaccugggaagaccauugccaauucaguagaccaucacccauaggcuacuuaggauuauuaucacaaagaacucgagacauauacauaaguagaagacuacuaggaacauucacauggacacuaucagauagugaaucaaaugaaacaccaggaggauauugccuaacaagauggauguuaauagaagcagaacuaaaaugcuuuggaaauacagcaguagccaaauguaaugaaaaacaugaugaagaauuuugugauaugcuaagacuuuucgacuucaacaaacaagcuauucgaagauuaaaagcagaagcacaaauguccauacaauuaauaaacaaagcaguuaacgcuuuaauaaacgaccaacuuauaaugaaaaaccaccuaagagacauaaugggaauaccauacuguaacuacuccaaauacugguaccuaaaccacacagucacaggaagaaccaguuuaccacgaugcuggcuaguaucaaacgguagcuaucuaaaugaaacucacuucucagacgacaucgaacaacaagcagacaacaugauaacagaauuauuacaaaaagaauacauggauagacaaggaaaaacaccacuaggauuaguugaccuauucgucuuuuccacaaguuucuaucuaauauccauauuucuacaccucguaaaaauuccuacacacagacauguaauaggcaaacccugcccaaaaccccauagauuaaaccacaugggaauaugcuccugcggauuauacaaacacccaggaguaccuguaaaauggaaaagauaaggacuagucccuguucccagagcccacuuuuuuuucuuuuuuugaaauaaaauagccugucuuucagaucuaaaaaaaaaaaaaaaaaaaaaaaaaaaaaaaaaaaaaaaaaaaaaaaaaaaaaaaaaaaaaaaaugcaucccccccccccccccccccccccccccccccaaaggcucuuuucagagccaccagaauu

SEQ ID NO: 2494 - RNA, 1749 nt, Artificial Sequence
  mRNA product Design a-1 comprising derived and/or modified sequence from LASV(LASV035-NIG-2009;Clade II)__AIT17588__GPC (opt6)
gggagagucccgcagucggcguccagcggcucugcuuguucgugugugugucguugcaggccuuauucaagcuuaccaugggucaaauaauaaccuuuuuucaagaaguaccacacguaauagaagaaguaaugaacauaguacuaauagcacucucccuauuagcaauacucaaaggcauuuacaacguagcaacuuguggacuauuuggauuaguaucuuuucuacuauuauguggaagauccugcucaacaaccuauaaagguguauacgaacuacaaaccuuagaauuagauauggcaucacuaaacaugacaaugcccuuaucaugcacaaaaaacaacucgcaccauuauauaaugguaggaaaugaaacgggauuagaacuaacccuaacaaauacaucaauaauaaaccacaaauuuuguaacuuaucugacgcacacaaaaaaaaucucuaugaccaugcacuaaugucaauaaucucaaccuuucacuuauccauaccaaauuucaaucaauacgaagcaaugucaugcgacuucaacggcggaaaaauauccguucaauacaauuuaucacacgcauacgccguagacgcagcuaaccacugcggcacaauagcaaauggaguacuacaaacauucaugagaauggcauggggaggcuccuacauagcacuagauucagguaaaggaucaugggacugcauuaugacaucauaccaauacuuaauaauacaaaauacaacaugggaagaucacugccaauucucaagaccauccccaauaggcuaucucggacuacuaagucaaagaacaagagacauauacauaucacgcagacuauuaggaaccuucacauggacuuuaagugacagcgaaggaaacgaaacaccaggagguuacugucuaaccagauggauguuaauagaagcagaauuaaaaugcuuuggaaacacagcaguagcaaaaugcaacgaaaaacaugacgaagaauucugugacaugcuacgacuauuugacuuuaacaaacaagcaauaagaagacuaaaagcagaagcacaaaugucaauacaacuaaucaacaaagcaguuaaugcucugauaaacgaccaacucaucaugaaaaaccaccuacgagacauaaugggaauacccuacugcaacuacucaaaauacugguaccuuaaucacacgguuacaggcaaaacuucacuaccaagaugcugguuaguauccaacggaucauaucuaaacgaaacacauuuuuccgacgacauagaacaacaagcagacaauaugauaacagaacuauuacaaaaagaauacauagauagacaagguaaaacaccacuaggacuaguagauuuauucguauucaguacauccuuuuacuuaauaucaauuuuccuccaucuaguaaaaaucccaacacaccgacacguaauaggaaaaccaugcccaaaaccccacaggcuaaaccacaugggaauaugcaguugcggauuauacaaacauccugguguaccuguaaaauggaaaagauaaggacuagucccuguucccagagcccacuuuuuuuucuuuuuuugaaauaaaauagccugucuuucagaucuaaaaaaaaaaaaaaaaaaaaaaaaaaaaaaaaaaaaaaaaaaaaaaaaaaaaaaaaaaaaaaaaugcaucccccccccccccccccccccccccccccccaaaggcucuuuucagagccaccagaauu

SEQ ID NO: 2495 - RNA, 1749 nt, Artificial Sequence
  mRNA product Design a-1 comprising derived and/or modified sequence from LASV(LASV1000-NIG-2009;Clade II)__AIT17782__GPC (opt6)
gggagagucccgcagucggcguccagcggcucugcuuguucgugugugugucguugcaggccuuauucaagcuuaccaugggacaaauaauaacauucuuccaagaaguaccucacguaaucgaagaagucaugaauauuguccuaauagcacucucauuacuugcaauacuaaaaggaauauauaacguugcaacaugcggucuauucggcuuaguaucuuuuuuacuacuauguggcagaucuugcuccacaacguacaaaggaguauaugaacuacaaacauuagaauuagacauggcaucacuaaauaugacaaugccauuaucaugcacuaaaaacaacucacaccacuacauuauggucggcaacgaaacaggauuagaacuaacccuaacaaacacaucaauaauaaaccauaaauucuguaaucuaucagaugcacacaaaaaaaacuuauacgaccacgcuuuaaugucaauuauaucuacauuccauuuaucaauacccaauuuuaaccaauacgaagcaaugucaugcgacuucaacggaggaaaaaucucaguacaauauaauuuaucccacaccuacgcaguagaugccgcaaaccauugcggcacaauagcaaauggaguccuacaaacauuuaugcgaauggcaugggguggcucauacauagcccuugacucaggaaaaggaucaugggauugcauaaugacauccuaccaauauuuaauaauacaaaacacaacuugggaagaucacugccaauuuucaagacccaguccaaucggauacuuaggacuauuaucacaaagaacacgagauauauacaucagcagaagauuauuaggaacauucacauggacacuaucagauucagaaggcaaugaaaccccaggaggcuacugccuaacaagauggaugcucaucgaagcagaauuaaaaugcuuuggaaauacagcaguagcaaaauguaacgaaaaacacgacgaagaauucugcgacaugcuacgauuauuugacuucaacaaacaagccauaaaaagacuaaaaacagaagcacaaaugucaauacaauuaauaaacaaagccguaaacgcacuaaucaacgaucaauuaaucaugaaaaaucaccuuagagacauaaugggaaucccauauugcaacuacucaaaauacugguacuuaaaucacaccguaacuggaaaaacaucauuaccaagaugcuggcuaguaucaaauggcucauaccucaaugaaacccacuucucagacgacaucgaacaacaagcugacaacaugauaacugaacuauuacaaaaagaauacauugaccgacaaggaaaaacaccauuaggauuaguagaccucuuuguauuuucaacaucauucuaccuaaucucaauauucuuacauuuaguaaaaauuccaacacacagacacguaguaggaaaaccaugcccuaaaccccacagauuaaaccacaugggaauauguagcugcgguuuauacaaacacccaggaguaccaguuaaauggaaaagauaaggacuagucccuguucccagagcccacuuuuuuuucuuuuuuugaaauaaaauagccugucuuucagaucuaaaaaaaaaaaaaaaaaaaaaaaaaaaaaaaaaaaaaaaaaaaaaaaaaaaaaaaaaaaaaaaaugcaucccccccccccccccccccccccccccccccaaaggcucuuuucagagccaccagaauu

SEQ ID NO: 2496 - RNA, 1749 nt, Artificial Sequence
  mRNA product Design a-1 comprising derived and/or modified sequence from LASV(LASV221-NIG-2010;Clade II)__AIT17624__GPC (opt6)
gggagagucccgcagucggcguccagcggcucugcuuguucgugugugugucguugcaggccuuauucaagcuuaccaugggacaaaucauaaccuuuuuccaagaaguaccacacguaauugaagaaguaaugaauauaguacucaucgcccuaucacuacuagcaauacuaaaaggaauauacaacgucgcaacaugcggauuauuuggacuaguaucuuuucuauuacuaugcggcagaucaugcucaacaacauacaaaggcgucuacgaauuacaaacacuagaacuagauauggcaucucucaacaugacaaugccacuaucaugcacaaaaaauaacucccaccacuacauaaugguaggaaacgaaacuggacuagaacuaacucuaacaaacacuucaauuauaaaccacaaauucugcaaccuaucagacgcacacaaaaaaaaccuauaugaccaugcccuuauguccauaauaucaacauuccaccuaucaauaccuaacuuuaaccaauacgaagcaaugucuugcgacuucaauggagguaaaauaucaguacaauauaaccuaucacacacuuaugcaauagaugccgcaaaccacugcggaacuauagcaaacgguguauuacaaacauucaugagaauggcauggggcggaucauauaucgcacuagauucaggaaaaggcucuugggacuguaucaugacaucuuaccaauaccuaauaauacaaaacaccacaugggaagaccacugucaauucucacgacccucacccauaggauaccuuggacuacuaagccaaagaacacgcgauauauacauaucaagacgucuacugggaacauuuacauggacacuaagugauucagaaggaaacgaaacaccaggcggauacugcuuaacuagguggaugcuaauagaagcagaacuaaaauguuuuggcaauacagcaguagcaaaaugcaacgaaaaacacgacgaagaauuuugcgacaugcuaagauuauucgacuucaauaaacaagcaauacgaagauuaaaaacagaagcacaaaugucuauucaacuaaucaauaaagcaguaaaugcacuaauaaacgaccaacucauaaugaaaaaccauuuaagagacauaaugggaauaccauacugcaacuauuccaaauacugguacuuaaaccacacaguaaccggaaaaacaucacucccaagauguugguuaguaucaaacggauccuaccuuaaugaaacacauuuuucagacgauauagaacaacaagcagauaacaugauaacagaaaugcuccaaaaagaauacauggauagacaaggaaaaacaccacucggacuagucgaucuuuucguauucucuacaucauucuacuuaauaucaaucuucuuacaucuugucaaaaucccuacucaccgacacguuaucggaaaacccugcccaaaaccacaucgauuaaaccacaugggaauaugcuccugcggacuauacaaacacccaggaguaccagucaaauggaaaagauaaggacuagucccuguucccagagcccacuuuuuuuucuuuuuuugaaauaaaauagccugucuuucagaucuaaaaaaaaaaaaaaaaaaaaaaaaaaaaaaaaaaaaaaaaaaaaaaaaaaaaaaaaaaaaaaaaugcaucccccccccccccccccccccccccccccccaaaggcucuuuucagagccaccagaauu

SEQ ID NO: 2497 - RNA, 1749 nt, Artificial Sequence
  mRNA product Design a-1 comprising derived and/or modified sequence from LASV(LASV237-NIG-2010;Clade II)__AIT17638__GPC (opt6)
gggagagucccgcagucggcguccagcggcucugcuuguucgugugugugucguugcaggccuuauucaagcuuaccaugggucaaaucauaaccuucuuucaagaaguuccacaugucaucgaagaaguaaugaacauaguacuaauagcauuauccuuacuagcaauauuaaaaggaaucuacaacguagcaacuugcggcuuauucggacuagucuccuucuuacugcuauguggcagaucauguucaacaacuuacaaaggagucuacgaacuacaaacauuagaacuagacauggcaaguuuaaacaugacaaugccacuaucuugcaccaaaaauaauucccaucacuacauaauggucggcaacgaaacaggacuagaacucacacuaacaaauacaucaauaauuaaccacaaauuuugcaaccucucagaugcacacaaaaaagaccuauacgaccacgcacuaauguccauaauaucaacauuucauuuaucuauaccaaacuucaaccaauacgaagcaaugucuugcgauuucaauggaggaaaaauaucaguacaauacaaccuaucccacacauaugccguagacgcagcuaaccauugcggaacaauagcaaauggaguacuacaaacauucaugagaauggcauggggaggaucauacaucgcacucgacuccggaaaaggaucuugggacugcaucaugaccucuuaccaauaccuaauaauucaaaauacaaccugggaagaccauugccaauucucaagacccucaccaauaggauaucuaggacuacuaucacaaagaaccagagacauauacauaucccgacgacuacuaggaacauucacauggacauuaucagauucagaaggaaacgaaacaccaggaggcuauugcuuaaccagauggaugcuaauagaagcagaacucaaaugcuucggaaacacagcaguugcaaaaugcaacgaaaaacacgacgaagaauuuugugacauguuaagauuauuugacuucaacaaacaagcaauacgaagauuaaaaacagaagcacaaaugucaauacaacuaaucaacaaagcaguaaacgcacuaauaaacgaccaauuaauaaugaaaaaccauuuacgagauaucaugggcauaccuuacugcaauuacucaaaauacugguaccuaaaccacacaguaacaggaaaaaccucccuaccaagauguugguuaguaucaaacggcuccuauuuaaaugaaacacacuucucagaugacauugaacaacaagcagacaacaugauaacagaacuacuucaaaaagaauacauggacagacaagguaaaacaccacucggucuaguagacuuauucguauuuagcaccucguucuaccucauaucaauauuccuacaccuuauaaaaaucccaacacacagacauauaacaggaaaaccuugcccaaaaccacacagauuaaaccauauggguaucugcucauguggacuauacaaacacccaggcguuccaguaaaauggaaacguuaaggacuagucccuguucccagagcccacuuuuuuuucuuuuuuugaaauaaaauagccugucuuucagaucuaaaaaaaaaaaaaaaaaaaaaaaaaaaaaaaaaaaaaaaaaaaaaaaaaaaaaaaaaaaaaaaaugcaucccccccccccccccccccccccccccccccaaaggcucuuuucagagccaccagaauu

SEQ ID NO: 2498 - RNA, 1749 nt, Artificial Sequence
  mRNA product Design a-1 comprising derived and/or modified sequence from LASV(LASV253-NIG-2011;Clade II)__AIT17670__GPC (opt6)
gggagagucccgcagucggcguccagcggcucugcuuguucgugugugugucguugcaggccuuauucaagcuuaccaugggacaaauaauaacuuucuuucaagaaguaccccauguaauagaagaaguaaugaacauaguacuaaucgcccuauccuuacuagcaauacuaaaaggaauauacaacguagcaacaugcggauuauucggccuuguaucauuucuacucuuaugcggcagauccuguucaacaacauacaaaggaguauacgaacuacaaacacuagaacuagacauggcaucacuaaauaugacaaugccauuaagcugcacaaaaaacaacucucaccacuacauaaugguaggaaaugaaacaggacucgaacucacacuaacaaauaccucuaucauaaaccacaaauucugcaaucuaucagaugcccacaaaaaaaaccuauaugaucaugcauuaauguccauaauaucaacauuccaucuaucaauucccaacuuuaaccaauacgaagcaaugucaugcgacuuuaacggcggaaaaauaucuguacaauauaaucuaucccacacuuaugcagucgaugccgcaaaucacugcgguaccauagcaaauggaguacuccaaacauucaugcgcauggcuuggggcggaucauacaucgcacuagauuccggaaaaggaucaugggacugcauaaugacaucuuaccaauaucuuaucauacaaaauacuaccugggaagaucacugccaauuuucaagaccgucaccaauaggauaucucggauuacuaucacaacgaaccagagacauauauauaucaagaagacuacuaggaaccuucacauggacauuaagcgauucugaaggaaaugaaacuccagguggauauugccuaacaagauggauguuaauagaagccgaauuaaaaugcuucggaaauacagcaguugcaaaauguaacgaaaaacaugacgaagaauucugugacaugcuaagauuauucgacuucaacaaacaagcaauaagaagacuaaaagcagaagcacaaaugucaauacaacuaauaaauaaagcaguaaaugcucuaauaaaugaccaauuaauaaugaaaaaccaccuuagagacauaaugggaauacccuacuguaacuacucaaaauacugguaccuaaaccacacagucacaggacgcacgucacuaccccgaugcuggcuaguaucaaacggcucuuaccuaaacgaaacacacuucagcgacgacauagaacaacaagcagacaacaugaucaccgaauuauuacaaaaagaauacauagacagacaaggaaaaacaccacuaggccuaguagaccucuuugucuucucaacaucauuuuaccuaauaucaauauuccuacauuuaguuaaaauacccacccauagacacaucauaggaaaacccugccccaaaccacaccgacuaaaccacaugggaauaugcucaugugguuuauacaaacaucccggaguaccaguaaaauggaaaagauaaggacuagucccuguucccagagcccacuuuuuuuucuuuuuuugaaauaaaauagccugucuuucagaucuaaaaaaaaaaaaaaaaaaaaaaaaaaaaaaaaaaaaaaaaaaaaaaaaaaaaaaaaaaaaaaaaugcaucccccccccccccccccccccccccccccccaaaggcucuuuucagagccaccagaauu

SEQ ID NO: 2499 - RNA, 1749 nt, Artificial Sequence
  mRNA product Design a-1 comprising derived and/or modified sequence from LASV(LASV254-NIG-2011;Clade II)__AIT17674__GPC (opt6)
gggagagucccgcagucggcguccagcggcucugcuuguucgugugugugucguugcaggccuuauucaagcuuaccaugggacaaauaaucacauucuuucaagaaguaccacauguaauagaagaaguaaugaacauaguucuuauagcacucucauuacuagcaauauuaaaaggaauauacaacguagcuacaugcggccucuuuggacuaguaucauuccuccuccuaugcggaagaucuugcucaacaacauacaaagguguauacgaacuacaaacauuagaauuagacaugacaaaucuuaacaugacaaugccacuauccuguaccaaaaauaacucccaccacuauauuaugguaggaaaugaaacaggacuagaacucacacuaacaaacacaucaauaauaaaccacaaauuuugcaaccuaucugaugcccacaaaaaaaacuuauacaaccacgcacuaaugucaauaauaucaacauuccacuuaucaauaccaaauuuuaaccaauaugaagcaauguccugcgacuucaacggaggaaaaaucucaguacaauauaaccuaucccacucauacgcaguagacgcagcaaaucauugcggaacaauagcaaacggaguccuacaaacauuuaugcgcauggcauggggaggaucuuacaucgcauuagacuccggaaaaggaaauugggacuguauuaugacaucuuaccaauaucuaaucauacaaaacacaacaugggaagaccacugccaauuuaguagacccucacccauaggauaccuaggauuacucucucaaagaacaagagauauauacauaucccgccgcuuacucggaaccuucacuuggacacucucagacucagaaggaaacgaaacaccaggaggauacugccuuacaagauggaugcuaauagaagcagaauuaaaauguuucggaaacacagcaguagcuaaaugcaaugaaaaacacgacgaagaauucugugacaugcuaagacuauucgacuucaacaaacaagcaauacgaagacuaaaaaccgaagcacaagcaaauauacaacucaucaacaaagcaguaaacgcacuuauaaaugaccaauuaauaaugaaaaaccaccucagagacaucaugggaauaccuuauugcaacuauucaaaauauugguaccuuaaccacacagucacagguaaaacaucccuaccaagauguuggcucgucucaaauggauccuaccuaaacgaaacccacuucucugacgauauagaacaacaagcagacaauaugauaacugaacuccuacaaaaagaauacauggacagacaaggaaaaacaccacuaggacucguagaccuauucguauuuucaacaucuuucuacuuaauauccauauuccuacaccuaguaaaaauaccaacccacagacacgucauaggaaaaccaugcccuaaaccacaucguuuaaaucacaugggaauauguucauguggauuauauaaacauccagguguaccaguaaaauggaaaagauaaggacuagucccuguucccagagcccacuuuuuuuucuuuuuuugaaauaaaauagccugucuuucagaucuaaaaaaaaaaaaaaaaaaaaaaaaaaaaaaaaaaaaaaaaaaaaaaaaaaaaaaaaaaaaaaaaugcaucccccccccccccccccccccccccccccccaaaggcucuuuucagagccaccagaauu

SEQ ID NO: 2500 - RNA, 1749 nt, Artificial Sequence
  mRNA product Design a-1 comprising derived and/or modified sequence from LASV(Nig08-A19;Clade III)__ADU56618__GPC (opt6)
gggagagucccgcagucggcguccagcggcucugcuuguucgugugugugucguugcaggccuuauucaagcuuaccaugggacaaaucguaacauucuuucaagaaguaccacacguaauagaagaagucaugaacauaguuuuaauagcccucucaauacuagcaauauuaaaaggcuuauacaacauagccaccugcggacuaauaggacuagucacauuccuccuacuaagcggcagaucuugcucaaugacauauaaaggaguauacgaauuacaaacccuagaacuaaauaugaauacauuaaacaugacaaugccacuaucaugcacaaaaaauaacucucaccauuacauaaugguuggaaacgaaacaggacuagaauuaacacuaacaaacaccagccuuuuacaccacaaauucugcaaccuauccgacgcacacaaaaaaaacuuauaugaccauacccuaaugucaauaaucuccacauuucaucuaucaauaccaaauuucaaccaauacgaagcaaugucaugcgacuucaacggaggaaaaauaacaguacaauacaaucuuucucacucauaugcaaucgaugcagcuaaccauugcggaacaguagcaaacggaguacuacaaacauucaugcgaauggcauggggagguucauacauugcucucgauucaggaagaggcaaaugggacuguaucaugacuucauaccaauaccuaaucauccaaaacacaacaugggaagaccacugccaauucucacgcccaucaccaauaggcuaccucggcuuacuaucccaaagaaccagagauauauacauaucaagaagacuacuaggaacauucacauggacucuuuccgacuccgaaggaaacgaaacaccaggaggcuacugccuaacacgauggauguuaauagaagcagaauuaaaaugcuucggcaacacugccgucgcuaaaugcaacgaaaaacaugaugaagaauuuugcgacaugcucagacuauucgacuucaauaaacaagcaaucagaagacuaaaagcagaagcucaaaugucaauccaacuaauaaacaaagcaguaaacgcucuaauaaaugaucaacuaauaaugaaaaaccaccuaagagacauaaugggaaucccauacuguaauuacucaaaauacugguaccuaaaucacacauccacuggaagaacaucacugccaagaugcugguuaguauccaacggaucauaucuaaaugaaacacacuucucagaugacauagaacaacaagcagacaauaugauaacagaaauguuacaaaaagaauaccuagauagacaaggaaaaacaccccuagguuuaguugacuuauucgucuucagcacaucuuucuaccuaauauccauauuccuccaucuaguaaaaauaccaacacacagacacauaguaggaaaaccaugcccaaaaccccaucgccuaaaccauaugggcauaugcucaugcggacuauacaaacaaccaggagucccagucagauggaaaagauaaggacuagucccuguucccagagcccacuuuuuuuucuuuuuuugaaauaaaauagccugucuuucagaucuaaaaaaaaaaaaaaaaaaaaaaaaaaaaaaaaaaaaaaaaaaaaaaaaaaaaaaaaaaaaaaaaugcaucccccccccccccccccccccccccccccccaaaggcucuuuucagagccaccagaauu

SEQ ID NO: 2501 - RNA, 1752 nt, Artificial Sequence
  mRNA product Design a-1 comprising derived and/or modified sequence from LASV(G1180-SLE-2010;Clade IV)__AIT17168__GPC (opt6)
gggagagucccgcagucggcguccagcggcucugcuuguucgugugugugucguugcaggccuuauucaagcuuaccaugggacaaauaguaacauucuuccaagaaguaccacauguaauugaagaaguaaugaauauaguacuaaucgcucuaucuauccucgcaguacuaaaaggauuauauaacuucgcaacuuguggacuagucggcuuacuaacuuuccuccuauuaugcggacgaucuugcacagcaucaagauauaaaggaguuuacgaacuacaaacccuugaauuaaacauggaaacacuaaauaugacaaugcccuuaagcuguacaaaaaacaauucucaucauuacauaaugguaggaaacgaaacaggauuagaauuaacauuaacaaauacauccauaauaaaccauaaauucugcaauuuaucagacgcacacaaaaaaaaccucuacgaccaugcacuuaugucaauuauaucaacauuccacuuaucaauacccaacuucaaucaauacgaagcaaugucuugcgacuucaauggaggaaaaauaucaguacaauacaauuuaucccauucauaugcaggagacgcagcaaaccauugcggaacaguugccaacggaguccuacaaacauuuaugcgaauggcauggggaggaucauauaucgcacuagacaguggacacggaucaugggacugcauaaugacaagcuaccaauaucuaaucauacaaaauacuacaugggaagaccacugccaauucagccgaccaagcccaauaggauaucuaggccuacucucacaacgcacaagagauauauacauaucaagaagauuacuaggaacauuuacauggacauugucagacucugaaggaaaagacacaccaggagguuauugccuuacaagauggauguuaauagaagcagaauuaaaaugcuuuggaaacacggcuguagcuaaaugcaacgaaaaacacgaugaagaauucugcgauauguuaagacuauuugauuuuaacaaacaagcaauccaaagacuaaaagcagaagcacaaaugucaauacaacuaaucaacaaagcagucaaugcauuaauaaaugaccaacuuauaaugaaaaaucacuuaagagacauaaugggcauaccauacuguaauuacucaaaauauugguaccuaaaucacacaaccacaggaaaaacuagccuaccaaaaugcugguuaguaucaaauggaucuuacuuaaaugaaacacacuucucugacgauauagaacaacaagcugacaacaugauaacagaaaugcuccaaaaagaauacauggaaagacaaggaaaaacaccacuuggauuaguagaccuauucguauucagcaccuccuuuuauuuaauaucaauauuccuacaccucguaaaaauaccaacacauagacauaucgucggaaaaagcugcccaaaaccacaccgacuaaaucacaugggaauaugcucguguggccuauauaaacaaccaggagucccaguaaaauggaaaagauaaggacuagucccuguucccagagcccacuuuuuuuucuuuuuuugaaauaaaauagccugucuuucagaucuaaaaaaaaaaaaaaaaaaaaaaaaaaaaaaaaaaaaaaaaaaaaaaaaaaaaaaaaaaaaaaaaugcaucccccccccccccccccccccccccccccccaaaggcucuuuucagagccaccagaauu

SEQ ID NO: 2502 - RNA, 1752 nt, Artificial Sequence
  mRNA product Design a-1 comprising derived and/or modified sequence from LASV(G1442-SLE-2011;Clade IV)__AIT17180__GPC (opt6)
gggagagucccgcagucggcguccagcggcucugcuuguucgugugugugucguugcaggccuuauucaagcuuaccaugggacaaauagucacuuuuuuccaagaaguaccacauguaauagaagaaguuaugaacauaguauuaauagcauuaucuauauuagccguacucaaaggucuauacaaugucgcaacauguggacuaauagguuuagucacauucuuacuccuaugcggaagaucauguacaacaacacuauacaaaggcguauacgaacuucaaacuuuagaacuaaacauggaaacauuaaacaugaccaugccucuauccugcacaaaaaacaacucacaccauuacauuagaguaggaaacgaaacaggacuagaacuaaccuuaacgaauacaucaauaauuaaccacaaauucugcaaccuaucagacgcccacaaaaaaaaccuauaugaccacgcauuaaugucuauaaucucaacauuccaccuaucaauuccaaacuucaaccaauacgaagcaaugucaugcgauuucaauggaggaaaaauaucaguacaauauaaccuuucacacucauacgcaggagacgcagcuaaccacugcgguacagucgcaaauggaguauuacaaacauucaugcguauggcaugggguggcucauauauagcacuugauucaggaagaggaaauugggauugcauuaugacuuccuaucaauaucuaauaauacaaaauacaacaugggaugaccacugucaauucucaagaccuucaccaauaggcuaccuaggacuauuaucacaaagaacccgagauguauacauaucacgacgacuuuuaggaacauucacauggacauuaucagacucagaaggcaaagacacaccaggagguuacugucuaaccagauggauguuaaucgaagcagaacuaaaaugcuuuggaaacacugcaguagcaaaauguaacgaaaaacacgaugaagaauucugugauauguuaagacuauucgauuucaacaaacaagcaauacaacgacucaaagcagaagcacaaauguccauucaacuaauuaacaaagcaguaaacgcucuaauaaacgaccaacucaucaugaaaaaccacuuaagagauauaaugggaauccccuacugcaauuacucaaaauacugguaccuaaauaacacugcaacuggcaaaaccucauuaccaaaaugcuggcucauaucuaauggcucauauuuaaacgaaacccauuucucagacgacauagaacaagaagccgauaacaugauaacagaaauguuacaaaaagaauacauggaaagacaaggaaaaaccccacuaggauuaguagacuuauucguauuuuccacuucauucuaucuaauaucaauauuccuacaccuagucaaaauaccuacacaccgacacauaguaggaaaauccuguccaaaaccccaucgacuaaaccacauggguauaugcuccugcggacuauacaaacaaccaggagucccaguaagauggaaaagauaaggacuagucccuguucccagagcccacuuuuuuuucuuuuuuugaaauaaaauagccugucuuucagaucuaaaaaaaaaaaaaaaaaaaaaaaaaaaaaaaaaaaaaaaaaaaaaaaaaaaaaaaaaaaaaaaaugcaucccccccccccccccccccccccccccccccaaaggcucuuuucagagccaccagaauu

SEQ ID NO: 2503 - RNA, 1752 nt, Artificial Sequence
  mRNA product Design a-1 comprising derived and/or modified sequence from LASV(G3010-SLE-2013;Clade IV)__AIT17344__GPC (opt6)
gggagagucccgcagucggcguccagcggcucugcuuguucgugugugugucguugcaggccuuauucaagcuuaccaugggacaaauaguaacauuuuuccaagaaguaccccacguaauagaagaagucaugaauaucguguuaauugcacuaucaauccucgcaguucuaaaaggccuauacaauuucgccacauguggccuaguuggauuaguaaccuuccuauuacuauguggccgaucuuguacuaccuccuuauauaaaggagucuaugaacuacaaacacuagaacuaaauauggaaacacugaauaugacaaugccacucucauguacaaaaaacaacucacaccacuauauaaugguaggaaacgaaacaggcuuagaacuaacacuaacaaauacaagcauaauaaaccacaaauucugcaaccuuagcgaugcacauaaaaaaaacuuauacaaccacgcccuaaugucuauaauauccacauuccacuuauccauaccuaacuucaaucaauacgaagccaugucaugugacuucaauggaggaaaaaucuccguacaauacaaccuaucucauaguuacgcaggagacgcagccucucauugcggaacuguagcaaauggaguauuacaaacauucaugcgaauggcauggggaggaucauauauagcauuagauucuggauacggaaaaugggauugcaucaugacaucauaccaauacuuaauaauacaaaacaccaccugggaagaccacugucaauucucccgacccaguccaauaggauaccucgguuuauuaucacaacgaacaagagacauauacauaucaagaagauugcuaggaacauuuacauggacacuaagugauucagaaggaaaagacaccccaggaggauacugccuaacaagauggaugcuaauagaagcagaacuaaaaugcuucggaaauacagcagucgccaaaugcaacgaaaaacacgacgaagaauuuugcgacaugcuuagauuauucgacuuuaacaaacaagcuauacaaagauuaaaaaccgaagcacaaaugucaauacaauuaauaaauaaagcaguaaacgcccuaauaaacgaucaacuuauaaugaaaaaccaucuuagagacauaaugggaaucccuuacugcaacuauucaaaauauugguacuuaaaccacaccacaacaggaaaaacaucacuccccaaaugcuggcuaguauccaauggcucauaucucaacgaaacacacuucucagaugauaucgaacaacaagccgacaacaugaucacagaaaugcuucaaaaagaauacauggaacgacaaggaaaaacaccacuaggccucguggaccuauucguauucuccacaucauucuaucuaauuucuauauuccuacaucucguuaaaauaccaacacaccgacauauaguaggcaaaucauguccaaaaccacacagacuaaaccauaugggaaucuguuccuguggacucuauaaacaaccaggaguaccaguaagauggaaaagauaaggacuagucccuguucccagagcccacuuuuuuuucuuuuuuugaaauaaaauagccugucuuucagaucuaaaaaaaaaaaaaaaaaaaaaaaaaaaaaaaaaaaaaaaaaaaaaaaaaaaaaaaaaaaaaaaaugcaucccccccccccccccccccccccccccccccaaaggcucuuuucagagccaccagaauu

SEQ ID NO: 2504 - RNA, 1752 nt, Artificial Sequence
  mRNA product Design a-1 comprising derived and/or modified sequence from LASV(G502-SLE-2009;Clade IV)__AIT17126__GPC (opt6)
gggagagucccgcagucggcguccagcggcucugcuuguucgugugugugucguugcaggccuuauucaagcuuaccaugggacaaauaguaacauuuuuccaagaaguaccacacgucauagaagaaguaaugaauauaguauuaauagcccuuagcauccucgcaguacuaaaaggucuauacaacuucgcaacaugcggccuagucggacuacuaacauuccuauuauuauguggucgcucaugcacuacaggacucuauaaaggaguauacgaauuacaaacauuagaauuaaauauggaaacauuaaacaugacaaugccacuauccuguaccaaaaacaacucacaccauuauauaaugguaggcaacgaaacaggacucgaacuaacucuuacaaauacaucuauaauaaaccacaaauucugcaacuuaucugacgcacacaagaaaaaccuauacgaccacgcuuuaaugucaauaaucucaacauuccaucuaucaauaccaaacuucaaccaauaugaagcaaugucaugugauuucaacggaggaaaaauaucaguacaauacaaccuaucacacucauacgcaggagacgcagccgaccacugcggaacaguagcuaaugguguacuacaaacauucaugagaauggcauggggcggauccuacaucgcacuugauuccggaagaggaagaugggacugcaucaugacuucauaucaauacuuaauaauacaaaacaccacaugggaagaccauugccaauucucaagaccaucacccauaggauaccuaggcuuauuaucccaaagaacaagagacauauacauaucuagaagacuacucggaacauucacuuggacacucucugauucagaaggaaaagacacucccggaggauacugccuaacacgauggauguuaauagaagccgaauuaaaaugcuucggaaauacagcaguugcuaaaugcaacgaaaaacaugacgaagaauuuugcgauauguuaagauuauucgacuucaacaaacaagcaauccaaagacuaaaagcagaagcacaaaugucaauacaacuaauuaauaaagcaguaaacgcucuuauuaacgaucaacuuguaaugaaaaaccaucuaagagacauaauggguauuccauauuguaacuacucccguuacugguacuuaaaccacaccacaacaggaagaacaucauuaccuaaauguuggcuaguaucaaacggaucauaccuaaacgaaacacauuucuccgaugacauugaacaacaagcagacaacaugauaacagaaaugcuacaaaaagaauacauggaaagacaaggaaaaacaccacuaggccucguagaccucuucgucuucuccacuucauucuauuuaauaucaauauucuuacaccuaguaaaaauaccaacucacagacauauagucggaaaaaguugcccaaaaccacaccgccuaaaccacaugggcauuuguucauguggacucuacaaacaaccaggcguaccaguuaaauggaaacgaugaggacuagucccuguucccagagcccacuuuuuuuucuuuuuuugaaauaaaauagccugucuuucagaucuaaaaaaaaaaaaaaaaaaaaaaaaaaaaaaaaaaaaaaaaaaaaaaaaaaaaaaaaaaaaaaaaugcaucccccccccccccccccccccccccccccccaaaggcucuuuucagagccaccagaauu

SEQ ID NO: 2505 - RNA, 1752 nt, Artificial Sequence
  mRNA product Design a-1 comprising derived and/or modified sequence from LASV(G733-SLE-2010;Clade IV)__AIT17154__GPC (opt6)
gggagagucccgcagucggcguccagcggcucugcuuguucgugugugugucguugcaggccuuauucaagcuuaccaugggacaaaucguaaccuucuuccaagaagucccacacguaauagaagaaguaaugaauaucguacuaauagcauuaucaauacuugcaguacucaaaggacuauauaacuucgcuacaugcggaauaguaggacuaguaucauucuuauuauuaugcggacgaucaugcaccacaucauuauacaaaggagucuaugaauuacaaacacuagaauuaaacauggaaacccuaaacaugacaaugccacucucaugcacaaaaaauaacucacaucacuacauaaugguuggaaacgagacaggacuagagcuaacacuaacaaacacaucaauaauaaaccacaaauucuguaauuuaagcgacgcacacaaaaaaaaucuauacgaccacgcauuaauguccauaaucucaaccuuccacuuaucaauaccaaauuuuaaucaauacgaagcaaugucaugcgauuucaacggaggaaaaauaucaguucaauauaaccuuagucacuccuacgcaggagaugccgccaaccacugcggcacaauagcaaacgguguccuacaaacuuucaugagaauggcauggggaggaagcuacauagcauuagauagcgggagagaucgaugggacuguauaaugacuaguuaucaauauuuaauaauacaaaacaccacaugggaagaccacugccaauucucaagaccaagcccaaucgguuaccucggacucuuaucacaaagaacccgagacauauacauaucaagaagacuacuaggcacauucacauggacccuaucugacagcgaaggaaaagauacuccaggagguuacugccuuacuagauggaugcuaauagaagcagaauuaaaauguuucggaaacaccgcaguagcaaaauguaacgaaaaacaugacgaagaauucugcgacaugcuccgacuauuugauuucaacaaacaagcaauacaaagacuaaaagcagaagcacaaaugucaauacaauuaauaaauaaagcaguaaacgcccuaauaaacgaccagcuaauaaugaaaaaccacuuacgagauaucaugggaaucccauacuguaacuacucaaaauacugguacuuaaaccauacaacaacuggaaaaacaucacuaccaaaaugcugguuaguaaguaacggaucuuaccucaacgaaacacauuuuucagaugacauagaacaacaagccgauaauaugauaacagaaaugcuacaaaaagaauacauggaaagacaagguaaaacuccacuaggacuagucgaccuauucguauucaguacaucauuuuacuuaauaucaaucuuccuacaccuaguaaaaauaccuacccacagacacguaguaggaaaaucaugcccaaaaccacaucgacuaaaucacaugggaauaugcucauguggacuauacggccaaccaggaguaccaguaaaauggaaaagauaaggacuagucccuguucccagagcccacuuuuuuuucuuuuuuugaaauaaaauagccugucuuucagaucuaaaaaaaaaaaaaaaaaaaaaaaaaaaaaaaaaaaaaaaaaaaaaaaaaaaaaaaaaaaaaaaaugcaucccccccccccccccccccccccccccccccaaaggcucuuuucagagccaccagaauu

SEQ ID NO: 2506 - RNA, 1752 nt, Artificial Sequence
  mRNA product Design a-1 comprising derived and/or modified sequence from MOPV/LASV reassortant(IGS-1;Clade IV)__AFY05576__GPC (opt6)
gggagagucccgcagucggcguccagcggcucugcuuguucgugugugugucguugcaggccuuauucaagcuuaccaugggacaaauaguaacauucuuccaagaagucccacacguaauagaagaaguaaugaauauaguacucauagcauuaucaguccuugcaguacuaaaaggccuauauaauuucgcuacauguggccuaguuggccuaguaacauuccuauuauuauguggacgauccugcacuacaucauuauacaaaggaguauacgaauuacaaacacucgaauuaaacauggaaacacucaacaugacaaugccacuauccugcacuaaaaacaacagccaccauuauaucaugguaggaaaugaaacaggacuagaauuaacacucacaaauacaucaauaauaaaccauaaauucuguaaucuaucugacgcacacaagaaaaacuuauacgaccacgcauuaaugucuauaauuucaacauuccaucuaucuauaccaaacuucaaucaauacgaagcaaugagcugugacuucaacggaggaaaaauaucaguacaauacaaccucucacacucauacgccggagaugcagcaaaccauuguggcacaguagcuaacggaguacuacaaacauuuaugcgcauggcuuggggaggaucauauauagcccucgauucaggucgaggcaacugggacugcauaaugacaucauaccaauaccuaauaauacaaaauacaacaugggaagaucauugccaauucucaagaccauccccuauaggcuacuuaggacuacucucucaacgaacaagggacauauacaucagcagaagauuauuaggaaccuuuacuuggacuuuaagcgacucagaaggcgaagauacacccggaggauacugucuaacaagauggaugcuaauagaagcagaauuaaaaugcuuugguaacacagcaguagccaaaugcaacgaaaaacacgaugaagaauuuugcgacauguuaagacuauucgauuucaacaaacaagcaauccaaagacucaaagcagaagcacaaauguccauacaacuaaucaauaaagcaguaaacgcacuaauuaacgaccaacuaauaaugaaaaaccacuuaagagacauaaugggaauaccuuauugcaacuacucuaaauacugguaccuaaaccacacaacaacaggccguacaucauuaccaaaaugcuggcuaguaucgaacggaucauacuuaaaugaaacacauuucucagaugauaucgaacaacaagcagacaauaugauaacagaaaugcuacaaaaagaauacauggaaagacaaggaaaaacaccacuaggucuaguagaccuauucguauucucaacuagcuucuaucucaucucaauauuccuacaccuaguaaaaauaccaacacauagacauauaguaggaaaaucaugcccaaaaccccacagacuaaaccacaugggaauaugcucauguggacucuacaaacaaccaggaguaccaguaaaauggaaacgcuaaggacuagucccuguucccagagcccacuuuuuuuucuuuuuuugaaauaaaauagccugucuuucagaucuaaaaaaaaaaaaaaaaaaaaaaaaaaaaaaaaaaaaaaaaaaaaaaaaaaaaaaaaaaaaaaaaugcaucccccccccccccccccccccccccccccccaaaggcucuuuucagagccaccagaauu

SEQ ID NO: 2507 - RNA, 1752 nt, Artificial Sequence
  mRNA product Design a-1 comprising derived and/or modified sequence from LASV(LM765-SLE-2012;Clade IV)__AIT17814__GPC (opt6)
gggagagucccgcagucggcguccagcggcucugcuuguucgugugugugucguugcaggccuuauucaagcuuaccauggggcaaauugucacauucuuucaagaaguaccacacguuauagaagagguaaugaacauaguacuaauagcacuaucaauacuagccguauuaaaaggacuauacaacuucgccacaugcggacuaguaggccuaguaacauuccuacuacuguguggacgaagcugcacuaccucccuauacaaaggaguauaugaacuccaaacauuagaacuaaauauggaaacacuuaacaugacuaugccccuauccugcacaaaaaacaacucacaucauuacauuaugguuggaaaugaaacaggauuagaacuaaccuuaaccaacacuucaauaauagaccacaaauucugcaacuuaucagacgcacaucgaaaaaauuuauaugaccaugcacuaaugucaauuauaucaacauuucaccuaagcauaccaaacuucaaccaauaugaagcaaugucaugcgacuucaacggaggaaaaauaucaguacaauacaauuuaucacauagcuaugcaaaagacgcagcagaucauugcggaacaguagcaaacggaguacuacaaacauucaugcgaauggccuggggaggaucauacauagcacuagacuccggaagaggaagaugggauuguauaaugacuucauaccaauauuuaauaauacaaaauacuacuugggaagaucacugccaauucucuagaccaucacccauuggauacuuaggacuacuaucacaaagaacaagggacauauacauaucaagacgacuacucgguacauucacauggacauuaucagauagugaaggaaaagauacuccaggcggauauugcuuaaccagauggaugcuaauugaagcagaacuaaaauguuuuggaaacacagcuguagcaaaaugcaacgaaaaacaugaugaagaauucugugauaugcuaagauuauucgauuuuaauaaacaagcaauucaaagacuaaaagcagaagcacaaaugucaauucaacuaauaaacaaagcaguaaaugcauuaauaaacgaucaacuaauaaugaaaaaucaccuaagagacauaaugggaauaccauacugcaacuacucuaaauacugguaccuaaaucacacaacaacaggcaaaacaucacuaccaaaaugcugguuaguaucaaacggaucauaccuaaacgaaacacacuucagcgaugacauagaacaacaagcagauaauaugauaacugaaauguuacaaaaagaauacauggaaagacaaggaaaaacaccauuaggcuuagucgacuuauucguauucucaacaucauuuuacuuaaucuccauauuccuacaccuaguaaaaauacccacacauagacacauagucggaaaaccaugcccaaaaccacacagacuaaaccacaugggaauauguucauguggacuauauaaacaaccaggaguaccaguaaaauggaaacgauaaggacuagucccuguucccagagcccacuuuuuuuucuuuuuuugaaauaaaauagccugucuuucagaucuaaaaaaaaaaaaaaaaaaaaaaaaaaaaaaaaaaaaaaaaaaaaaaaaaaaaaaaaaaaaaaaaugcaucccccccccccccccccccccccccccccccaaaggcucuuuucagagccaccagaauu

SEQ ID NO: 2508 - RNA, 1752 nt, Artificial Sequence
  mRNA product Design a-1 comprising derived and/or modified sequence from LASV(LM776-SLE-2012;Clade IV)__AIT17824__GPC (opt6)
gggagagucccgcagucggcguccagcggcucugcuuguucgugugugugucguugcaggccuuauucaagcuuaccaugggacaaaucguaacauuuuuccaagaagucccccacguaauagaagaaguaaugaacauuguacuuaucgcauuaucaauacucgcaguccuaaaaggacuauacaacuuugcaacaugcggacuaguaggcuuagucacauuccuauuacuaugcggaagaucaugcacaacaagcguauacaaaggaguauaugaacuccaaacacuagaacucaauauggaaacucuaaacaugacaaugccauuaucaugcacaaaaaacaacucacaccauuacauaaugguaggaaacgaaacaggacuagaauuaacacuaacaaacacuucaauaaucaaccacaaauucugcaaccuuucagacgcacauaaaaaaaaccuauacgaccacgcacuaaugucuauaauaucaaccuuccaucuaucaauaccgaacuuuaaccaauacgaggcaaugucaugugauuucaauggcggaaaaauaucaguacaauacaaccuaucacacucauacgccggugaugcagccaaccacugcggaacaguugccaaugguguacuacaaacauucaugagaauggcauggggcggaucauacauagcccuagacucagggcacggaaaaugggacuguauaaugacaucuuaccaauaccucauaauacaaaauacaacaugggaagaccacugccaauuuucacgaccaucaccaauaggauaucuaggacuauuaucacaaagaacuagagacauauauauaucaagaagauuauuaggaacauuuacuuggacacuaucagacucagaaggaaaagacacaccagguggauauugcuuaaccagauggauguuaauagaagcagaacuaaaaugcuuuggaaacacagcaguugcgaaauguaaugaaaaacacgacgaagaauucugcgauaugcuaagauuauucgacuuuaacaaacaagcaauacaaagacuaaaagcugaagcacaaaugagcauacaacugauaaacaaagcaguaaacgcccucauuaacgaccaauuaauaaugaaaaaccacuuaagagacauaaugggaauaccauacugcaacuacucaaaauacugguauuuaaaccacacaacaaccggaaaaacaucccuaccaaaaugcuggcuaguauccaauggaucauaccuaaaugaaacacacuuuucagacgacauugaacaacaagcagacaauaugauaacagaaauguuacaaaaagaauacauggaacgacaaggcaaaacuccccuaggacucguagaccuuuucgucuucucaaccaguuucuaucuaauaucaauauuccuccaccuagucaaaauacccacacauagacacauaguugguaaaucaugccccaaaccccauagacucaaccacaugggaauaugcucuugcggacuauacaaacaaccaggagucccaguacgauggaaaagauaaggacuagucccuguucccagagcccacuuuuuuuucuuuuuuugaaauaaaauagccugucuuucagaucuaaaaaaaaaaaaaaaaaaaaaaaaaaaaaaaaaaaaaaaaaaaaaaaaaaaaaaaaaaaaaaaaugcaucccccccccccccccccccccccccccccccaaaggcucuuuucagagccaccagaauu

SEQ ID NO: 2509 - RNA, 1752 nt, Artificial Sequence
  mRNA product Design a-1 comprising derived and/or modified sequence from LASV(Mad39;Clade IV)__ANH09722__GPC (opt6)
gggagagucccgcagucggcguccagcggcucugcuuguucgugugugugucguugcaggccuuauucaagcuuaccaugggacaaaucguaacauucuuccaagaaguaccacacguaauagaagaaguaaugaacauaguacuuauagcucuaucuauauuagcaguucuaaaaggauuauacaauguagccacaugcggacugaucggacuaguaacauuccuacuccuauguggaagaucauguaccacaacucuauauaaaggcguauaugaacuacaagcauuagaacuuaacauggaaacucuaaacaugacaaugccccuaucaugcacaaaaaauaacucccaccacuacauaagaguaggaaaugaaacuggacucgaacuaacacuaacaaacacauccuuaaucaaccacaaauucuguaaccuaagcgacgcacauaaaaaaaaucuauacgaccacgcauuaauguccauaaucucaaccuuccacuuauccauccccaauuuuaaccaauacgaagcaaugucaugcgauuucaaugacgguaaaauauccguccaauauaauuuaucccauacauacgccggagauaccgcaaaccacugcggaacuguugcaaacggagucuuacaaacauucaugagaauggccuggggaggaucauacauagcacuagacuccggaagaggaggaugggacugcaucaugacuucauaucaauaccuaauuauacaaaacacuacaugggaagaccacugucaauuuucaagaccaucaccaauaggauaccuaggucuacuuucacaaagaaccagagacaucuauaucuccagaagacuccucgguacauucacauggacacuuucagacucagaaggaaaagacacacccggaggauauugucuaacaagauggaugcucauagaagccgaacucaaaugcuucggaaauacagcaguagcuaaaugcaacgaaaaacaugaugaagaauuuugcgauaugcuuagauuauucgauuucaauaaacaagccauacaaagacuaaaagcagaagcccaaaugucaauacaacuaauaaacaaagccguaaacgcacuaauaaacgaucaauuaauaaugaaaaaccaccuaagagacauaaugggaauaccauacugcaauuauucaaaauauugguaccuaaaucacacaguaacaggaaaaaccucauuaccuaaaugcuggcuagucucuaacggaucauacuuaaacgaaacccacuucucagaugacauagaacaacaagccgacaacaugaucacggaaaugcuucaaaaagaauacauggagagacaaggcaaaacaccacuaggacuaguugaccuauucguuuuuucaaccuccuucuacuuaauaucaaucuuccuacaccuagucaaaauacccacacauagacauguaguaggaaaaccauguccaaaaccacaucgauuaaaucacaugggaauuugcucaugcggcuuuuacaaacaacccggagucccaguacgauggaaacgauaaggacuagucccuguucccagagcccacuuuuuuuucuuuuuuugaaauaaaauagccugucuuucagaucuaaaaaaaaaaaaaaaaaaaaaaaaaaaaaaaaaaaaaaaaaaaaaaaaaaaaaaaaaaaaaaaaugcaucccccccccccccccccccccccccccccccaaaggcucuuuucagagccaccagaauu

SEQ ID NO: 2510 - RNA, 1752 nt, Artificial Sequence
  mRNA product Design a-1 comprising derived and/or modified sequence from LASV(Z0947-SLE-2011;Clade IV)__AIT17840__GPC (opt6)
gggagagucccgcagucggcguccagcggcucugcuuguucgugugugugucguugcaggccuuauucaagcuuaccaugggacaaauagucaccuucuuccaagaagucccacauguaauagaagaaguaaugaauauaguccuuauagcacuaucaauccuugccguacuaaaaggacuauacaacuucgccacaugcggucuagucggccuaguaacauucuuacuauuaugcggacgaucuuguacuaucagccucuacaaaggaguuuacgaauuacaaacacuagaacuaaauauggaaacauuaaacaugacuaugccccugucauguaccaaaaauaacucacaucacuauauuaugguuggcaaugaaacaggacucgaacucacacuaacaaacacaucaauaaucaaccauaaauucuguaacuuauccgaugcacacaagaaaaaccuauaugaccaugcacuaauguccauaauaucaacauuucaccuaucaauucccaauuucaaccaauacgaagcaaugucaugcgacuuuaauggagguaaaauaucaguacaauauaaccuaucacacucuuaugcaggagaugcagcaaaccauugcggaacaguagcaaacggaguauuacaaacauucaugcguauggccuggggaggaucuuauauagcauuagacucaggaagagauagaugggauuguauaaugacaucauaccaauacuuaauaauacaaaauacaaccugggaagaccacugccaauucucaagacccuccccaauaggauaucucggauuacuuucacaacgcacaagagauauauacauaucaagaagauuacuaggaacuuucacauggacccuauccgauucugaaggaaaagauacaccagguggauacugccuaacccgauggaugcuaauagaagcagaacuaaaauguuucggaaacacagcuguagcaaaaugcaacgaaaaacacgacgaagaguucugcgacaugcuaagauuauucgauuucaacaaacaagcaauccaaagauuaaaagcagaagcacaaauguccauccaacuaauuaacaaagcagucaacgcauuaauaaacgaccaacuaauaaugaaaaaccaccuucgagacaucauggguauuccauacugcaauuacucaaaauacugguacuuaaaucacacuaccacaggaaaaacaucauuacccaaaugcuggcuaguaucuaacggauccuaucuaaaugaaacacacuucucagacgacauagaacaacaagcugauaacaugauaacagaaauguuacaaaaagaauacauggaacgccaaggcaaaacaccacucggauuaguagaucuauucguauucucaacaucauucuaucuaauaucaauauuucuccaccuaguuaaaauccccacacauagacauauaguaggaaaacccugcccaaaaccacaccgacuaaaccacauggguaucugcucaugcggauuauacaaacaaccuggaguaccuguaaaauggaaaagauaaggacuagucccuguucccagagcccacuuuuuuuucuuuuuuugaaauaaaauagccugucuuucagaucuaaaaaaaaaaaaaaaaaaaaaaaaaaaaaaaaaaaaaaaaaaaaaaaaaaaaaaaaaaaaaaaaugcaucccccccccccccccccccccccccccccccaaaggcucuuuucagagccaccagaauu

SEQ ID NO: 2511 - RNA, 1752 nt, Artificial Sequence
  mRNA product Design a-1 comprising derived and/or modified sequence from LASV(Josiah;Clade IV)__NP_694870__GPC (opt11)
gggagagucccgcagucggcguccagcggcucugcuuguucgugugugugucguugcaggccuuauucaagcuuaccaugggccaaauagucaccuucuuccaagaagucccccacguaaucgaagaaguaaugaacaucguccucaucgcacucucaguccucgccguccucaaaggccucuacaacuuugccacaugcggccuagucggacucgucaccuuccuccuccuuugcggccgcuccugcacuaccagccuuuacaaaggcgucuacgaacuccaaacccuugaacucaacauggagacccucaacaugaccaugcccuuauccugcaccaaaaacaacucacaccacuacauaauggucggcaacgaaaccggcuuagaacuaacccucaccaacaccuccauaaucaaccacaaauucugcaaccucagcgacgcccacaagaaaaaccuauacgaccacgcccucaugucaaucauauccaccuuccaccucucuauacccaacuucaaccaauacgaagcaauguccugcgacuucaacggcgguaaaauauccguucaauacaaccugucucacuccuacgccggcgacgccgccaaccacuguggcaccgucgcuaacggcguacuacaaacauucaugcgaauggccuggggcggcagcuacaucgcccucgacucagggagaggaaacugggacugcaucaugaccucuuaccaauaccucaucauacaaaacaccaccugggaagaccacugccaauucagccgaccaucccccaucggcuaccuaggccuacuaucacaacguacccgcgacaucuauauaagccgccgccuacucggcaccuucaccuggacacucuccgacuccgaagguaaagacacccccggaggcuacugccuaacccgcuggaugcuaaucgaagccgaacuuaaaugcuucggcaacaccgcggucgccaaaugcaacgaaaagcacgacgaagaguucugcgacaugcucaggcucuuugacuucaacaaacaagccauccaacgccucaaagcagaagcccaaauguccauccaacucauaaacaaagccgucaaugcccucauuaacgaccaacucauuaugaaaaaccaccuacgagacaucauggguauccccuacugcaacuacagcaaauacugguaccucaaccauacaacuaccggccgcacuagccugcccaagugcuggcucguauccaauggcuccuaccucaacgaaacccacuucuccgacgacauugaacaacaagccgacaacaugaucaccgaaaugcuucaaaaggaauacauggaacggcaaggaaaaacuccccucggccucgucgaccucuucgucuucagcacauccuucuaccucauauccaucuuccuccaccuagucaaaauccccacacacagacacauagucggaaaauccugccccaaaccccacagacucaaccacaugggcaucuguuccugcggucucuacaaacaaccuggcguacccgucaaauggaagcgcuaaggacuagucccuguucccagagcccacuuuuuuuucuuuuuuugaaauaaaauagccugucuuucagaucuaaaaaaaaaaaaaaaaaaaaaaaaaaaaaaaaaaaaaaaaaaaaaaaaaaaaaaaaaaaaaaaaugcaucccccccccccccccccccccccccccccccaaaggcucuuuucagagccaccagaauu

SEQ ID NO: 2512 - RNA, 1749 nt, Artificial Sequence
  mRNA product Design a-1 comprising derived and/or modified sequence from LASV(LP;Clade I)__AAF86701__GPC (opt11)
gggagagucccgcagucggcguccagcggcucugcuuguucgugugugugucguugcaggccuuauucaagcuuaccaugggccaaaucaucaccuucuuccaagaagucccacacgucauagaagaagugaugaacaucguccucauagcccuaucacuccuugccauccucaaaggccucuacaacaucgcaaccugcggcaucaucggccucgucgccuuccucuuucucugcggcaagagcuguucccuaacccuuaaaggagguuacgaacuccaaacacuagagcuaaacauggaaacacuuaacaugaccaugccccuaagcugcaccaaaaacuccucacaccacuacauccgcgucggaaacgaaaccggccucgaacucacucucaccaacacguccaucaucaaccacaaauucugcaaccuaucugacgcccauaagaaaaauuuauacgaccacgcccuaaugagcaucaucucgaccuuccaccuuuccauccccaacuucaaccaauacgaagccauguccugcgacuucaauggcggaaaaauauccguccaauacaaccucucacacagcuacgccggggacgccgccgaacacugcggcaccgucgccaacggcguccuacaaaccuucaugcgcauggccuggggaggccgcuauauagcccucgauuccgguaaaggcaacugggacugcauaaugaccuccuaccaauaccuuaucauacaaaacaccacaugggaagaccacugccaauucucccgcccgagccccauuggauaccucggccuacucucucaacgcacuagagacaucuacaucucccgccgucuccucggcaccuucaccuggacccucuccgacucagaaggcaacgaaacacccggaggcuacugccuuacccgauggaugcucaucgaagcagaacuaaaaugcuucggcaacacugccgucgccaaauguaacgaaaaacacgacgaagaguucugcgacaugcuccgccucuucgacuucaacaaacaagccauccgucgccucaaagcugaagcacaaauguccauacagcucaucaacaaagccgucaacgcacuaaucaacgaccaacucaucaugaaaaaccaccuccgagacaucaugggcauaccauacugcaacuacuccaaauacugguaccugaaccacaccuccucuggccgaaccucccuaccaaagugcuggcucauaucaaacggcuccuaccuuaacgaaacccaauucucagacgacaucgaacaacaagcagacaacaugaucaccgaaaugcugcaaaaagaguacauagaacgccagggcaaaacaccccuuggccuugucgacauauucaucuucucaaccagcuucuaccucaucagcaucuuccuccaucucauaaaaauccccacccaucgucacaucgucggaaaaccaugcccaaaaccccaucgucucaaccacaugggcgucugcuccugcggucucuacaagcaccccggcguacccaccaaauggaagcgcuaaggacuagucccuguucccagagcccacuuuuuuuucuuuuuuugaaauaaaauagccugucuuucagaucuaaaaaaaaaaaaaaaaaaaaaaaaaaaaaaaaaaaaaaaaaaaaaaaaaaaaaaaaaaaaaaaaugcaucccccccccccccccccccccccccccccccaaaggcucuuuucagagccaccagaauu

SEQ ID NO: 2513 - RNA, 1749 nt, Artificial Sequence
  mRNA product Design a-1 comprising derived and/or modified sequence from LASV(803213;Clade II)__AAF86703__GPC (opt11)
gggagagucccgcagucggcguccagcggcucugcuuguucgugugugugucguugcaggccuuauucaagcuuaccaugggccaaaucauaacauucuuccaagaagucccccacgucaucgaagaagucaugaacaucguacucaucgcucucucacuccuagccauccucaaagguaucuacaauguagcgaccugcggccucuucggccucaucucauuccuucuccucugcggccgcuccugcuccgucaccuacaaaggcgucuacgagcuccagacccuagaacuaaacauggccaaccucaauaugaccaugccccucuccugcacuaaaaacaacagccaucacuacaucauggucggaaacgagaccggacucgaacucacacuuacuaacaccuccaucaucaaccacaaauucugcaaccucuccgacgcccacaagaaaaaucucuaugaccacgcccucauguccauuaucucaacguuccaccucuccaucccuaacuucaaccaauacgaagccaugucaugcgacuucaacggcggcaaaauaagcguccaauacaaccuaucccacuccuucgccguagacgccgccaaccacugcggcaccaucgccaacggcguucuccaaacauucaugcgcauggccugggguggcuccuacauugcccucgacucaggcaaaggcaacugggauugcaucaugacauccuaccaauaccucauuauccaaaacacaacuugggaagaccacugccaauucagccgcccaucccccauaggcuaccucggccuccucucccaacgcacacgcgacaucuacaucucccgccgccuacuaggaaccuucaccuggacccucagcgacucggaaggcaacgaagccccaggcggcuacugccucacuagauggaugcucaucgaagccgaacucaaaugcuucggcaacaccgccguggccaaauguaacgaaaaacacgacgaagaguucugcgacaugcuccgccucuucgacuucaacaagcaagccaucaaacgccucaaaaccgaagcgcaaaugucaauccagcucauaaacaaggcagucaacgcccucaucaaugaucaacuuaucaugaaaaaccaccuccgcgacauaaugggcauccccuacuguaacuacucucgcuacugguaccucaaccacacugugacaggcaaaaccucacuaccccgcuguuggcucguauccaacggcuccuaccucaacgaaacccacuucagcgacgacaucgaacaacaggccgacaauaugaucaccgaaaugcuacaaaaggaauacauggaccgacaaggcaaaacaccccuuggccucgucgaccuauucgucuucuccaccucauucuaccucaucuccaucuuccuccaccucgucaaaaucccaacccaccgccacaucgucggcaagcccugccccaaaccccaccgccucaaccauaugggcaucugcucaugcggccucuacaaacaccccggaguaccaguaaaauggaaacgcuaaggacuagucccuguucccagagcccacuuuuuuuucuuuuuuugaaauaaaauagccugucuuucagaucuaaaaaaaaaaaaaaaaaaaaaaaaaaaaaaaaaaaaaaaaaaaaaaaaaaaaaaaaaaaaaaaaugcaucccccccccccccccccccccccccccccccaaaggcucuuuucagagccaccagaauu

SEQ ID NO: 2514 - RNA, 1749 nt, Artificial Sequence
  mRNA product Design a-1 comprising derived and/or modified sequence from LASV(GA391;Clade III)__CAA36645__GPC (opt11)
gggagagucccgcagucggcguccagcggcucugcuuguucgugugugugucguugcaggccuuauucaagcuuaccaugggucaaaucgucaccuucuuccaagaaguaccccacgucaucgaagaagucaugaacauaguccucaucgcccucuccauccucgcgauccucaaaggacuauauaacgucgcaaccugcggccucaucggccucgucaccuuccuccuccucagcggacguuccugcagccucaucuacaaaggcaccuacgaacuccagacucucgaacuuaacauggaaacacucaacaugaccaugccccucuccugcaccaagaacaacucccaccacuacauccgcguaggcaacgaaaccggccuagagcuaacccuaacaaacacaucaauccucaaccacaaauucugcaaccucuccgacgcccacaaacgcaaccuauacgaccacucccucauguccaucaucuccaccuuccaccucucaauccccaacuucaaccaauacgaagccauguccugcgacuuuaacggaggcaagaucaccguacaauacaaccucucccacuccuucgccgucgacgccgccggccacugcggcacccucgccaacggaguacuacaaaccuucaugcgcauggcauggggcggcucauacaucgcgcucgacuccggccgcggcaacugggacuguaucaugacauccuaucaauaccuuauaauccagaacaccaccugggacgaccacugccaauuuucccgccccucacccaucggauaucuaggccuccucucccaacgcacccgagacaucuacaucucccgacgacuccucggcacauucacauggacccucuccgacucagaaggcaacgaaacccccggcggauauugccuaacacgcuggaugcucaucgaagcugaacuuaagugcuuuggcaacaccgcaguagcuaaaugcaacgaaaaacacgacgaagaguucugcgacaugcuccgacucuucgacuucaacaaacaagcaauccgccgguuaaaaacugaagcacaaauguccauccaacucaucaacaaagcaguaaacgcucucaucaacgaucaacucauaaugaaaaaccaccuccgagacauaaugggcauacccuacugcaauuacucaagauacugguaccucaaccacaccucaaccgguaaaaccucccuaccccgcugcuggcuaaucucaaauggcucauaccucaacgaaacuaaauucuccgacgacaucgaacaacaagcagacaacaugauuaccgaaaugcugcaaaaagaauacaucgaccgacaaggcaagacccccuuaggccuugucgaccucuucgucuucuccaccucauucuaccucaucucaaucuuccuccaccucgucaaaaucccaacccaccgccacaucgucggcaaacccugccccaaaccccaccggcucaaucacaugggcaucugcagcugcggacucuacaaacaacccggcgucccaguccgcuggaaacgcuaaggacuagucccuguucccagagcccacuuuuuuuucuuuuuuugaaauaaaauagccugucuuucagaucuaaaaaaaaaaaaaaaaaaaaaaaaaaaaaaaaaaaaaaaaaaaaaaaaaaaaaaaaaaaaaaaaugcaucccccccccccccccccccccccccccccccaaaggcucuuuucagagccaccagaauu

SEQ ID NO: 2515 - RNA, 1752 nt, Artificial Sequence
  mRNA product Design a-1 comprising derived and/or modified sequence from LASV(AV;Clade V)__CCA30314__GPC (opt11)
gggagagucccgcagucggcguccagcggcucugcuuguucgugugugugucguugcaggccuuauucaagcuuaccaugggacagaucguaacauucuuccaagaagucccccacguaaucgaagaagucaugaacaucguacuuaucgcccucuccauccucgccguccucaaaggccuauacaacaucgccacaugcggccuaaucggacuuauaaccuuccuccuccuuugcggccguucaugcucaagcaaccuuuacaaaggagucuacgaacuacaaagucucgaccucaacauggaaacacucaacaugaccaugccccucagcugcaccaaaaacaacucccaccacuacauccgcgucggcaacgacacaggacucgaacucacucucacaaacaccaguauccucaaccacaaguucugcaaccucuccgacgcccacaagaaagaccucuacgaccacgcacugauguccauaauuuccacuuuccaccuuuccauucccaacuucaaccaauacgaagccaugucaugcgacuuuaacggcggaaaaaucagcguacaauacaaccucucucacuccuaugccaucgacgcugcaaaccacugcggcaccgucgcaaacggcauccuccaaaccuucaugagaauggccuggggcggcucuuacaucgcccuagauucaggccgcggcaacugggacuguaucaugacauccuaccaauaccucaucauacaaaacaccaccugggaaaaccacugccaauuuucccgccccagcccaaucgguuaccucggccuccucucucaacggacccgcgacaucuacaucucccggcgacuauuagggacguucaccuggacccucucagacagcgaaggcaacgccacccccggcggauacugccuaacucgcuggaugcuuauagaagccgaacuuaaaugcuucggcaacacugcaguugccaaaugcaacgaaaaacacgacgaggaguucugcgacaugcuccgccucuucgacuucaacaagcaagccaucagccgccuuaaauccgaagcccaaauguccauucagcucaucaacaaagcuguaaacgcccucauaaacgaccaacucaucaugaaaaaucaccuccgcgacauaaugggcauacccuacugcaacuacuccaaauacugguaccuaaaucacaccaucaccggcaaaaccucucuccccaaaugcuggcucgucuccaacggcucauaccucaacgaaacccacuucucggacgacaucgaacaacaagccgacaacaugaucaccgaaaugcuccaaaaagaauacauggaacgccaaggcaaaacaccacuaggccuagucgaccuauucgucuucucgacuuccuucuaccuaauauccaucuuccuucgacucguaaaaauccccacacacagacacauugucggcaagcccugccccaaaccccaccgccuaaaccacaugggcaucugcucaugcggccucuacaaacaacccggcgucccaguccgcuggaaacgcuaaggacuagucccuguucccagagcccacuuuuuuuucuuuuuuugaaauaaaauagccugucuuucagaucuaaaaaaaaaaaaaaaaaaaaaaaaaaaaaaaaaaaaaaaaaaaaaaaaaaaaaaaaaaaaaaaaugcaucccccccccccccccccccccccccccccccaaaggcucuuuucagagccaccagaauu

SEQ ID NO: 2516 - RNA, 1749 nt, Artificial Sequence
  mRNA product Design a-1 comprising derived and/or modified sequence from LASV(Togo/2016/7082;Clade VI)__AMR44577__GPC (opt11)
gggagagucccgcagucggcguccagcggcucugcuuguucgugugugugucguugcaggccuuauucaagcuuaccaugggacaaaucaucaccuuuuuccaagaagucccccacguuaucgaagaagucaugaacauaguccucaucgcacuuucacuccucgccauacucaaaggcguauacaacgucgcaaccugcggaauaaucggccuggucaccuuccuguuccuaugcggacgauccugcucccuaaucuacaagggguccuacgaacuacaaacccuagaacucaacauggaaacacuuaacaugacaaugccacucucaugcaccaaaaacucaucccaccacuacaucagaguuggcaacgaaacaggccucgagcuaacccucaccaauacaucaaucaucaaccacaaauucugcaaccucuccgacgcccacaaacgaaaccucuaugaccacgcacucauguccauccuuagcaccuuccaccuuagcauccccaacuucaaccaauacgaggccaugagcugcgacuucaacggaggaaaaaucuccguccaauacaaccuaucccacgccuacgccgucgacgcagccgaacacugcgguaccgucgcgaacggcguccuccaaaccuucaugcgcauggccuggggcggcagcuacaucgcccucgacagcggccgcgggaacugggacugcaucaugaccucauaucaauaccuaauuauccaaaacaccaccugggaggaucacugccaauucucccgcccauccccaaucggcuaccuuggccuccucucccaacgcacccgugacaucuacaucucccgcagacuacucgguaccuucacauggacccucuccgacuccgaaggcaacgaaaccccaggcggcuacugccugacacgcuggaugcucaucgaagccgagcucaaaugcuucggcaacaccgccgucgccaagugcaaugaaaaacacgacgaagaguucugcgacaugcuucgccucuucgacuuuaacaaacaggccauccaacgccuaaaaagugaagcccaaaugagcauccaguuaaucaacaaagccgucaaugccuuaaucaacgaccaacucaucaugaaaaaccaucuccgcgacaugaugggcauaccuuacugcaacuauuccaaauacugguaccuaaaccacacuuccucgggccgaacaagccucccaaaauguuggcucgucuccaacggaucauaccucaacgaaacccacuucuccgacgacaucgaacaacaagccgacaauaugauuaccgaaauguuacaaaaggaauacaucgaccgccaaggcaaaacaccccuaggccucgucgaccuuuucguauucucgacgucauucuaccuaaucaguaucuuccuccaccucaucaaaauccccacccaccgucacaucgucggcaaaccgugccccaaaccccaccgccugaaccacaugggaaucugcucuuguggccuauacaaacaacccggaguacccaccagguggaaacgguaaggacuagucccuguucccagagcccacuuuuuuuucuuuuuuugaaauaaaauagccugucuuucagaucuaaaaaaaaaaaaaaaaaaaaaaaaaaaaaaaaaaaaaaaaaaaaaaaaaaaaaaaaaaaaaaaaugcaucccccccccccccccccccccccccccccccaaaggcucuuuucagagccaccagaauu

SEQ ID NO: 2517 - RNA, 1749 nt, Artificial Sequence
  mRNA product Design a-1 comprising derived and/or modified sequence from LASV(KAK-428;Clade n.d. (VII))__ANH09740__GPC (opt11)
gggagagucccgcagucggcguccagcggcucugcuuguucgugugugugucguugcaggccuuauucaagcuuaccaugggccaaaucgucaccuucuuccaagaagucccccacgucaucgaagaagucaugaacauaguccuaauagcccucucccuccuagccauccucaagggacuauauaacuucgccacaugcggcgucaucggccuuauaacuuuccuccuacucugcggccgcuccugcucugccaccuacaaaggccaauacgagcuucaaacucuugaacucaacauggaaucacuaaacaugaccaugccccuauccugcaccaaaaauaacucacaccacuacauccgcgccgggaacaacacaggccuagaacucacgcucaccaacaccuccaucaucucacauaaauucugcaaccuauccgacgcccacaagaaaaaccucuaugaccacacacucauguccaucauaacaaccuuccaccucuccaucccuaacuucaaccaguacgaagccaugagcugcgacuucaacggcggcaaaauauccauccaauacaaucugucccacuccuacgccggcgacgcagcccagcacugcggcaccgucgccaacggcguccuccagaccuucaugcguauggcauggggaggcuccuaccucgccuuagacagcggacgacguggaugggacugcauaaucuccuccuaccaauacuuaauaauccaaaacaccaccugggacgaucacugccaauucucacgccccucccccaucggcuaccucggauucgucucacagaaaacccgagacaucuacaucuccagacgccuacucggaacguucaccuggacacucagcgacuccgagggccacgacaugcccggcggauacugccucacccgcuggaugcucaucgaagccgaccugaaaugcuucggcaacacagccgucgccaaaugcaacgaaaaacacgacgaagaguucugcgacauguggcgacucuucgacuucaacaaacaagcaauccaaagacucaaagccgaagcccaaaugaacauccaacuaaucaacaaggccgucaacgcccugauaaacgaccaacucaugaugaaaaaccaccucagagacaucaugggcaucccauacugcaacuacuccaaauucugguaccucaacaacaccacaaccggccgcaccucccuaccgcgcugcuggcuaaucucaaaugguuccuaccucaacgaaacccauuuuagcgacgacaucgaacaacaagccgacaacaugaucaccgaaaugcugcaaaaggaauacauggaccgccaaggaaaaacaccccucggccucguagaccucuucgucuucuccaccagcuucuaccuaaucacaaucuuccuccaucuggucaaaauaccgacucacagacacaucgucggaaaacccugccccaaaccccaccgacucaaccacauggguaucugcuccugcggccucuacaaacaacccggagucccaguucgauggaaacgcuaaggacuagucccuguucccagagcccacuuuuuuuucuuuuuuugaaauaaaauagccugucuuucagaucuaaaaaaaaaaaaaaaaaaaaaaaaaaaaaaaaaaaaaaaaaaaaaaaaaaaaaaaaaaaaaaaaugcaucccccccccccccccccccccccccccccccaaaggcucuuuucagagccaccagaauu

SEQ ID NO: 2518 - RNA, 1749 nt, Artificial Sequence
  mRNA product Design a-1 comprising derived and/or modified sequence from LASV(Pinneo-NIG-1969;Clade I)__AIT17836__GPC (opt11)
gggagagucccgcagucggcguccagcggcucugcuuguucgugugugugucguugcaggccuuauucaagcuuaccaugggccaaaucauaacuuucuuucaagaagucccacacgucaucgaagaagucaugaacauaguccucaucgcccuaucccuccuagcaauccuaaaaggccuauacaauaucgcaaccuguggcaucaucggccuugucgccuuccucuuccucugcggcaaauccuguucccuuacccuaaagggcggcuacgagcuccaaacccucgaacucaacauggaaacccucaacaugacuaugccccucuccugcaccaagaacuccucccaccacuacauccgcguuggcaaugaaaccggacucgaacugacccuaaccaacaccucaaucaucaaccacaaauuuugcaaccuuuccgacgcacacaagaaaaaccucuacgaccacgcccucaugagcaucaucucaaccuuccaccucucaauccccaacuucaaucaauacgaagccauguccugcgacuucaacggcggaaaaaucagcguccaguacaaccugucacacagcuacgccggcgacgccgccgaacacugcggaacagucgcuaacggagucuuacaaacauucaugcgcauggcauggggcggccgguacaucgcccucgacuccggcaaaggcaacugggacugcaucaugaccuccuaccaauaccucauaauccaaaacaccaccugggaagaccacugccaauucucccgcccuucccccaucggcuaccuaggccuccuaagccaacgaacccgagacaucuacaucucaagacgccuccucggcacuuucaccuggacccucuccgacucagagggaaacgaaacccccggaggcuacugccuuacccgcuggauguuaaucgaagccgaacucaaaugcuucggcaacaccgccguagccaaaugcaacgaaaaacacgacgaagaguucugcgacaugcuacgccucuucgacuucaacaaacaagccauacgccgacucaaagcagaagcccaaauguccauccaauuaaucaacaaggccgucaacgcccuaauaaacgaccagcuaauaaugaaaaaccaccuccgcgacaucauggguauccccuacugcaacuacuccaaauacugguaccuaaaccacaccucauccggccgaacaucccuccccaaaugcuggcucaucuccaacggcuccuaccucaacgaaacacaauucuccgacgacaucgaacaacaagccgacaacaugaucacugagaugcuacaaaaagaauacaucgaacgacaaggcaaaacaccccuaggacucgucgauaucuucauauucucaaccucuuucuaccucaucucuaucuuccuucaccucaucaaaauccccacucaccggcacauagucggcaaacccugccccaaaccacaccgccuaaaccacaugggugucugcuccugcggccucuacaaacaccccggcguccccacaaaauggaaacgauaaggacuagucccuguucccagagcccacuuuuuuuucuuuuuuugaaauaaaauagccugucuuucagaucuaaaaaaaaaaaaaaaaaaaaaaaaaaaaaaaaaaaaaaaaaaaaaaaaaaaaaaaaaaaaaaaaugcaucccccccccccccccccccccccccccccccaaaggcucuuuucagagccaccagaauu

SEQ ID NO: 2519 - RNA, 1749 nt, Artificial Sequence
  mRNA product Design a-1 comprising derived and/or modified sequence from LASV(ISTH0009-NIG-2011;Clade II)__AIT17404__GPC (opt11)
gggagagucccgcagucggcguccagcggcucugcuuguucgugugugugucguugcaggccuuauucaagcuuaccaugggccaaaucaucaccuuuuuccaagaagucccccacgucaucgaagaagucaugaacaucguccuaaucgcacucucccuacucgccauccucaaaggaaucuacaacguugcuacaugcggacucuucggccucgucuccuuccuccuccucugcggccgcucaugcuccaccaccuacaaaggcgucuacgaacuccaaacacucgaacucgacauggccucccuaaacaugaccaugccccucuccugcaccaaaaacaacucccaccacuacaucaugguaggcaacgaaaccggccuagaacucacccucacaaacacaucaaucaucaaccacaaauucugcaaucucuccgacgcacacaagaaaaaccucuacgaccacgcccucaugucuaucaucuccacauuccaccucucaauccccaacuucaaccaauacgaagcaauguccugcgacuucaacggaggcaaaaucucggugcaauacaaccucucgcacgccuacgcuguagacgccgccaaccacugcggcacuaucgccaacggcguccuacagaccuucaugcgcauggccuggggcggcuccuacaucgcccucgacucgggcaaaggcuccugggacugcaucaugacguccuaccaauaccucaucauccaaaacacaaccugggaagaccacugccaauucucccgacccagccccaucggguaccucggccuucuaucacaacggacccgagauauauacaucucccgcagacuacucggcacuuucaccuggacacucucagacuccgaaggcaacgaaacccccggcggcuacugccucacacguuggaugcuuauagaagccgaacucaaaugcuucggcaacaccgccgucgccaaaugcaacgaaaaacacgacgaagaauuuugcgacaugcucagacucuucgacuucaacaaacaagccauaagacgcuuaaaaacagaagcacaaaugucuauacaacucaucaacaaagccgucaaugcacuaaucaacgaccagcuaaucaugaaaaaccaccuccgcgacaucaugggcauccccuacugcaacuacuccaaauacugguacuugaaccacaccgucaccggcaaaaccucccucccgcgcugcuggcuagucagcaacggcagcuaccucaacgaaacccacuucucugacgacauagaacaacaagccgacaacaugaucaccgaacuccugcaaaaagaauacauggaccgccaaggaaagacuccccucggccucguggaccuauucgucuucucaaccucauucuaccuuaucagcaucuuccuccaccuuaucaaaauaccuacacaccgccacaucacaggcaaaccaugccccaagccccaccgauuaaaccauaugggcauaugcuccugcggccucuacaaacaccccggaguaccagucaaauggaaacgaugaggacuagucccuguucccagagcccacuuuuuuuucuuuuuuugaaauaaaauagccugucuuucagaucuaaaaaaaaaaaaaaaaaaaaaaaaaaaaaaaaaaaaaaaaaaaaaaaaaaaaaaaaaaaaaaaaugcaucccccccccccccccccccccccccccccccaaaggcucuuuucagagccaccagaauu

SEQ ID NO: 2520 - RNA, 1749 nt, Artificial Sequence
  mRNA product Design a-1 comprising derived and/or modified sequence from LASV(ISTH2010-NIG-2012;Clade II)__AIT17482__GPC (opt11)
gggagagucccgcagucggcguccagcggcucugcuuguucgugugugugucguugcaggccuuauucaagcuuaccaugggccaaaucaucaccuucuuccaagaagucccacacgucauagaagaaguaaugaacaucguccuaauugcucucucacuacucgcgauccucaaagguaucuacaacgucgcaaccugcggacuguuuggacucguaucauuccuccuccugugcggccgcagcugcucaaccacauacaaaggcguauacgaacuacaaacccucgaacucgacauggccagccucaacaugacaaugccccucagcugcaccaaaaauaacagccaccacuacaucauggucggcaacgaaaccggccuugaacucacccucacaaacaccucaaucauaaaccacaaauucugcaaccucagcgacgcccacaagaaaaaccuauacgaccaugcacuaauguccaucauaagcaccuuccaccucuccauacccaacuucaaccaguacgaggccaugucaugcgauuucaacggaggcaaaaucuccguccaauacaaccuaagccacgccuacgcagucgacgccgccaaccacugcggcaccauagcaaacggcguccuucaaaccuucaugcgaauggccuggggcggcucauacaucgcccuagacucaggcaaaggcuccugggacugcauaaugacaucauaccaauaucucaucauccaaaacauaacaugggaagaccacugccaauucucccguccaucgccaaucggauaccucggccuccuaucacaacgaacucgcgacaucuacauaucccgccgucuccuaggaacauucaccuggacacucagcgacuccgaaggaaacgaaacccccggcggcuacugccucacgcgcuggaugcugaucgaagcagaacucaaaugcuucggcaacacugccgucgccaaaugcaacgaaaaacacgacgaagaguucugcgacaugcuacgacucuucgacuucaacaaacaagccauccgucgccucaaaaccgaagcccaaaugucgauccaacucaucaacaaggcaguaaacgcccuaaucaacgaccaacucauaaugaagaaccaccuacgcgauaucaugggcauacccuacugcaacuacuccaaguacugguaccucaaccacaccgucacaggcaaaaccucccucccccgaugcuggcuagucuccaacggcucuuaucuaaacgaaacccacuucuccgacgacauagaacaacaagccgauaacaugauuaccgaacuccuacaaaaagaauacaucgaccgccaaggcaagaccccacucggacucgucgaccuauucgucuucucaaccucguucuaccucauuucuauauuccuccaccuaguaaaaauccccacacaccgccaugucgucggcaaacccugccccaaaccccaccgccuaaaccacaugggaauaugcagcugcggccucuacaaacaccccggcguacccgugaaauggaaacgauagggacuagucccuguucccagagcccacuuuuuuuucuuuuuuugaaauaaaauagccugucuuucagaucuaaaaaaaaaaaaaaaaaaaaaaaaaaaaaaaaaaaaaaaaaaaaaaaaaaaaaaaaaaaaaaaaugcaucccccccccccccccccccccccccccccccaaaggcucuuuucagagccaccagaauu

SEQ ID NO: 2521 - RNA, 1749 nt, Artificial Sequence
  mRNA product Design a-1 comprising derived and/or modified sequence from LASV(Lassa virus/H.sapiens-wt/NGA/2015/ISTH_0543;Clade II)__AVO03639__GPC (opt11)
gggagagucccgcagucggcguccagcggcucugcuuguucgugugugugucguugcaggccuuauucaagcuuaccaugggccagauuaucacauucuuccaagaagucccccacgucaucgaagaagucaugaacauaguacuaaucgcccugucacuccucgcaauccuaaaagguaucuacaacguugcuaccugcggacucuucggccucguuucauuccuccuccucuguggccgauccugcuccacaacuuauaaaggcgucuacgaacuccaaacacucgaacuugacauggccaaccucaacaugaccaugccacucucaugcaccaaaaacaacucccaccacuacauuauggucggcaacgaaaccggccucgaacuaacucucaccaacacaucaauaaucaaccacaaauucugcaaccuaagcgacgcccacaagaaaaaccuauacgaccacgcccuaauguccaucauaagcaccuuccaccucuccauuccaaacuuuaaccaauacgaagcaauguccugcgacuucaacggaggcaaaaucucaguccaauauaaccucucccacaccuacgccgucgacgcggccaaccacugugguaccaucgccaacggaguccuccaaaccuucaugcgcauggcuuggggcggaagcuacaucgcccuagacuccggcaaaggaucaugggacugcaucaugaccuccuaucaguaucucguaauacaaaacacaacuugggaagaccacugucaauucucccgcccaucgcccaucggcuaccucggccuucuaucccaacgaacaagagacaucuacaucucucgccgacuucuuggcaccuucacauggacccucucagacucagaaggcaacgaaaccccugguggcuacugccucacccgcuggauguugaucgaagccgaacuaaaaugcuucggcaacacagccguugccaaaugcaacgagaaacacgacgaagaguucugcgacaugcuccgccuauucgacuucaacaaacaagccauccgccgccucaaaaccgaagcccagauguccauccagcucaucaacaaagccguaaacgcucuaauaaacgaccaacucaucaugaaaaaccaccuacgcgacaucaugggcauccccuacugcaacuacuccaaauacugguaccuaaaccacaccgucaccgguaaaaccucucuaccacgcugcuggcucgucuccaacggaucauaccucaacgaaacccacuucucagaugacaucgaacaacaagccgacaacaugauaaccgaacuccuacagaaagaauacaucgaucgacagggcaaaacaccccucggccucgucgaccucuucguuuucucaaccuccuucuaccuaaucuccauauuccuccaccucgucaaaauccccacccaucgacacaucaccggcaaaccaugcccaaaaccccaccgacucaaccacaugggcaucugcuccugcgguuuauacaaacacccuggcguccccgucaaauggaaacgguaaggacuagucccuguucccagagcccacuuuuuuuucuuuuuuugaaauaaaauagccugucuuucagaucuaaaaaaaaaaaaaaaaaaaaaaaaaaaaaaaaaaaaaaaaaaaaaaaaaaaaaaaaaaaaaaaaugcaucccccccccccccccccccccccccccccccaaaggcucuuuucagagccaccagaauu

SEQ ID NO: 2522 - RNA, 1749 nt, Artificial Sequence
  mRNA product Design a-1 comprising derived and/or modified sequence from LASV(Lassa virus/H.sapiens-wt/NGA/2016/ISTH_0009;Clade II)__AVO03571__GPC (opt11)
gggagagucccgcagucggcguccagcggcucugcuuguucgugugugugucguugcaggccuuauucaagcuuaccaugggccaaaucaucaccuucuuccaagaagucccccacgucauugaagaaguaaugaacauaguccucaucgcccucucacuacuagcuauccuaaagggaaucuacaacgucgccaccuguggccuccucggccucguaucguuccuccuucuuuguggacgauccugcuccaccaccuacaaagguguauacgaacuccaaacccucgaguuagacauggccagccuaaacaugaccaugccccucuccugcaccaaaaauaauucccaccacuacaucauggucggcaacgaaaccggccucgaacucacacucacuaacacauccaucaucaaccacaaauucugcaacuuaucagaugcccacaagaaaaaccucuacgaccacgcacuaaugucaaucaucucaaccuuccaccucagcauccccaacuucaaccaguacgaggcaaugucuugcgacuucaacggcggacgcaucuccguccaauacaaccucucccacagcuaugccgucgacgccgccaaccacugcggcacgaucgccaacggcguccuacaaaccuucaugcgaauggccuggggcgguuccuauaucgcccucgacuccggcaaaggaagcugggacugcaucaugaccucauaccaauaccucauaauccaaaacaccacaugggaagaucacugccaauucucccguccaucccccaucggcuaccucggccuccucucacaacgcacacgcgacaucuacaucucaagacgccuacucggcaccuucacuuggacccucucagacuccgaaggcaacgaaacccccggaggcuacugccuuacccgcuggaugcuaaucgaagccgaacucaaaugcuucggcaacaccgccguagcaaaaugcaacgaaaaacacgacgaagaguucugcgacaugcuccgacuuuucgacuucaacaaacaggccauccgccgccucaaaaccgaagcacaaauguccauccaacucaucaacaaagcaguaaacgcccuuauaaacgaucaacuaaucaugaaaaaccaccuccgcgacaucaugggcauccccuacugcaacuacuccaaauacugguaccuaaaccacaccguaaccggaaaaaccagccuccccagaugcuggcuagucagcaacggaucauaccuuaacgaaacccacuucuccgaugacaucgaacaacaagccgacaacaugaucaccgaacuucuacagaaagaauacaucgaccgccaaggcaaaacgccccucggccuugucgaccucuucgucuucuccaccuccuucuaccucaucagcauauuccuacaccuugucaaaaucccaacccaccgucacaucaccggcaaacccugcccaaaaccccaccgacuaaaccacaugggcaucugcuccugcggccucuacaaccacccaggcguccccgucaaauggaaacguuagggacuagucccuguucccagagcccacuuuuuuuucuuuuuuugaaauaaaauagccugucuuucagaucuaaaaaaaaaaaaaaaaaaaaaaaaaaaaaaaaaaaaaaaaaaaaaaaaaaaaaaaaaaaaaaaaugcaucccccccccccccccccccccccccccccccaaaggcucuuuucagagccaccagaauu

SEQ ID NO: 2523 - RNA, 1749 nt, Artificial Sequence
  mRNA product Design a-1 comprising derived and/or modified sequence from LASV(Lassa virus/H.sapiens-wt/NGA/2016/ISTH_0017;Clade II)__AVO03567__GPC (opt11)
gggagagucccgcagucggcguccagcggcucugcuuguucgugugugugucguugcaggccuuauucaagcuuaccaugggccaaauaaucacauuuuuccaagaagucccccacgucaucgaagaagucaugaauaucguccuuaucgcccucagccuccuugcaauccugaaaggcaucuacaacgucgccacaugcggccucuucggccuagucuccuucuuacuccuaugcggacgcuccugcucgacaaccuacaaaggcgucuacgaacuccaaacacuggaacucgacauggccucccuuaacaugaccaugccccuauccugcaccaaaaacaacagccaccauuacauaaugguaggaaacgaaaccggccucgaacuaacacucaccaacaccuccauaauaaaucacaaauucugcaaccucucagacgcccacaagaaaaaccuuuacgaccaugcacucauguccaucauaucaaccuuccaccucuccauacccaauuucaaccaauacgaagccaugucaugcgacuucaauggcggcaaaaucuccguccaguacaaccuuucccacacuuacgccaucgacgccgccaaccacugcggcaccauagccaacggcguacuccaaacauucaugcgcauggcgugggguggcuccuacaucgcacucgacucaggcaaaggaucaugggacugcauaaugaccucauaccaauaccucaucauccaaaacacaaccugggaagaccacugccaauucagccggccaucucccaucggcuaccucggccuacuaagccaacgcacgcgcgacaucuacaucucccgccgccuucuaggcaccuucaccuggacccucucagacuccgaagggaacgaaacgcccggcggauacugccucacccgcuggaugcucaucgaagccgaacucaaaugcuucggcaacacagcagucgccaaaugcaacgaaaaacacgacgaagaguucugcgacaugcuccgccuauucgacuucaacaaacaagcaauacgccgacuuaaaaccgaagcacaaaugucaauccaacuaaucaacaaagcagucaacgcucuaauuaacgaccaacuuaucaugaaaaaccaccuccgagacaucaugggcaucccauacugcaacuacucaaaauacugguaccucaaucacaccgucacgggcaaaaccucccucccacgcugcuggcuagucuccaacggcucauaccucaacgaaacgcacuuuucagaugacaucgaacaacaagcugacaauaugaucaccgaacuccuacaaaaagaauacauggaccgccaaggaaaaacaccccucggacucgucgaucucuucguauucuccaccucauucuaccuaaucuccauauuccuccaccuaguacgaauccccacccaccgccacgucauaggcaaacccugccccaaaccccaccgccuaaaccacaugggcauaugcuccugcggccucuacaaacacccuggcguccccgucaaauggaagcgcugaggacuagucccuguucccagagcccacuuuuuuuucuuuuuuugaaauaaaauagccugucuuucagaucuaaaaaaaaaaaaaaaaaaaaaaaaaaaaaaaaaaaaaaaaaaaaaaaaaaaaaaaaaaaaaaaaugcaucccccccccccccccccccccccccccccccaaaggcucuuuucagagccaccagaauu

SEQ ID NO: 2524 - RNA, 1749 nt, Artificial Sequence
  mRNA product Design a-1 comprising derived and/or modified sequence from LASV(Lassa virus/H.sapiens-wt/NGA/2018/ISTH_0959;Clade II)__AVV65099__GPC (opt11)
gggagagucccgcagucggcguccagcggcucugcuuguucgugugugugucguugcaggccuuauucaagcuuaccaugggacaaaucaucaccuucuuccaagaagucccacacguuauagaagaagucaugaacaucguacucaucgcacuuucacuacuugccauccucaaaggaaucuauaacgugguaaccugcggccuauucggccucgucuccuuccuccuccucugcggccgcuccugcuccaccaccuacaaaggagucuacgaacuccaaacccucgagcuugacauggccucacuaaauaugacaaugccacuuucaugcacuaagaacaacucacaccacuacauaauggucggcaacgaaaccggccucgaacugacccucacaaacaccucuaucauaaaccauaaauucugcaaucucuccgacgcacacaagaagaaccucuacgaccacgcucucaugucaauaauauccaccuuccaccucuccauacccaacuucaaccaauacgaagcaauguccugcgacuucaacggcggaaaaaucuccguccaauacaaccuaucccacgccuaugccaucgacgccgccaaucacugcggaacaaucgccaauggaguccuccaaacauucaugcgcauggccuggggcggauccuacaucgcacucgacucaggcaaaggcucaugggacugcauaaugacauccuaccaauaccucaucauccaaaacaccaccugggaagaccacugccaauucucccgccccucgccaaucggcuaccucggacuccucucccagcgcacucgcgacaucuacaucucacgccgccugcuaggcacauucaccuggacccuauccgacuccgaagguaacgaaacccccggcggguauugccuaacucgcuggaugcuaauagaagccgaacuaaaaugcuucgguaacaccgccgucgccaaaugcaacgaaaaacacgacgaagaguucugcgacaugcuccgacucuucgacuucaacaaacaagccauccgccgacuaaagacagaagcacaaaugucaauccagcugaucaacaaagccgugaacgcccuaaucaacgaccaacucaucaugaaaaaccaccuccgagacaucaugggcaucccguacugcaacuacuccaaauacugguaccuuaaccacaccgucacuggaaaaaccucacucccccguugcuggcucguuuccaacggaagcuaucuaaacgaaacccacuucuccgacgacaucgaacaacaagcagacaauaugaucacugaacuccuccaaaaagaauacauagaccgccaaggcaaaaccccacucggccuagucgaccuauucgucuucucuaccuccuucuaucucaucucuaucuuccuccaccuaguuaaaauccccacacaucgacacgucaucggaaaaccaugcccaaaaccccaucgccugaaccauaugggcaucugcucauguggccuauacaaacaccccggcguccccguaaaauggaaacgcuaaggacuagucccuguucccagagcccacuuuuuuuucuuuuuuugaaauaaaauagccugucuuucagaucuaaaaaaaaaaaaaaaaaaaaaaaaaaaaaaaaaaaaaaaaaaaaaaaaaaaaaaaaaaaaaaaaugcaucccccccccccccccccccccccccccccccaaaggcucuuuucagagccaccagaauu

SEQ ID NO: 2525 - RNA, 1749 nt, Artificial Sequence
  mRNA product Design a-1 comprising derived and/or modified sequence from LASV(LASV003-NIG-2008;Clade II)__AIT17580__GPC (opt11)
gggagagucccgcagucggcguccagcggcucugcuuguucgugugugugucguugcaggccuuauucaagcuuaccaugggacaaaucauaaccuuuuuccaagaagucccgcacguaaucgaagaagucaugaacauuguccucaucgcccucucacuccuugccauuuuaaaaggcaucuacaacgucgcaaccugcggacuauucggacucgucucuuuccuccuccuaugcggccgcuccugcuccaccaccuacaaaggagucuacgagcuucaaacccucgaacucgacauggccucacucaacaugacaaugccccucagcugcacuaaaaacaacucacaccacuacauaaugguuggaaacgaaaccggccucgaacucacccuaacaaacaccuccauuaucaaccauaaauucugcaaccucuccgacgcccacaaaaagaaccucuacgaccacgcccugaugucuaucaucuccacauuccaccucucaauccccaacuucaaccaauacgaggccauguccugcgacuucaaugguggcaaaaucuccguacaauacaaccucucccacaccuacgcagucgacgccgcaaaccacugcggcaccaucgccaacggaguacuucaaaccuucaugcgaauggccuggggcggcuccuacaucgcccucgacuccggaaaaggcagcugggacugcaucaugaccucauaccaauaccuaaucauccaaaacaccaccugggaagaccacugccaauucagccgcccaucccccaucggcuaccucggccuccucucccaacgcacacgcgacaucuacaucucccgccgccuacucggcaccuucacuuggacccuaucugacagcgaauccaacgaaacuccaggaggcuacugccuaacucgcuggaugcucaucgaagcagaacucaaaugcuucggcaacacugccguagcaaaaugcaacgaaaaacacgacgaagaguucugcgacaugcuccgccuauucgacuucaacaagcaggccauccgccgccucaaagccgaagcucaaauguccauccaacuaaucaacaaagccgucaacgcccucaucaacgaccaacucaucaugaaaaaccaccuccgcgacaucaugggcauccccuacugcaacuacucuaaauacugguaccucaaccacaccguaaccggccgcacaucccucccacgcugcuggcucgucagcaacggauccuaccuaaacgaaacccacuucucagacgacauugaacaacaagcagacaacaugaucaccgaacuccuccaaaaagaauacauggaccgccaagguaaaaccccacucggccuaguggaccuauucgucuucuccaccucauucuaccugauauccaucuuccuccaccucgucaaaauccccacacaccgccacgucaucggcaaacccugccccaaaccccaccgccuaaaccacaugggaauaugcucuugcggccucuacaaacacccaggaguccccguaaaauggaaacgauaaggacuagucccuguucccagagcccacuuuuuuuucuuuuuuugaaauaaaauagccugucuuucagaucuaaaaaaaaaaaaaaaaaaaaaaaaaaaaaaaaaaaaaaaaaaaaaaaaaaaaaaaaaaaaaaaaugcaucccccccccccccccccccccccccccccccaaaggcucuuuucagagccaccagaauu

SEQ ID NO: 2526 - RNA, 1749 nt, Artificial Sequence
  mRNA product Design a-1 comprising derived and/or modified sequence from LASV(LASV035-NIG-2009;Clade II)__AIT17588__GPC (opt11)
gggagagucccgcagucggcguccagcggcucugcuuguucgugugugugucguugcaggccuuauucaagcuuaccaugggccaaaucaucaccuucuuccaggaagucccccacgucaucgaagaaguaaugaacauaguccuaaucgcccuaucccuccucgccauucuaaaaggcaucuacaacgucgcaaccugcggacucuucggacucgucuccuuccuucucuuaugcggccgaucaugcuccaccacuuauaaagggguuuacgaacuccaaacccucgaacucgacauggccucccucaacaugaccaugccccuauccugcaccaaaaacaauucacaccacuacaucaugguaggcaacgaaacaggccucgaacucacccucacaaacaccuccaucauaaaccacaaauucugcaaccugucagacgcacacaagaaaaaccuauaugaccacgcacucauguccaucaucuccaccuuccaccucagcaucccaaacuucaaccaauacgaagccaugucaugcgacuucaacggcggcaaaaucuccguacaauacaaccucucccacgccuacgccgucgacgcagcaaaccacugcggaaccaucgccaauggcguccuacaaacauucaugcguauggccuggggcgguuccuacauagcacucgacuccggaaaaggauccugggacugcaucaugaccuccuaccaauaucucaucauccaaaacaccaccugggaagaccacugccaauucucacgcccuucucccauaggcuaccucggccuacuaucgcaacgaacacgcgacaucuacauuucccgacgacuacucggcaccuucacauggacccuuucagauucugaaggcaacgaaaccccaggcggauacugccuaacccgcuggaugcuaaucgaagccgaacuuaaaugcuucggcaauacagccguagccaaaugcaacgaaaaacacgacgaagaguucugcgacaugcuccgccucuucgacuucaacaaacaagcaauccgccgccucaaagccgaagcccaaauguccauccaacucaucaacaaagccgucaacgcccucaucaacgaccaacuuauaaugaaaaaucaccuccgcgacaucaugggaauaccauacuguaacuacuccaaauacugguaccucaaccacacagucaccggcaaaacaucacucccucgcugcugguuagucuccaauggauccuaccucaacgaaacccacuucuccgacgacaucgaacaacaagcagacaacaugaucaccgaacuccugcaaaaagaauacaucgaccgccaaggcaaaacaccacucggccuugucgaccuauucguauucucaaccuccuucuaccugaucuccaucuuccuccaccucguaaaaauaccaacccaccgccacgucauagggaaacccugccccaaaccccaccgccugaaccacaugggaauaugcucaugcggccucuacaaacacccgggcguacccgucaaguggaaacgcuaaggacuagucccuguucccagagcccacuuuuuuuucuuuuuuugaaauaaaauagccugucuuucagaucuaaaaaaaaaaaaaaaaaaaaaaaaaaaaaaaaaaaaaaaaaaaaaaaaaaaaaaaaaaaaaaaaugcaucccccccccccccccccccccccccccccccaaaggcucuuuucagagccaccagaauu

SEQ ID NO: 2527 - RNA, 1749 nt, Artificial Sequence
  mRNA product Design a-1 comprising derived and/or modified sequence from LASV(LASV1000-NIG-2009;Clade II)__AIT17782__GPC (opt11)
gggagagucccgcagucggcguccagcggcucugcuuguucgugugugugucguugcaggccuuauucaagcuuaccaugggacaaaucaucaccuucuuccaagaggucccccacgucauagaagaagucaugaacaucguccucaucgcacucucccuccucgccauccugaaaggcauauacaacgucgcgaccugcggccucuucggccucgucucuuuccuccuccucugcggcagaucgugcuccaccaccuacaaaggcgucuacgaacugcaaacccucgagcucgacauggccucccucaacaugacuaugccccuguccuguaccaaaaacaacucccaccauuauaucauggucggcaaugaaaccggacucgaacucacccucacuaacaccucaauaaucaaccacaaauucugcaaccucucagacgcccacaaaaagaaccucuacgaccacgcacuaauguccauaauaucaaccuuccaccucucaauccccaacuucaaccaauacgaggcgauguccugcgacuuuaacggcgggaaaaucuccguccaauacaaccuuucucacaccuacgccgucgacgcagccaaccacugcggcacaaucgccaacggcguccuccaaacauucaugcgaauggccuggggcggcuccuacauugcccucgacuccggcaaaggcuccugggacugcaucaugaccuccuaccaguaccucauaauucaaaacacaacuugggaagaccacugccaauuuucccgcccguccccaauuggauaccucggccuccuuagccaaaggacccgcgacaucuauauuucccgacgccuccucggcacauucaccuggacacuauccgacuccgaaggcaacgaaacccccggcggauacugccuaacccgcuggaugcucaucgaagccgaacucaaaugcuucggaaacaccgccgucgcuaaaugcaacgaaaaacacgacgaggaguucugcgacaugcuccgccuauucgacuucaacaagcaagcuaucaaacggcucaaaaccgaagcgcaaauguccauccaacucaucaacaaagcaguaaacgcccucaucaacgaccaacuaaucaugaagaaccaccuacgcgacaucaugggaauccccuacugcaacuacuccaaauauugguaccuaaaccacaccgucacaggcaaaaccucccuaccccgaugcuggcuaguuagcaacggcucauaccuaaaugaaacccacuucucagacgacaucgaacaacaggcggacaacaugaucaccgaacuccuccaaaaggaauacaucgacaggcaaggaaaaacgccccugggccuagucgaccuauucgucuucuccaccucauucuaccuaauaagcaucuuccuccaccucgucaaaauccccacccaccgacacgucgucggaaaacccugcccaaaaccccaccgacucaaccacauggguaucugcuccugcggccuauacaaacaucccggcguccccguaaaauggaaacgcuaaggacuagucccuguucccagagcccacuuuuuuuucuuuuuuugaaauaaaauagccugucuuucagaucuaaaaaaaaaaaaaaaaaaaaaaaaaaaaaaaaaaaaaaaaaaaaaaaaaaaaaaaaaaaaaaaaugcaucccccccccccccccccccccccccccccccaaaggcucuuuucagagccaccagaauu

SEQ ID NO: 2528 - RNA, 1749 nt, Artificial Sequence
  mRNA product Design a-1 comprising derived and/or modified sequence from LASV(LASV221-NIG-2010;Clade II)__AIT17624__GPC (opt11)
gggagagucccgcagucggcguccagcggcucugcuuguucgugugugugucguugcaggccuuauucaagcuuaccaugggacaaaucaucaccuucuuccaggaaguaccacacguaauagaagaagucaugaacaucguucuaaucgcccucucacuacucgcaauacucaaaggcauauacaacgucgcaaccugcggccucuucggccucgucuccuuccuacuccuuugcggccgcuccugcuccacaaccuacaaaggcgucuacgaacuccaaacucucgaacuagacauggcuucccucaacaugaccaugccccuuucuugcaccaaaaacaacucccaccacuacaucauggucggcaacgaaaccggccuagaacucacccuaacaaacaccuccaucaucaaccacaaauucugcaaccucucagaugcccacaaaaagaaccucuacgaucacgccuuaaugaguaucaucuccaccuuccaccuaucaauacccaacuucaaccaguacgaagcaauguccugcgacuucaacggcggaaaaaucucgguccaauacaaccucucccacaccuacgccaucgacgccgcaaaccacugcggcaccaucgccaacggcguucuccaaacauucaugcgcauggccuggggcggcuccuacaucgcccucgacuccggaaaaggaagcugggacugcaucaugaccagcuaccaguaccuaaucauacaaaacaccaccugggaagaucacugccaauuuucucgccccucccccaucggcuaccucggccuacucucccaacgcacucgcgacaucuacaucagcagacgccuccuuggcaccuucaccuggacccuauccgacuccgaagguaacgaaacucccggcggcuacugccucacacgcuggaugcuuaucgaagccgaacucaaaugcuucggaaacacagccguagccaaaugcaacgaaaaacacgacgaagaauuuugcgacaugcuccgccuauucgacuucaacaagcaagccauccgccgcuuaaaaaccgaagcccaaaugucaauccaacucaucaacaaagccgucaacgcccucauaaacgaccaacucaucaugaaaaaccaccuccgugacaucaugggcauccccuacugcaacuacuccaaauacugguaccucaaccacacugucacgggaaaaacaagccuuccccgaugcuggcuagucuccaauggcucuuaccucaacgaaacacacuucucugacgacaucgaacaacaagccgacaacaugaucaccgaaaugcuacaaaaggaauacauggaccgacagggcaaaacaccccucggccucgucgaccucuucguguucucaaccuccuucuaccugaucuccaucuuccuucaccucguaaaaauccccacccacagacacguaaucggaaagccaugcccaaaaccccaccgccuaaaccacaugggaauuugcucaugcggccucuacaaacaccccggcgucccagucaaauggaaacgcuaaggacuagucccuguucccagagcccacuuuuuuuucuuuuuuugaaauaaaauagccugucuuucagaucuaaaaaaaaaaaaaaaaaaaaaaaaaaaaaaaaaaaaaaaaaaaaaaaaaaaaaaaaaaaaaaaaugcaucccccccccccccccccccccccccccccccaaaggcucuuuucagagccaccagaauu

SEQ ID NO: 2529 - RNA, 1749 nt, Artificial Sequence
  mRNA product Design a-1 comprising derived and/or modified sequence from LASV(LASV237-NIG-2010;Clade II)__AIT17638__GPC (opt11)
gggagagucccgcagucggcguccagcggcucugcuuguucgugugugugucguugcaggccuuauucaagcuuaccaugggccagaucaucaccuucuuccaagaaguaccccacgucaucgaagaagucaugaacauaguccugaucgcacucucacuccuagccauacucaagggaaucuauaacguagccacaugcggacuauucggucucguaucauuccuacuacucugcggccguuccugcucgaccaccuauaaaggcgucuacgaacuccagacacucgaacucgacauggcaucccucaacaugaccaugccccuaucuugcaccaaaaacaacucccaccacuacaucauggucggaaacgaaaccggacucgaacucacacucaccaacaccucuauaaucaaccacaaauucugcaaccuaucagacgcucacaaaaaagaccucuacgaccacgcacucaugucaaucaucucaaccuuccaccucuccaucccaaacuucaaccaguacgaagccaugucuugcgacuucaauggaggaaaaaucucgguucaguacaaucucagccacaccuacgccgucgacgccgccaaccauugcggaaccaucgcaaacggcguccuacaaaccuucaugcgcauggccuggggcggcuccuacaucgcccucgacuccggcaaaggcuccugggacugcaucaugacuagcuaccaauaucuuaucauacaaaacacaaccugggaagaccacugccaauucucucgacccucaccaaucggcuaccucggacuacucucccagcggacacgcgacaucuacaucagccgccgacuccuaggcacauucaccuggacccuaagcgacagcgaaggcaacgaaacacccggaggcuacugccucacccgcuggaugcucaucgaagccgaacucaaaugcuucggaaacacagcagucgcaaaaugcaacgaaaaacacgacgaagaauucugcgacaugcuccgccucuucgacuucaacaaacaagccauucgcagacucaaaacggaagcccagaugucaauacaacuaauaaacaaagccgucaacgcccuaaucaacgaccaacucaucaugaaaaaccaccuccgcgacaucaugggcauccccuacugcaacuacagcaaauacugguaccucaaccacacagucaccggcaaaaccucacucccacgcuguuggcucgucuccaacgggucauaccucaacgaaacccacuucuccgacgacauugaacaacaagccgacaacaugauaaccgaacuccuccaaaaagaauacauggacagacaaggcaaaacuccccuaggccuagucgaccucuucgucuucagcaccucguucuaccucaucucaauauuccuccaccuaaucaaaauccccacccaccgacacauaaccggcaaacccugucccaaaccacaccgccucaaccacaugggaauaugcucauguggccucuacaaacaccccggcguccccgucaaguggaaacguuaaggacuagucccuguucccagagcccacuuuuuuuucuuuuuuugaaauaaaauagccugucuuucagaucuaaaaaaaaaaaaaaaaaaaaaaaaaaaaaaaaaaaaaaaaaaaaaaaaaaaaaaaaaaaaaaaaugcaucccccccccccccccccccccccccccccccaaaggcucuuuucagagccaccagaauu

SEQ ID NO: 2530 - RNA, 1749 nt, Artificial Sequence
  mRNA product Design a-1 comprising derived and/or modified sequence from LASV(LASV253-NIG-2011;Clade II)__AIT17670__GPC (opt11)
gggagagucccgcagucggcguccagcggcucugcuuguucgugugugugucguugcaggccuuauucaagcuuaccaugggacaaaucaucacauucuuucaagaagucccccacgucaucgaagaaguaaugaacauaguccucaucgcacucagccuccucgcaauacucaaagguaucuacaacguggccacuugcggucucuuuggccuagucucauuccuucuucucugcgggcguucaugcuccaccacauacaaaggcgucuacgaacuccaaacccuagaacucgacauggccucccucaacaugaccaugccccucuccugcaccaaaaauaacucccaccacuacaucauggucggcaacgaaaccggccucgaacuaacccucaccaacaccuccaucaucaaccacaaauucugcaaccucuccgacgcacacaagaaaaaccuauacgaccacgcacuaaugucaaucaucucaaccuuccaccucuccauccccaacuucaaccaguacgaagccauguccugcgacuucaauggcggcaaaaucuccguccaauacaaccucucccacaccuacgccgucgacgccgccaaccacugcggcacgauagccaauggaguccuacaaaccuucaugcgcauggccuggggcggcucauauauagcccuagacuccggcaaaggcuccugggacugcaucaugacauccuaccaauaccucaucauucaaaacaccaccugggaagaccauugccaauucucccgacccagccccaucggauaccuaggacuccuaagccagcgcacccgcgacaucuacaucucccgacgccuccuaggaaccuucaccuggacacuauccgacuccgaaggaaacgaaaccccaggcggauacugucucacccgcuggaugcucauagaagccgaacucaaaugcuucggaaauaccgccgucgccaaauguaacgaaaaacaugacgaagaauuuugcgacaugcuccgccucuucgacuucaacaaacaagccauacgccgccucaaggccgaagcccagaugucaauccaacucaucaacaaagccgucaacgcccuaauaaacgaucaacuuaucaugaagaaccaccuacgagacaucaugggaauacccuacugcaacuacuccaaauauugguaucuaaaccauacagucacaggccgcaccucacuaccccgcugcuggcucguauccaacgguucauaccucaacgaaacccacuucagcgacgacaucgaacaacaagcagacaacaugaucaccgaacuucuccaaaaagaauacauagaccgacaaggcaaaacaccccucggccucgucgaccucuucgucuuuuccaccuccuucuaccucaucucaaucuuccugcaccuggucaagaucccaacccaccgacacaucaucggcaaacccugccccaaaccccaccgccucaaccacaugggcaucugcuccugcggccucuacaagcaccccggcguccccguaaaauggaaacgcuaaggacuagucccuguucccagagcccacuuuuuuuucuuuuuuugaaauaaaauagccugucuuucagaucuaaaaaaaaaaaaaaaaaaaaaaaaaaaaaaaaaaaaaaaaaaaaaaaaaaaaaaaaaaaaaaaaugcaucccccccccccccccccccccccccccccccaaaggcucuuuucagagccaccagaauu

SEQ ID NO: 2531 - RNA, 1749 nt, Artificial Sequence
  mRNA product Design a-1 comprising derived and/or modified sequence from LASV(LASV254-NIG-2011;Clade II)__AIT17674__GPC (opt11)
gggagagucccgcagucggcguccagcggcucugcuuguucgugugugugucguugcaggccuuauucaagcuuaccaugggccaaauaaucaccuucuuucaagaagucccccauguaaucgaggaagucaugaacaucguacuaaucgcucucucccugcuagccauccuaaaaggcauauacaacgucgccacaugcggacucuucggacucguaucauuccuacuccuuugcggccgcuccugcucaaccaccuacaaaggcgucuacgaacuacaaacccuugagcucgacaugacaaaccucaacaugaccaugccccuaagcugcacuaaaaacaacucccaccacuacaucauggucggcaacgaaaccggacuggaacuuacccucacaaacacauccaucaucaaccacaaauucugcaaccuauccgacgcacacaagaaaaaucuuuacaaccaugcccucauguccaucaucuccacauuccaccuauccauccccaacuucaaccaauacgaggccaugucaugugacuucaacggcggcaaaaucuccguucaauacaaccuuucccacucauacgccguagacgccgccaaccacugcggcaccaucgcuaauggaguccuccaaacauucaugagaauggccuggggcggcuccuacaucgcccuagacuccggcaaaggcaacugggauugcaucaugaccucauaccaauaccucaucauccagaacacaaccugggaggaccacugccaauucucacgccccucucccaucggauaccucggccuacuaagccaacgcacccgggacaucuacaucucacgacgccuacuaggcaccuucaccuggacccucuccgacuccgaaggaaacgaaacacccggcggcuacugccuaacacgcuggaugcucaucgaagcagaacuaaaaugcuuugggaacaccgcaguagccaaauguaacgagaaacacgacgaagaguucugcgacaugcuacgccuguucgauuucaacaaacaggccauccgacgacucaaaaccgaagcacaagccaacauacaacucaucaacaaggccguuaacgcacuuaucaacgaccaacucaucaugaaaaaccaccuucgcgacaucaugggcauccccuacugcaacuacuccaaauacugguaccuaaaccacaccgucacaggaaaaaccucccucccccgcuguuggcuugucuccaacggcucauaucucaacgaaacccacuucuccgacgacaucgaacaacaagccgacaacaugaucacagaacuacuccagaaggaauacauggaccgacaaggcaaaaccccacucggacucgucgaccuauucgucuucucaaccuccuucuaccucauuagcaucuuccuacaucucguaaaaauccccacccaccgccacgucaucggcaaacccugccccaaaccccaucgccucaaccacaugggaaucugcagcugcggccucuacaaacaccccggcguucccgucaaauggaaacgcugaggacuagucccuguucccagagcccacuuuuuuuucuuuuuuugaaauaaaauagccugucuuucagaucuaaaaaaaaaaaaaaaaaaaaaaaaaaaaaaaaaaaaaaaaaaaaaaaaaaaaaaaaaaaaaaaaugcaucccccccccccccccccccccccccccccccaaaggcucuuuucagagccaccagaauu

SEQ ID NO: 2532 - RNA, 1749 nt, Artificial Sequence
  mRNA product Design a-1 comprising derived and/or modified sequence from LASV(Nig08-A19;Clade III)__ADU56618__GPC (opt11)
gggagagucccgcagucggcguccagcggcucugcuuguucgugugugugucguugcaggccuuauucaagcuuaccaugggccaaaucgugaccuucuuccaagaaguaccucacgucaucgaagaaguaaugaacauaguccucaucgcccucaguauccucgccauccuaaaaggccuauacaacaucgcuaccugcggccucaucggccucguuaccuuccuccuccugagcgggcgcucaugcuccaugaccuacaaaggcgucuacgaacuccaaacccucgaacuaaacaugaacacacuaaacaugaccaugccccucucgugcaccaagaacaacucccaccacuacauaauggucggaaacgaaacaggccuagaacugacccuuaccaacacaucccuccuccaccacaaauucuguaaccucucagacgcccacaagaaaaaccucuacgaccauacacugaugucaaucauauccaccuuccaccucagcauacccaacuucaaccaauacgaagccaugucaugcgacuucaacggcggcaaaauaaccguccaauacaaccucucacacucauacgccauagacgccgccaaccacugugggaccguagcuaacggaguccuccaaacauucaugcgcauggccuggggaggcucauacauagcccuagacucuggccgcggaaaaugggacugcauaaugacaucauaccaauaccucaucauccaaaacaccaccugggaagaccacugccaauucucacgacccucacccaucggcuaccucggacuccuaucccagcgcaccagagacaucuacauaucccgccgacuccuaggcacauucaccuggacacuaucagacuccgaaggcaacgaaacccccggcggguacugccuaacccgcuggaugcuaaucgaagcagaacucaaaugcuucggcaacaccgccguggccaaaugcaacgaaaaacacgacgaagaguucugcgacaugcuccgacucuucgacuucaacaaacaagcaauccgccgacucaaagccgaagcccaaaugucaauacaacuaaucaacaaagccgucaacgcacuaaucaacgaccaacucaucaugaaaaaccaccuccgugacaucaugggaauccccuacugcaacuauucaaaauauugguaccuaaaccacaccuccaccggacgcaccuccuuaccccgcugcuggcuagucucaaaugguucauaccucaacgaaacccacuucuccgaugacaucgaacaacaagccgacaacaugaucaccgaaaugcugcaaaaagaauaccuugaccgacaaggcaaaacaccccucggacucgucgaccucuucgucuuuucaaccuccuuuuaccucaucucgaucuuucuacaccucgucaaaauccccacccacagacacaucgucggcaagcccugccccaaaccccaccggcuuaaucacaugggaaucugcuccugcggccuuuacaagcaaccaggaguccccguaagauggaaacgauaaggacuagucccuguucccagagcccacuuuuuuuucuuuuuuugaaauaaaauagccugucuuucagaucuaaaaaaaaaaaaaaaaaaaaaaaaaaaaaaaaaaaaaaaaaaaaaaaaaaaaaaaaaaaaaaaaugcaucccccccccccccccccccccccccccccccaaaggcucuuuucagagccaccagaauu

SEQ ID NO: 2533 - RNA, 1752 nt, Artificial Sequence
  mRNA product Design a-1 comprising derived and/or modified sequence from LASV(G1180-SLE-2010;Clade IV)__AIT17168__GPC (opt11)
gggagagucccgcagucggcguccagcggcucugcuuguucgugugugugucguugcaggccuuauucaagcuuaccaugggccaaaucguaaccuucuuccaagaagucccccacgucauagaggaggucaugaacaucguccucauagcccucuccauccucgcaguucucaaaggacucuacaacuucgcaaccugcggccuagucggacuccucaccuuucuucuccucugcggccgcuccugcaccgccucccgcuacaaaggugucuacgaacuccaaacacucgaacucaacauggaaacacuaaacaugaccaugccccuauccugcaccaaaaacaauucccaccacuacaucauggugggcaacgaaaccggccucgagcucacgcuaacaaacaccuccaucaucaaccauaaauucugcaaccucuccgacgcucacaagaaaaaccucuacgaccaugcccucaugucaaucaucuccaccuuccaucuauccauccccaacuucaaccaauaugaagccauguccugcgacuucaacggaggcaaaaucuccguacaauacaaccucucccacuccuacgccggagacgccgccaaucacugcggcaccgucgccaacggcguccugcaaacauucaugcguauggccuggggcggcucauacaucgcccucgacuccggccacggcuccugggacugcauaaugacaagcuaccaauaccucaucauacaaaacacaaccugggaagaccacugccaauucagccgaccaucaccaaucgguuaccucggccugcuaucccaacgaacacgcgacaucuacauaucccgacgacugcucggaaccuucaccuggacccugagcgacucugaaggcaaagacacacccggcggcuacugccuaacccgcuggaugcuaaucgaagccgaacucaaaugcuucggaaacacagccguagccaaaugcaacgaaaaacacgacgaagaguucugcgacaugcuccgccuauucgacuucaacaaacaagccauucaacgacuaaaagccgaagcacaaauguccauacaacuaauaaacaaagccgucaacgcccuuaucaacgaccaacucaucaugaaaaaccaccuaagagacauaaugggcauccccuacugcaacuacagcaaauacugguaccucaaccacacgacaacaggaaaaaccucuuuacccaagugcuggcuaguaagcaacgguucauaccucaacgaaacccacuucuccgacgacaucgaacaacaagccgacaacaugaucaccgagaugcuacaaaaagaauacauggaacgacaaggcaaaacaccccucggacucgucgaccucuucgucuucuccaccuccuucuaccuaaucucaaucuuccuacaccuagucaaaauacccacccaccgccacaucgucggaaaauccugcccaaaaccccaucgacucaaccacaugggcaucugcuccuguggccuauacaaacagcccggagucccagucaaguggaaacgauaaggacuagucccuguucccagagcccacuuuuuuuucuuuuuuugaaauaaaauagccugucuuucagaucuaaaaaaaaaaaaaaaaaaaaaaaaaaaaaaaaaaaaaaaaaaaaaaaaaaaaaaaaaaaaaaaaugcaucccccccccccccccccccccccccccccccaaaggcucuuuucagagccaccagaauu

SEQ ID NO: 2534 - RNA, 1752 nt, Artificial Sequence
  mRNA product Design a-1 comprising derived and/or modified sequence from LASV(G1442-SLE-2011;Clade IV)__AIT17180__GPC (opt11)
gggagagucccgcagucggcguccagcggcucugcuuguucgugugugugucguugcaggccuuauucaagcuuaccaugggccaaauugucaccuucuuccaagagguaccccacgucaucgaagagguaaugaacaucguccucaucgcccuauccauccucgcuguccuuaaaggccucuacaacguagcaacuugcggccuaauaggucuggucaccuuccuccuccucugcggccgcucuugcacaaccacccucuacaaaggagucuacgagcuccaaacgcuagaacuaaacauggaaacccucaacaugaccaugccacuauccugcaccaaaaauaacucacaccacuacauccgcguaggaaacgaaacuggacucgagcugacacucaccaacaccagcaucauuaaccacaaauucugcaaccucuccgacgcccacaagaaaaaccucuacgaccacgccuuaauguccaucaucuccaccuuccacuuauccauaccaaacuucaaccaguacgaagcaaugucaugcgacuucaacggcggcaaaauauccguccaauacaaccuaucccacuccuacgccggcgacgccgccaaccacugcgguaccgucgccaacggcgugcuccaaacauucaugcggauggcauggggcggcucguacaucgcacucgacuccggacgaggcaacugggacugcaucaugaccuccuaccaauaccuaauaauacaaaacaccaccugggacgaccacugccaauucucacgcccauccccaaucggcuaccuaggacuacucucccaacgcacccgcgacguauacauaucccgccgccuccuggggaccuucaccuggacacucagcgacuccgaaggcaaagauacccccggcggauacugccucacccgcuggaugcucaucgaagccgaacuaaaauguuucggcaacaccgccgucgcaaaauguaacgaaaaacacgacgaagaguucugcgacaugcuccgccuauucgacuucaacaaacaagccauccaacgccuuaaagcagaagcccagauguccauccaacucaucaacaaagcaguaaacgcccuaaucaacgaccaacucaucaugaaaaaccaccuccgugacaucaugggcauaccuuacuguaauuacuccaaguacugguaccucaacaacacagccaccggcaaaaccucccucccaaaaugcuggcucaucuccaacggcucuuaccucaacgaaacccacuucuccgacgacaucgaacaagaagccgacaacaugauaaccgaaaugcuacaaaaagaguacauggaaagacaaggcaaaacaccccuaggccuagucgaccucuucgucuucucuaccucauucuaccucauauccaucuuccuccacuuagucaaaaucccgacccaucgccauauagucggcaaauccugccccaaaccacaccgccuuaaccacaugggcauaugcagcugcggacucuacaaacagcccggcguccccguccgauggaaacgauaaggacuagucccuguucccagagcccacuuuuuuuucuuuuuuugaaauaaaauagccugucuuucagaucuaaaaaaaaaaaaaaaaaaaaaaaaaaaaaaaaaaaaaaaaaaaaaaaaaaaaaaaaaaaaaaaaugcaucccccccccccccccccccccccccccccccaaaggcucuuuucagagccaccagaauu

SEQ ID NO: 2535 - RNA, 1752 nt, Artificial Sequence
  mRNA product Design a-1 comprising derived and/or modified sequence from LASV(G3010-SLE-2013;Clade IV)__AIT17344__GPC (opt11)
gggagagucccgcagucggcguccagcggcucugcuuguucgugugugugucguugcaggccuuauucaagcuuaccaugggccaaaucguaaccuuuuuccaagaagucccccauguaaucgaagaagucaugaauaucguccugaucgcccuaucaauccucgccguccucaagggccucuacaacuucgcaaccugcggccucguagggcuaguaaccuuccuccuccucugcggccgcucaugcaccaccucacucuacaaaggcgucuacgaacuacaaacccuagagcuuaacauggaaacccucaacaugaccaugccccuaagcugcaccaaaaacaacucacaccacuacaucauggucggcaacgaaaccggccucgaacucacacucaccaacacaucuaucaucaaccacaaauucugcaaccucuccgacgcacacaaaaagaaccucuacaaccacgcacuaauguccauaaucucaaccuuucaccucuccauccccaacuucaaccaauacgaagcaauguccugugacuuuaacggcggaaagaucucaguacaauacaaccucucccacagcuacgccggcgacgccgccucacacugcggcacgguagccaacggcguccugcaaacguucaugcgcauggccuggggcgguagcuacaucgcccucgacuccggcuacggaaaaugggacugcaucaugaccuccuaccaauaccucaucauccaaaacaccaccugggaagaccacugccaauucucccgccccucccccaucggcuaccucgggcuccuuucccaaagaacccgcgacaucuacaucucccgccgacuccuaggcaccuucacauggacccuaucugacuccgaaggaaaggacaccccagggggauacugccucacccgcuggaugcucauagaagcagaacucaaauguuucggcaacaccgccgucgcaaaaugcaacgaaaaacacgacgaagaguucugcgacaugcucagacucuucgacuucaacaaacaagccauacaacgccucaaaacagaagcccaaauguccauacagcucauuaacaaagccgucaacgcacucaucaacgaucaacuaaucaugaaaaaccaccuccgcgacauuaugggcauccccuacugcaacuacuccaaauacugguaccucaaccacaccacaacgggcaaaacuucacucccaaagugcuggcuuguauccaacggcuccuaccucaacgaaacccacuucagcgacgacaucgaacaacaggccgacaacaugaucacagagaugcugcagaaagaguacauggaacgccaaggcaaaacaccccucggccuggucgaccuuuucguauucagcaccuccuucuauuuaaucuccaucuuccuccaccucgucaaaaucccaacccacagacacaucgucggaaaaucaugccccaaaccccaccgacucaaccacaugggcaucugcuccugcggccucuacaagcaaccgggaguccccguacgauggaaaagaugaggacuagucccuguucccagagcccacuuuuuuuucuuuuuuugaaauaaaauagccugucuuucagaucuaaaaaaaaaaaaaaaaaaaaaaaaaaaaaaaaaaaaaaaaaaaaaaaaaaaaaaaaaaaaaaaaugcaucccccccccccccccccccccccccccccccaaaggcucuuuucagagccaccagaauu

SEQ ID NO: 2536 - RNA, 1752 nt, Artificial Sequence
  mRNA product Design a-1 comprising derived and/or modified sequence from LASV(G502-SLE-2009;Clade IV)__AIT17126__GPC (opt11)
gggagagucccgcagucggcguccagcggcucugcuuguucgugugugugucguugcaggccuuauucaagcuuaccaugggacaaaucguuacguucuuccaagaaguaccacacgucaucgaagaaguaaugaacauaguacucaucgcccuauccauccucgccguacuaaaaggccucuacaacuucgcaaccugcggacucgucggccuacucaccuuccugcuccuaugcggucgcuccugcacaacgggacucuauaaaggcgucuacgaacuccaaacacucgaacuuaacauggaaacccuaaacaugaccaugccacucucaugcaccaaaaacaacucccaccacuacaucaugguaggcaacgaaacaggacucgaacugacccucacaaacacguccaucauaaaucacaaauucugcaaccucucagacgcccacaagaaaaaccuauaugaccacgcacuaaugagcaucauaagcacauuccaccucucaauacccaacuucaaccaauacgaagccaugucgugcgacuucaacggcggaaaaauuuccguccaauacaaccuuucccacucauacgccggcgaugcagccgaccacugcggcaccgucgccaacggaguacuccaaaccuucaugcgcauggccuggggcggcagcuacaucgcucucgacagcggacgaggucguugggacugcaucaugacaucuuaccaauaccucaucauccaaaacacaacuugggaagaccacugccaguucucccgcccuucacccaucggauaccucggccuccucucacaacgcacucgagacaucuacaucucccgacgccuacucggaaccuucaccuggacccucucagacuccgaaggaaaagacacccccggcggauacugccucacacgcuggaugcuaaucgaagcagaacucaaaugcuucggcaacacagccguagcaaaaugcaacgaaaaacacgacgaagaguucugcgauauguuacgacucuucgacuuuaacaaacaagccauccaacgacuuaaagccgaagcucaaauguccauacaacuaaucaacaaagccguaaacgcccuaaucaacgaccaacucguaaugaaaaaccaccuccgagacauaaugggaauaccauacugcaacuacucccgcuacugguaccuuaaccauaccaccaccggccgcaccagccuacccaaaugcuggcucguaagcaacggcucauaccucaacgaaacucacuucuccgaugacaucgaacaacaagccgauaacaugauuaccgaaaugcuacaaaaagaauacauggaacgccaaggcaaaacaccucuaggccuagucgaccuauucgucuucucaaccucuuucuaccucaucuccauauuccuccaccuaguaaaaauccccacccaccgccacauagucggcaaguccugccccaaaccccaccgccucaaccacauggguauuugcuccugcgggcuuuacaaacaaccaggcgucccaguaaaauggaaacgcuaaggacuagucccuguucccagagcccacuuuuuuuucuuuuuuugaaauaaaauagccugucuuucagaucuaaaaaaaaaaaaaaaaaaaaaaaaaaaaaaaaaaaaaaaaaaaaaaaaaaaaaaaaaaaaaaaaugcaucccccccccccccccccccccccccccccccaaaggcucuuuucagagccaccagaauu

SEQ ID NO: 2537 - RNA, 1752 nt, Artificial Sequence
  mRNA product Design a-1 comprising derived and/or modified sequence from LASV(G733-SLE-2010;Clade IV)__AIT17154__GPC (opt11)
gggagagucccgcagucggcguccagcggcucugcuuguucgugugugugucguugcaggccuuauucaagcuuaccaugggccaaaucgucaccuucuuccaggaagucccccacgucaucgaagaagucaugaacauaguccucauagcccugucaauccucgccguccucaaaggacucuacaacuucgccacuugcggaauagucggccuagucuccuuucuacuucucugcggacgcucaugcacaaccagccuguacaaaggcguauacgaacuccaaacacuugaacugaacauggaaacccucaacaugaccaugccccucuccugcaccaaaaacaacucccaccacuacauaauggucggcaacgaaacaggccuagaacucacccucacaaacaccuccaucaucaaucacaaauucugcaaccuaucagacgcccauaagaaaaaccucuacgaccaugcccucaugagcaucaucucaacauuccaccucuccauccccaacuucaaccaauacgaagccauguccugcgauuucaacgguggcaaaaucagcguacaguacaaccuaucucacucauacgccggcgacgccgccaaccacugcggcaccauagccaacggcguacugcaaacauucaugcgcauggccuggggcggcuccuacaucgcgcucgauucaggccgcgaccgcugggacugcauaaugaccucauaccaguaccuaaucauccaaaacacaaccugggaagaccacugccaauucucccgacccucucccauaggcuaccucggccuucucucccaacgaacccgagacaucuacaucagccgccgacuucucggcaccuucaccuggacccucagcgacuccgaaggcaaagacaccccuggcggcuacugccucacacgguggaugcuaaucgaggccgaacuaaaaugcuucggaaacaccgcaguugccaaaugcaacgaaaaacacgacgaagaguucugugauaugcuccgccucuucgacuucaacaaacaagcuauacaacgccucaaagccgaagcacaaauguccauccaacuaaucaacaaagccgucaaugcccugaucaacgaccaacugaucaugaaaaaccaccuccgggacauaaugggcauccccuacugcaacuacucgaaguacugguaucuuaaccacaccaccaccggaaaaacaagccuccccaaaugcuggcucguauccaacggauccuaccucaacgaaacccacuucucagacgacaucgaacaacaagcggacaacaugauaacugaaaugcuccaaaaagaauacauggaacgccaaggaaagaccccacuaggcuuaguugaccuauucguauucuccaccuccuucuaucucaucuccaucuuccuacaccucgucaaaauccccacccaccgacacguagucggcaaaucaugccccaaaccccaccgccugaaccacaugggcauaugcagcugcggucuuuacggucaacccggaguacccgucaaauggaaacgcuaaggacuagucccuguucccagagcccacuuuuuuuucuuuuuuugaaauaaaauagccugucuuucagaucuaaaaaaaaaaaaaaaaaaaaaaaaaaaaaaaaaaaaaaaaaaaaaaaaaaaaaaaaaaaaaaaaugcaucccccccccccccccccccccccccccccccaaaggcucuuuucagagccaccagaauu

SEQ ID NO: 2538 - RNA, 1752 nt, Artificial Sequence
  mRNA product Design a-1 comprising derived and/or modified sequence from MOPV/LASV reassortant(IGS-1;Clade IV)__AFY05576__GPC (opt11)
gggagagucccgcagucggcguccagcggcucugcuuguucgugugugugucguugcaggccuuauucaagcuuaccaugggccaaaucgucaccuucuuccaagagguaccccacgucaucgaagaagucaugaacaucguacucaucgcccuuuccguccucgcaguacuaaaaggacuauacaacuucgccacuugcggccuagucggacucgucaccuuccugcuccuauguggccgcagcugcaccacuucccuuuacaagggcgucuacgaacuccaaacccucgaacucaacauggaaacccucaacaugaccaugccccucuccuguaccaaaaacaacucucaccacuacauaauggucggcaacgaaacuggccucgaacucacacucaccaacacguccaucaucaaccacaaauucugcaaccucagcgacgcccacaaaaagaaccucuacgaucacgcccucauguccauaaucagcaccuuccaccucuccauccccaacuuuaaccaauacgaagcaauguccugcgauuucaacgguggcaaaaucuccguccaauacaaccuaucccacuccuacgccggagacgccgcgaaccacugcggcacagucgccaacggaguccuccaaacauucaugcgaauggccuggggagguagcuacauagcccucgauucaggcagaggcaacugggacugcaucaugaccucauaccaauaccucaucauccaaaacacaacaugggaagaccacugccaauucagccgacccagccccaucgguuaccuaggccuccucucccaacgcacacgagacaucuacaucucacgacgucuacucgguaccuucaccuggacacucuccgacuccgaaggugaagacacccccggcggcuacugccucacccgcuggaugcucaucgaagccgagcucaaaugcuucggaaacaccgccguagcaaaaugcaacgagaaacacgacgaagaguucugcgacaugcuucgccucuucgacuucaacaaacaagccauacaacgccuaaaagccgaagcccaaaugucaauccaacucaucaacaaagcuguaaacgcacuaaucaacgaccaacucaucaugaaaaaucaucuucgcgacaucauggguauccccuacugcaacuacuccaaauacugguaccucaaccacacaaccaccggacgaaccucccucccuaaaugcuggcucguaucaaacggcuccuaccuuaacgaaacccacuucucagacgacauagaacaacaagccgacaacaugaucacagaaaugcuucaaaaagaauacauggaacgccaaggaaaaacuccccuaggucucgucgaccucuucgucuucuccaccagcuucuaccuaaucucgauauuccuacaccuagucaaaauacccacccaccgccacaucguaggcaaaagcugccccaaaccccaccgccucaaccacaugggcauaugcuccugcggccuauacaagcagcccggugucccugucaaauggaaacgcugaggacuagucccuguucccagagcccacuuuuuuuucuuuuuuugaaauaaaauagccugucuuucagaucuaaaaaaaaaaaaaaaaaaaaaaaaaaaaaaaaaaaaaaaaaaaaaaaaaaaaaaaaaaaaaaaaugcaucccccccccccccccccccccccccccccccaaaggcucuuuucagagccaccagaauu

SEQ ID NO: 2539 - RNA, 1752 nt, Artificial Sequence
  mRNA product Design a-1 comprising derived and/or modified sequence from LASV(LM765-SLE-2012;Clade IV)__AIT17814__GPC (opt11)
gggagagucccgcagucggcguccagcggcucugcuuguucgugugugugucguugcaggccuuauucaagcuuaccaugggccaaaucgucaccuucuuccaagaaguaccacacgucaucgaagaagucaugaacaucguacucauagcccuaagcauccucgccguacucaaaggacucuacaacuucgcaacuugcggccucgucggccucguaacauuccuucugcucugcggucgaagcugcaccaccucccuauacaaaggcgucuacgaacuccaaacacuagaacucaacauggaaacccucaacaugaccaugccccuaucaugcaccaaaaacaacucccaccacuacaucauggucgguaacgaaacaggccuagaacucacucuaacaaacaccuccaucaucgaucacaaauucugcaaccucucagacgcgcaccggaaaaaccucuacgaccacgcacucauguccaucauauccacguuccaccuuucaauccccaacuucaaccaauacgaagcuaugucaugcgacuucaacggcgguaagauaucaguccaguacaaccucucccacuccuacgccaaggacgccgcagaccacugcggcaccgucgccaacggcguccuccaaaccuucaugcgaauggccuggggcggcuccuauaucgcccucgacucaggccgaggccgcugggacugcaucaugaccagcuaccaauaccucaucauccaaaacacaaccugggaagaccacugccaauucucacgaccaucuccuaucggcuaccuaggcuuacucucccaacgcacccgagacaucuacauaagccgccgccuacuugguacauucaccuggacacuauccgacuccgaaggaaaagacaccccugguggauauugccuaacacgcuggaugcucaucgaagcagagcucaaaugcuucggcaacaccgccguagcaaaaugcaacgaaaaacacgacgaagaguucugcgacaugcuccgccucuucgacuucaacaaacaagccauccaacgccuaaaagccgaagcccaaauguccauacaacucaucaacaaagcagucaacgcccucaucaacgaccagcucaucaugaaaaaccaccuuagagacauaaugggcaucccauacugcaacuacucaaaauauugguaucucaaccacacaaccaccggaaaaaccagccuccccaaaugcuggcucgucaguaauggaucauaccucaacgaaacccacuucuccgacgacauugaacaacaagcagacaauaugaucacugaaaugcuucaaaaagaauacauggaacgacaaggcaaaacuccucucggccucgucgaccucuucgucuucagcaccagcuucuaccucaucucgaucuuccuacaccuugucaaaauccccacacaucgccacaucgucggaaaacccugccccaaaccccaccgccucaaccacaugggaaucugcucaugcggccucuauaaacaacccggcguccccgucaaauggaaacgcuaaggacuagucccuguucccagagcccacuuuuuuuucuuuuuuugaaauaaaauagccugucuuucagaucuaaaaaaaaaaaaaaaaaaaaaaaaaaaaaaaaaaaaaaaaaaaaaaaaaaaaaaaaaaaaaaaaugcaucccccccccccccccccccccccccccccccaaaggcucuuuucagagccaccagaauu

SEQ ID NO: 2540 - RNA, 1752 nt, Artificial Sequence
  mRNA product Design a-1 comprising derived and/or modified sequence from LASV(LM776-SLE-2012;Clade IV)__AIT17824__GPC (opt11)
gggagagucccgcagucggcguccagcggcucugcuuguucgugugugugucguugcaggccuuauucaagcuuaccauggggcaaaucgucaccuucuuccaagaaguuccccacgucaucgaagaagucaugaacaucguacuaaucgcccucuccauccucgcaguacuaaaaggacucuacaacuucgccacaugcggccucgucggccucgucacauuccuacuccuaugcggccgcucaugcaccaccuccgucuacaaaggcgucuacgaacuccaaacccucgaacucaacauggaaacccucaacaugaccaugccucucuccugcaccaaaaacaacucccaucacuacaucauggucggcaacgagaccggacuagaacucacacucacaaacaccuccaucaucaaccacaaauucugcaaccuaucugacgcacacaagaaaaaccucuacgaccacgcccucaugucaauuaucuccaccuuccaccuauccauacccaacuucaaccaauacgaagccaugucaugcgacuucaacggcggcaaaaucuccguccaauacaaccucagccacucauacgcuggcgacgccgcuaaccacugcgguaccgucgccaacggcguccugcaaacauucaugcgcauggccuggggcggauccuacaucgcccucgacuccggacacgggaaaugggacugcaucaugacuuccuaccaauaccucauaauacaaaacaccaccugggaagaccacugccaguucucccgaccauccccaaucggauaccucggacuccuaucucaacgcacccgagacaucuacaucagccgacgccuccuuggcaccuucaccuggacccucucagacuccgagggcaaagacaccccgggcggcuacugccucacccgcuggaugcuaauagaagccgaacucaaaugcuucggcaacaccgccguagccaaauguaacgaaaaacacgacgaagaguucugcgauaugcuucgccucuucgacuucaacaaacaagcaauccaacgacucaaagcagaagcacagaugagcauucaacuuaucaauaaagccguaaacgcccugaucaacgaccaacucaucaugaaaaaccaccuucgcgacauaaugggcauccccuacugcaacuacuccaaauacugguacuugaaccacaccaccaccgguaaaacuagccuaccuaaaugcuggcuugucucuaacggauccuaccucaacgaaacacacuucagcgacgacaucgaacaacaagccgauaacaugaucacagaaaugcuccagaaagaguacauggagcgccaaggaaaaaccccgcucggccuagucgaccucuucguauucuccaccagcuucuaucucaucuccauauuccuccaccucgucaaaaucccuacccaccgccacauaguagguaaaucaugcccaaaaccccaccgacucaaccacaugggcaucugcuccugcggccucuacaaacaaccaggcguacccguucgauggaaacgaugaggacuagucccuguucccagagcccacuuuuuuuucuuuuuuugaaauaaaauagccugucuuucagaucuaaaaaaaaaaaaaaaaaaaaaaaaaaaaaaaaaaaaaaaaaaaaaaaaaaaaaaaaaaaaaaaaugcaucccccccccccccccccccccccccccccccaaaggcucuuuucagagccaccagaauu

SEQ ID NO: 2541 - RNA, 1752 nt, Artificial Sequence
  mRNA product Design a-1 comprising derived and/or modified sequence from LASV(Mad39;Clade IV)__ANH09722__GPC (opt11)
gggagagucccgcagucggcguccagcggcucugcuuguucgugugugugucguugcaggccuuauucaagcuuaccaugggccaaaucguaacuuucuuccaagaagucccccacguaauugaagaagugaugaacaucguccucaucgcccucuccauccuagccguacugaagggccucuacaacguagcaacgugcggccucaucggccucgucaccuuccuacugcucugcggaagaucaugcaccaccacccucuacaagggagucuacgaacuccaagcccucgaacucaauauggaaacccuaaacaugaccaugccacuauccugcaccaaaaacaacagccaccacuacauucgcgucgguaacgaaacaggccucgaacuaacccuuaccaacaccucccucaucaaccacaaauuuugcaaucugucugacgcacacaagaaaaaccucuacgaccacgcacucaugucaaucaucuccacauuccaccuauccauaccaaacuucaaccaguacgaggcaauguccugcgacuuuaacgauggcaaaaucucaguccaauauaaccucucccacaccuacgccggagacacagccaaccacugcggaaccgucgcaaauggcguacuccaaacuuucaugcgaauggccuggggcggauccuacauagcccuagacuccggacgcggagguugggacuguaucaugaccuccuaucaauaccuaaucauacagaacaccaccugggaagaccacugccaauucucacgacccucuccgaucggcuaccucggccuccuaucacaacgaacccgggacauauacaucucacgccgacuauuaggcacguucaccuggacacucucagacucagaaggaaaagauacccccggaggcuacugccugacccgauggaugcucaucgaagcagaacucaaaugcuucggaaacaccgccguugccaaaugcaacgaaaaacacgacgaagaguucugcgacaugcuccgacuauuugacuucaacaaacaagccauccagcgccucaaagccgaagcccagaugucaauccaacuaauaaacaaagcagucaacgcccucaucaacgaccaacucaucaugaaaaaccaccuacgcgacauaaugggcaucccauacugcaacuacuccaaauacugguaccuaaaccacaccguaaccgguaaaacaucacuuccuaaaugcuggcucgucuccaacggaagcuaccuaaacgaaacacacuucucagacgacaucgaacaacaagcagacaacaugauuacagaaaugcuccaaaaagaauacauggaacgacaaggcaagacaccacucggccucgucgaccucuucgucuucagcaccucauucuaccucaucuccaucuuccuucaccucgugaagauacccacccaccgucacgucguagguaaacccugcccaaaaccccaccgacucaaccacaugggaauaugcuccugcggcuucuacaaacaacccggcguucccguccgauggaaacgcuaaggacuagucccuguucccagagcccacuuuuuuuucuuuuuuugaaauaaaauagccugucuuucagaucuaaaaaaaaaaaaaaaaaaaaaaaaaaaaaaaaaaaaaaaaaaaaaaaaaaaaaaaaaaaaaaaaugcaucccccccccccccccccccccccccccccccaaaggcucuuuucagagccaccagaauu

SEQ ID NO: 2542 - RNA, 1752 nt, Artificial Sequence
  mRNA product Design a-1 comprising derived and/or modified sequence from LASV(Z0947-SLE-2011;Clade IV)__AIT17840__GPC (opt11)
gggagagucccgcagucggcguccagcggcucugcuuguucgugugugugucguugcaggccuuauucaagcuuaccaugggccaaauugucaccuucuuccaggaagucccucacgucaucgaagaagucaugaacaucguacugaucgcacucucgauccucgcuguccugaaaggccuauacaacuucgcaaccugcggacucgucggacucguaacauuucuccuccucuguggccgaucuugcacaaucucccuauacaaaggcgucuacgaacuucaaacccuagaacuaaauauggaaacccucaacaugacaaugccccucuccugcacuaaaaacaacucacaccacuacauaaugguagguaacgaaaccggccucgaacucacccucaccaacaccuccaucaucaaccacaaauucugcaaccuuuccgacgcccacaagaaaaaccuauacgaccacgcccucaugucaauaaucuccacauuccaccucuccauccccaauuucaaccaauacgaagccaugucaugcgacuucaacgguggaaaaauauccguacaauacaaccucucccacuccuacgccggcgacgcugccaaccacugcggcacagucgccaacggcguccuccaaaccuucaugagaauggcguggggcggcuccuacauagcccucgacagcggccgugaccgcugggacugcaucaugacuuccuaccaguaccucaucauccaaaauacgacaugggaagaccacugccaauucucccgcccgucccccaucggcuaccuuggccuccuaucacaaagaacacgcgacaucuacaucucccgccgccuccuggguaccuucacauggacccucuccgacagcgaaggcaaagacacccccggcggcuacugccucacccgauggaugcucaucgaagcagaacucaaaugcuucggcaauaccgccgucgccaaaugcaacgaaaaacacgacgaagaauuuugcgacaugcucagacucuucgacuucaacaaacaagcgauccaacggcuaaaagccgaagcccaaaugucuauccaacuaauaaacaaagccgucaacgcacuaauaaacgaccaacuaaucaugaaaaaccaucuacgugacaucaugggcaucccauacugcaacuacuccaaauauugguaccuaaaccacacaacaaccggaaaaaccucacuuccuaaaugcuggcucgucuccaauggcuccuaccucaacgaaacucacuucucugacgacaucgaacaacaagccgacaacaugauuacagaaaugcuccaaaaagaauauauggaacgccaaggaaaaaccccacucggccuaguagacuuauucgucuucuccaccagcuucuaccucaucucaaucuuccuccaccucgucaaaauccccacacaccgccacaucgucggcaaacccugccccaaaccccaccgccugaaccacaugggcaucugcagcugcggccucuacaaacaacccgguguuccaguaaaguggaaacgauagggacuagucccuguucccagagcccacuuuuuuuucuuuuuuugaaauaaaauagccugucuuucagaucuaaaaaaaaaaaaaaaaaaaaaaaaaaaaaaaaaaaaaaaaaaaaaaaaaaaaaaaaaaaaaaaaugcaucccccccccccccccccccccccccccccccaaaggcucuuuucagagccaccagaauu

SEQ ID NO: 2543 - RNA, 1771 nt, Artificial Sequence
  mRNA product Design a-2 comprising derived and/or modified sequence from LASV(Josiah;Clade IV)__NP_694870__GPC (wt)
gggagaguccgcucagccagguugcagaagcggcuuagcguguguccuaaucuucucucugcguguagguaggccugugccgcaaacaagcuuaccaugggacaaauagugacauucuuccaggaagugccucauguaauagaagaggugaugaacauuguucucauugcacugucuguacuagcagugcugaaaggucuguacaauuuugcaacguguggccuuguugguuuggucacuuuccuccuguugugugguaggucuugcacaaccagucuuuauaaagggguuuaugagcuucagacucuggaacuaaacauggagacacucaauaugaccaugccucucuccugcacaaagaacaacagucaucauuauauaauggugggcaaugagacaggacuagaacugaccuugaccaacacgagcauuauuaaucacaaauuuugcaaucugucugaugcccacaaaaagaaccucuaugaccacgcucuuaugagcauaaucucaacuuuccacuuguccauccccaacuucaaucaguaugaggcaaugagcugcgauuuuaaugggggaaagauuagugugcaguacaaccugagucacagcuaugcuggggaugcagccaaccauugugguacuguugcaaaugguguguuacagacuuuuaugaggauggcuuggggugggagcuacauugcucuugacucaggccguggcaacugggacuguauuaugacuaguuaucaauaucugauaauccaaaauacaaccugggaagaucacugccaauucucgagaccaucucccaucgguuaucucgggcuccucucacaaaggacuagagauauuuauauuaguagaagauugcuaggcacauucacauggacacugucagauucugaagguaaagacacaccagggggauauugucugaccagguggaugcuaauugaggcugaacuaaaaugcuucgggaacacagcuguggcaaaauguaaugagaagcaugaugaggaauuuugugacaugcugaggcuguuugacuucaacaaacaagccauucaaagguugaaagcugaagcacaaaugagcauucaguugaucaacaaagcaguaaaugcuuugauaaaugaccaacuuauaaugaagaaccaucuacgggacaucaugggaauuccauacuguaauuacagcaaguauugguaccucaaccacacaacuacugggagaacaucacugcccaaauguuggcuuguaucaaaugguucauacuugaacgagacccacuuuucugaugauauugaacaacaagcugacaauaugaucacugagauguuacagaaggaguauauggagaggcaggggaagacaccauugggucuaguugaccucuuuguguucaguacaaguuucuaucuuauuagcaucuuccuucaccuagucaaaauaccaacucauaggcauauuguaggcaagucgugucccaaaccucacagauugaaucauaugggcauuuguuccuguggacucuacaaacagccuggugugccugugaaauggaagagaugaggacuagucccuguucccagagcccacuuuuuuuucuuuuuuugaaauaaaauagccugucuuucagaucuaaaaaaaaaaaaaaaaaaaaaaaaaaaaaaaaaaaaaaaaaaaaaaaaaaaaaaaaaaaaaaaaugcaucccccccccccccccccccccccccccccccaaaggcucuuuucagagccaccagaauu

SEQ ID NO: 2544 - RNA, 1768 nt, Artificial Sequence
  mRNA product Design a-2 comprising derived and/or modified sequence from LASV(LP;Clade I)__AAF86701__GPC (wt)
gggagaguccgcucagccagguugcagaagcggcuuagcguguguccuaaucuucucucugcguguagguaggccugugccgcaaacaagcuuaccauggggcagauuauuacauucuuucaagaagugccacauguaauagaggaagucaugaacauugugcuaauugcgcuuucucuauuggcaaucuugaagggcuuguauaacaucgcuacaugugggauuauuggauugguugccuuuuuauucuuguguggcaagucuuguucccuaacccuuaaagggggauaugagcugcaaaccuuagaauuaaauauggagacccuaaacaugaccaugcccuuaucaugcaccaagaacagcagucaucauuacauaagagugggcaaugagacuggauuagaauugacuuuaacuaacaccagcauuauaaaucacaaauuuugcaacuuauccgaugcucacaaaaagaaucuuuaugaucaugcucucaugagcaucaucucaacauuccaucuauccauuccaaacuucaaucaguaugaagccaugaguugugauuucaauggagggaaaaucagugugcaauacaaccucucucauuccuaugcuggggaugcggccgaacacugugggacaguugccaacggaguguugcaaacauuuaugagaauggccugggguggaagauacauugcauuagacucaggaaagggaaacugggacuguauaaugaccagcuaccaguaccugauaauucaaaauacaacaugggaggaccacugccaauucucaagaccgucuccuaucggguaccuuggccuuuugucacaaaggacaagagauauauauauaaguaggaggcucuuggggaccuucaccuggacauugucagauucugagggcaaugaaacaccaggugguuauuguuuaaccagguggaugcuaauugaagcagaacucaaguguuuugggaauacagcuguggcaaaaugcaaugagaagcaugaugaggaguuuugugacaugcugagauuguuugauuucaacaagcaagcaauccguagguugaaggcugaggcccagaugaguauucaauuaauaaauaaagccgugaaugccuuaaucaaugaucaauuaaucaugaagaaccauuuaagagacaucaugggcauucccuacugcaauuacagcaaguauugguaccuuaaucauacuaguagcgggagaacaucacuaccaaaguguuggcuuauauccaaugggucauaucuaaaugaaacccaguucucugaugacauagaacagcaagccgacaauaugaucacagagaugcuucagaaagaauacauugaaagacaagggaaaacgcccuugggacuaguggacauuuucaucuuuagcacaagcuuuuaucugaucagcauuuucuugcauuuaauuaaaaucccuacacaucgacacaucguugggaaacccugucccaaaccccauagacuaaaucacaugggaguauguuccuguggacuguacaaacacccugguguuccaacaaaguggaagagauagggacuagucccuguucccagagcccacuuuuuuuucuuuuuuugaaauaaaauagccugucuuucagaucuaaaaaaaaaaaaaaaaaaaaaaaaaaaaaaaaaaaaaaaaaaaaaaaaaaaaaaaaaaaaaaaaugcaucccccccccccccccccccccccccccccccaaaggcucuuuucagagccaccagaauu

SEQ ID NO: 2545 - RNA, 1768 nt, Artificial Sequence
  mRNA product Design a-2 comprising derived and/or modified sequence from LASV(803213;Clade II)__AAF86703__GPC (wt)
gggagaguccgcucagccagguugcagaagcggcuuagcguguguccuaaucuucucucugcguguagguaggccugugccgcaaacaagcuuaccauggggcaaaucauaacauucuuccaagaggugccucaugucauagaggaggucaugaacauuguccuaauugcccucagucuccuggcgauacuaaaggggauuuacaauguugcuaccuguggucucuuuggguugaucuccuuucuucucuuauguggcagaucauguucaguaaccuauaaagguguuuaugagcuacaaacucuagaacugaacauggcaaaccuuaauaugacgaugcccuugucuuguacgaagaacaacagccaucauuacaucaugguuggaaaugaaacaggccuagagcugaccuuaacaaacacaagcaucauuaaccacaaguuuugcaaccuuucugaugcacauaaaaagaaucucuaugaccaugcucugaugagcaucaucucaacuuuccacuuaucuauuccaaacuuuaaucaguaugaagcaaugaguugugacuucaauggagggaaaauaaguguucaguacaaccucagucacuccuuugcuguggaugcagccaaccacugugggaccauugccaaugguguucugcagaccuuuaugaggauggcuugggguggcaguuacauagcacuugauuccggaaaagggaacugggauuguauaaugacuuccuaucaauacuugauaauucaaaacaccacuugggaagaucacugccaguuuucucgcccaucuccuauugguuacuuaggacuauugucacagagaacuagagauaucuauaucagucgaagacuucucggaacuuucacuuggacccuuucugauucugaagguaaugaagcaccugguggguauugucuaacuagauggauguuaauugaagcagaacugaaaugcuuugggaacacagcaguugcaaagugcaacgaaaaacaugaugaagaauuuugugacauguugagauuguuugauuucaacaaacaagcuauaaagaggcugaaaacagaagcacagaugaguauucagcugauaaacaaggcagugaaugcauuaaucaaugaccaacugauuaugaagaaccaucuaagggacaucaugggaauuccuuauugcaacuacaguagauauugguaucuaaaucacacugugacagggaagacaucacugccaagauguuggcuugugucaaaugguuccuaccuaaacgaaacacauuuuucugaugacauugaacaacaagcagacaacaugauaacagaaauguugcagaaagaguacauggacaggcaggggaaaacaccuuuaggguuaguggaccuuuuugucuuuagcacuagcuuuuaccucauaagcaucuuucuccaucuggucaagaucccaacucacaggcacaucguggggaaaccuugcccuaagccacacagacucaaccacaugggcaucugcucauguggucuguauaaacaucccgguguuccaguaaaauggaagagauaaggacuagucccuguucccagagcccacuuuuuuuucuuuuuuugaaauaaaauagccugucuuucagaucuaaaaaaaaaaaaaaaaaaaaaaaaaaaaaaaaaaaaaaaaaaaaaaaaaaaaaaaaaaaaaaaaugcaucccccccccccccccccccccccccccccccaaaggcucuuuucagagccaccagaauu

SEQ ID NO: 2546 - RNA, 1768 nt, Artificial Sequence
  mRNA product Design a-2 comprising derived and/or modified sequence from LASV(GA391;Clade III)__CAA36645__GPC (wt)
gggagaguccgcucagccagguugcagaagcggcuuagcguguguccuaaucuucucucugcguguagguaggccugugccgcaaacaagcuuaccaugggacagauugugacauucuuccaagaaguuccucauguuauugaggaagugaugaauauuguccuuauugcacuauccauccuagcaauucugaagggacuauacaauguugccacguguggcuugauagggcuugucacauuccuucuacuuucaggaaggucaugcucacugaucuacaaagggacuuacgagcugcaaacccuugaguugaauauggagacucuuaauaugaccaugccgcuauccugcacaaagaacaacagucaucauuauauaaggguggggaaugagacaggacuugagcucaccuugaccaacaccagcauucuuaaucacaaauucuguaaccucucugaugcccacaaaaggaaucuuuaugaucacagccucaugaguaucaucucuaccuuucaucuguccauucccaacuucaaucaauaugaggcaaugagcugcgauuucaauggggggaaaaucacugugcaauacaaccugagucauagcuucgcaguggaugcagcaggucacugcggcacacuugcaaauggugucuuacaaacauuuaugagaauggcuuggggagggaguuauauugcucuugauucuggacgcgguaacugggacuguauaaugaccaguuaccaauaucuaaucauucagaauacaaccugggaugaccacugccaauuuuccagaccaucaccuauuggcuaccuugggcuucucucacaaagaacuagagacauauacauuagcagaagguuguuggggacauucaccuggacacuaucagacucagagggaaaugaaacaccagggggauacugccuuacuagauggauguugauugaggccgaauuaaagugcuuuggaaacacugcaguagccaagugcaaugagaaacaugaugaagaauuuugugacaugcuaagguuguucgauuucaacaaacaggccauaaggaggcucaaaacagaggcccaaaugagcauacagcugaucaacaaggcugucaaugcuuuaauaaaugaucagcucaucaugaagaaccacuugagagacaucaugggcauaccauauuguaacuacagcagauauugguaccuuaaccacacaucaacaggaaagaccucacuaccaagguguuggcuuaucucaaauggaucauaucucaaugagaccaaguuuucagaugacaucgaacaacaagcugacaacaugauaacagagaugcuacaaaaggaauacauagauagacagggcaaaacuccacugggguuaguugaccuauuuguuuuuagcacaaguuucuaucugauaagcaucuuucuccaccuggucaaaauaccaacccauagacacauuguagguaaaccuugcccaaaaccccacaggcugaaccacaugggcaucugcuccuguggucuauacaaacagccaggugugccugucagauggaagaggugaggacuagucccuguucccagagcccacuuuuuuuucuuuuuuugaaauaaaauagccugucuuucagaucuaaaaaaaaaaaaaaaaaaaaaaaaaaaaaaaaaaaaaaaaaaaaaaaaaaaaaaaaaaaaaaaaugcaucccccccccccccccccccccccccccccccaaaggcucuuuucagagccaccagaauu

SEQ ID NO: 2547 - RNA, 1771 nt, Artificial Sequence
  mRNA product Design a-2 comprising derived and/or modified sequence from LASV(AV;Clade V)__CCA30314__GPC (wt)
gggagaguccgcucagccagguugcagaagcggcuuagcguguguccuaaucuucucucugcguguagguaggccugugccgcaaacaagcuuaccauggggcaaauagugacauucuuucaagaggugccucaugugauagaagaggugaugaacauuguucuuauagcauugucuauauuggcaguguugaaaggucucuacaacauugccacaugcggccucaucggcuugaucacuuuccucuuauuauguggaaggucuugcucauccaaccucuacaagggggucuaugaacuucaaucucuggaccugaacauggagacacucaacaugaccaugccccucuccugcacaaagaacaauagucaucacuacauaaggguuggcaaugacacagggcuggaacugaccuugaccaacacgagcauacucaaucacaaauucugcaaccuaucagaugcucacaagaaagaccuauaugaucacgcacucaugagcauaaucucaacuuuccaccugucuauacccaauuucaaccaauacgaagcaaugaguugugacuucaaugggggcaaaaucagugugcaguacaaucuaagccauucuuaugcuauagaugcagcuaaucauugcggcacagucgcgaauggcaucuugcagacuuucaugagaauggcauggggugggagcuauauugcucuugacucaggccguggaaacugggacuguauuaugacuagcuaucaauaucugauuauucagaacacaaccugggaaaaucacugucaguucucaagaccaucuccuauugguuaucuuggucuccucucacagaggacuagagacauuuacauuagcaggagguugcugggcacauucacguggacacugucagacucugaggguaaugcuacaccaggagguuauugucugaccagguggauguuaauugaagcugaguugaaaugcuuuggaaacacagcaguagcaaaguguaaugaaaagcaugaugaagaauuuugcgacaugcucagacuuuuugauuuuaauaagcaggcuauaaguagauugaaaucugaagcacaaaugagcauccaacugaucaacaaagcagugaaugcuuugaucaacgaucaauuaauuaugaagaaccacuugcgagacaucauggggauuccauauuguaauuacagcaaguauugguaccucaaucauacaauaacuggcaaaaccucauuaccuaaauguuggcuuguaucuaaugguucauacuugaaugaaacccauuuuucugacgacaucgagcaacaagcugacaauaugaucacagagaugcuacaaaaggaauacauggagaggcaagggaaaacgccuuuggguuuaguugaucuguuuguguuuagcacaaguuuuuaucuaauuaguaucuuccuccgacuagucaagauuccaacccauagacacauugugggcaaaccauguccuaagccccacagguugaaccacaugggcauuuguucuugcggcuuauacaagcagccuggcguccccgugagauggaagagauagggacuagucccuguucccagagcccacuuuuuuuucuuuuuuugaaauaaaauagccugucuuucagaucuaaaaaaaaaaaaaaaaaaaaaaaaaaaaaaaaaaaaaaaaaaaaaaaaaaaaaaaaaaaaaaaaugcaucccccccccccccccccccccccccccccccaaaggcucuuuucagagccaccagaauu

SEQ ID NO: 2548 - RNA, 1768 nt, Artificial Sequence
  mRNA product Design a-2 comprising derived and/or modified sequence from LASV(Togo/2016/7082;Clade VI)__AMR44577__GPC (wt)
gggagaguccgcucagccagguugcagaagcggcuuagcguguguccuaaucuucucucugcguguagguaggccugugccgcaaacaagcuuaccauggggcaaauaauaaccuucuuccaggagguuccucauguuauagaggaggugaugaacauuguucugauagcacucucacuccuagcuauccugaaaggggucuacaauguggcaacaugugggauaauugggcuugugaccuuccucuuucucuguggaagaucuuguucacugaucuacaaaggcaguuaugagcugcaaacauuggaguuaaauauggagacccuaaacaugaccaugccucugucaugcacuaaaaauaguagccaccauuauauucgaguugggaacgagacuggcuuagagcugacauugaccaacaccagcauuauaaaucacaaauucuguaaccugucagaugcucacaaacguaaucuguaugaccacgcacucaugagcauccuuuccacauuccaucuguccaucccaaacuucaaccaguaugaggcgaugaguugugacuucaauggaggcaaaaucagugugcaauauaaucucagccaugcuuaugcaguugaugcugccgaacacugcggaacaguugcaaauggugugcuacaaacauucaugaggauggcuuggggaggaaguuacauugcacuugacucugggagaggcaauugggacuguauuaugacaagcuaccaauacuuaaucauucagaauacaacaugggaagaucacugccaauuuucaagaccuucuccuauugguuaucucggcuuauugucacaaagaacaagagacauuuauaucaguaggaggcugcuggguacauucaccuggacacuuucugacucagagggaaaugagacaccaggcggauacuguuuaacaagauggaugcugauagaggcugagcuaaaauguuuuggaaacacagcuguugcaaaguguaaugagaagcaugaugaggaauucugcgacauguuaagguuguuugacuucaacaaacaggcaauucagaggcucaaaucagaggcacaaaugagcauccaguuaauaaauaaagcagugaaugcauugauaaaugaucagcucauuaugaagaaccacuuaagggauaugauggguauaccguauugcaacuacaguaaguauugguaucucaaucacaccucaucagggagaacaucguugccuaaaugcuggcuuguuuccaauggaaguuaucugaaugagacccacuucucagaugauauugaacaacaggcagacaacaugauaacugaaauguuacaaaaggaauauaucgauaggcaggguaaaacaccuuuaggacuuguugaccuuuuuguuuucagcacgaguuuuuaccuuauaaguauauucuuacacuugauaaagauaccuacucauaggcacauaguuggaaagccaugccccaagccacaccgccucaaccacauggggaucugcucuuguggacuauacaagcagccuggugucccaaccagauggaagagauaaggacuagucccuguucccagagcccacuuuuuuuucuuuuuuugaaauaaaauagccugucuuucagaucuaaaaaaaaaaaaaaaaaaaaaaaaaaaaaaaaaaaaaaaaaaaaaaaaaaaaaaaaaaaaaaaaugcaucccccccccccccccccccccccccccccccaaaggcucuuuucagagccaccagaauu

SEQ ID NO: 2549 - RNA, 1768 nt, Artificial Sequence
  mRNA product Design a-2 comprising derived and/or modified sequence from LASV(KAK-428;Clade n.d. (VII))__ANH09740__GPC (wt)
gggagaguccgcucagccagguugcagaagcggcuuagcguguguccuaaucuucucucugcguguagguaggccugugccgcaaacaagcuuaccaugggucaaauagugaccuucuuccaggaaguaccucauguuauagaggaagugaugaacauaguucugauagcacuuucucucuuagccauccugaagggccucuacaauuuugccaccuguggaguaauuggacugauaacauuccuuuuacuuuguggaagauccuguucagcgaccuacaaaggccaauaugaacuccaaacuuuagaacuaaauauggagucccuaaacaugaccaugccacugucuugcacaaaaaacaacagucaucauuauaucagagcuggcaacaacacaggccuggaguugacccucaccaacaccagcauuauaucucauaaauucugcaaccuuucugaugcucacaagaagaaccuuuaugaccacacucuuaugaguauaauaacuaccuuucauuuguccaucccaaauuucaaccaguaugaggcaaugaguugugacuuuaacggugggaaaaucagcauacaguacaaccucagucacuccuacgcuggugaugcugcgcaacacuguggaacaguugcaaauggggugcugcaaaccuuuaugagaauggcuuggggagguaguuaucuggcccuugauucaggaagaagagguugggacugcauaauuuccaguuaccaauacuugaucauccaaaacacaacuugggaugaccauugccaguuuucaaggccauccccgaucggguaucuuggguuuguaucgcagaagaccagggacaucuauauaaguagaagacuccuuggaacuuuuacauggacacuuucagacuccgagggacaugacaugccaggugguuacugcuugaccagauggaugcucauugaagcugauuuaaaguguuuuggaaacacagcugucgcuaaguguaaugagaaacaugacgaggaguucugugacauguggagguuguuugacuuuaauaagcaagccauucaaaggcucaaagcagaggcccagaugaacauccagcucauaaauaaagcugucaaugcucucauaaaugaccaauugaugaugaaaaaccauuuaagggauaucaugggcauucccuauugcaauuacaguaaauucugguaucucaauaacaccacgacugggagaaccucacugccaagaugcuggcugauuucaaauggguccuacuuaaaugagacucacuucucagaugauauugaacagcaagcugacaauaugauaacugagauguugcagaaagaauacauggacagacaaggaaaaacaccgcuaggacugguugaucucuuuguauucaguacaagcuuuuaccucauuaccauuuucuuacaucuugugaaaauaccaacccacagacacauaguuggcaagccgugcccuaaaccacacagacugaaucacaugggcaucugcuccugugggcucuacaaacagccuggugugccaguacgauggaagagaugaggacuagucccuguucccagagcccacuuuuuuuucuuuuuuugaaauaaaauagccugucuuucagaucuaaaaaaaaaaaaaaaaaaaaaaaaaaaaaaaaaaaaaaaaaaaaaaaaaaaaaaaaaaaaaaaaugcaucccccccccccccccccccccccccccccccaaaggcucuuuucagagccaccagaauu

SEQ ID NO: 2550 - RNA, 1768 nt, Artificial Sequence; identical to SEQ ID NO: 2544
  mRNA product Design a-2 comprising derived and/or modified sequence from LASV(Pinneo-NIG-1969;Clade I)__AIT17836__GPC (wt)

SEQ ID NO: 2551 - RNA, 1768 nt, Artificial Sequence
  mRNA product Design a-2 comprising derived and/or modified sequence from LASV(ISTH0009-NIG-2011;Clade II)__AIT17404__GPC (wt)
gggagaguccgcucagccagguugcagaagcggcuuagcguguguccuaaucuucucucugcguguagguaggccugugccgcaaacaagcuuaccaugggacaaaucauaacauuuuuccaggaaguaccucaugucauagaggaagugaugaacauuguccugauugcucucagccuucuggcaauacugaaggggaucuacaauguugccaccuguggccuauuuggacugguguccuuucuccucuuaugugggagaucaugcucaacaacuuauaaggguguuuaugagcuacaaacucuagagcuggacauggcaagccuuaauaugacaaugccccuaucuugcacaaagaacaacagucaccauuacaucauggucggaaaugagacuggcuuggagcugacuuuaacaaauacaaguauuaucaaccacaaguuuuguaaccuuucugaugcacauaaaaagaaucucuaugaccaugcuuuaaugaguaucaucucaaccuuccacuuaucuauuccuaauuuuaaucaguaugaagcaaugaguugugacuucaauggggggaagauaaguguucaguacaaccuuagccacgcuuaugcuguagaugcagccaaucacugugggacuaucgccaauggcguucuucagacuuuuaugaggauggcuugggguggcaguuacauagcacuugauuccggaaaggggaguugggauuguauaaugacuuccuaccaauauuugauaauccagaacaccacuugggaagaucacugccaguuuucucgcccauccccuaucgguuaucuggggcuacugucacaaaggaccagagacauuuacaucagucgaagacuucuugggacuuuuacuuggacucucucugauucugaagguaaugaaacaccggguggguacugucuaacaagauggaugcugauugaggccgaguugaagugcuuugggaacacagcaguugcgaaaugcaaugagaaacaugaugaagaguuuugugacauguuaagacuguuugauuucaacaaacaagcuauaaggaggcuaaagacagaagcacagaugaguauccaacugauaaacaaagcagugaaugcauugaucaaugaccagcuuauuaugaagaaucacuugagagauaucaugggaauuccuuacugcaauuacagcaaguacugguaucuaaaucacacuguaacagggaagacaucguugccaaggugcuggcuugugucaaaugguuccuaccugaaugagacacauuuuucugaugacauugaacaacaggcagacaacaugauaacagaacuguugcaaaaggaguacauggacaggcaagggaaaacacccuuaggguuaguagaucuuuuugucuucagcaccagcuuuuaucucauuagcaucuuccuccaccugaucaaaaucccaacccacagacauaucacagggaaacccugcccuaaaccacacagacuuaaccacaugggcauaugcucauguggucuauacaaacauccugguguaccagucaaguggaaaagauagggacuagucccuguucccagagcccacuuuuuuuucuuuuuuugaaauaaaauagccugucuuucagaucuaaaaaaaaaaaaaaaaaaaaaaaaaaaaaaaaaaaaaaaaaaaaaaaaaaaaaaaaaaaaaaaaugcaucccccccccccccccccccccccccccccccaaaggcucuuuucagagccaccagaauu

SEQ ID NO: 2552 - RNA, 1768 nt, Artificial Sequence
  mRNA product Design a-2 comprising derived and/or modified sequence from LASV(ISTH2010-NIG-2012;Clade II)__AIT17482__GPC (wt)
gggagaguccgcucagccagguugcagaagcggcuuagcguguguccuaaucuucucucugcguguagguaggccugugccgcaaacaagcuuaccaugggacaaaucauaacauuuuuccaggaaguaccucaugucauagaggaagugaugaacauuguccugauugcucucagccuucuggcaauauugaaggggaucuacaauguugcuaccuguggccucuuuggauugguguccuuccuccucuuauguggaaggucauguucaacaacuuacaaggguguuuaugagcuacaaacucuggagcuagacauggcaagccuuaauaugacaaugcccuuaucuugcacgaagaacaacagccaccauuacaucauggucggaaaugaaacuggcuuggagcuaacuuuaacaaauacaaguaucaucaaccacaaauuuuguaaccucucugaugcacauaagaagaaucuuuaugaucaugcuuuaaugaguaucauuucaaccuuccacuuauccauuccuaacuuuaaucaguaugaagcaaugagcugugacuucaaugggggaaagauaaguguucaguacaaccuuagccacgcuuaugcuguagaugcagccaaccacugugggaccaucgccaauggcguucuucagacuuuuaugaggauggcuugggguggcagcuauauagcacuugauuccggaaaggggaguugggauuguauaaugacuuccuaccaauauuugauaauccaaaacaucacuugggaagaucacugccaguuuucucgcccauccccuaucgguuaccuagggcuacugucacaaaggaccagggacauuuacaucagucgaagacuucuugggacuuuuacuuggacucucucugauucugaagguaaugaaacaccggguggguauugccuaacaagauggaugcugauugaagccgaguugaaaugcuuugggaacacagcaguugcgaaaugcaaugagaaacaugaugaagaguuuugugacauguuaagauuguuugacuuuaacaaacaggcuauaaggaggcuaaagacagaagcacagaugaguauccaacugauaaacaaagcagugaacgcacugaucaaugaccagcugauuaugaagaaucauuugagagauaucauggggauuccuuacugcaauuacagcaaguacugguaucuaaaucauacuguaacagggaagacaucguugccaaggugcuggcuugugucaaaugguuccuaccugaaugagacacauuuuucugaugacauugaacaacaggcagacaacaugauaacagaacugcugcaaaaggaguacauagacaggcaagggaaaacaccuuuaggguuaguagaucuuuuugucuucagcaccagcuuuuaucucauuagcaucuuccuccaccugguuaaaaucccaacccacagacaugucguaggaaaacccugcccuaaaccacacagacucaaccacaugggcauauguucauguggucuauacaaacauccuggugugccagucaaguggaaaagauagggacuagucccuguucccagagcccacuuuuuuuucuuuuuuugaaauaaaauagccugucuuucagaucuaaaaaaaaaaaaaaaaaaaaaaaaaaaaaaaaaaaaaaaaaaaaaaaaaaaaaaaaaaaaaaaaugcaucccccccccccccccccccccccccccccccaaaggcucuuuucagagccaccagaauu

SEQ ID NO: 2553 - RNA, 1768 nt, Artificial Sequence
  mRNA product Design a-2 comprising derived and/or modified sequence from LASV(Lassa virus/H.sapiens-wt/NGA/2015/ISTH_0543;Clade II)__AVO03639__GPC (wt)
gggagaguccgcucagccagguugcagaagcggcuuagcguguguccuaaucuucucucugcguguagguaggccugugccgcaaacaagcuuaccaugggacaaaucauaacauuuuuccaggaagugccucaugucauagaggaaguaaugaacauuguccugauugcucucagccuucuggcaauauugaaggggaucuacaauguagccaccuguggccuuuuuggacugguguccuuucuccucuuauguggaagaucaugcucaacaacuuauaagggugucuacgagcuacaaacucuagagcuggacauggcaaaccuuaauaugacaaugccccuaucuugcacaaagaacaacagucaccauuacaucauggucggaaaugaaacuggcuuggagcugacuuuaacaaauacaaguauuaucaaccacaaguuuugcaaccuuucugaugcacauaaaaagaaucucuaugaccaugcuuuaaugaguaucaucucaaccuuccacuuaucuauuccuaauuuuaaucaguaugaagcaaugaguugugacuucaauggagggaagauaaguguucaguacaaccuuagccacacuuaugcuguagaugcagccaaucacugugggacuaucgccaauggcguucuucagacuuuuaugaggauggcuugggguggcaguuacauagcacuugauucuggaaaggggaguugggauuguauaaugacuuccuaccaauaucugguaauccagaacaccacuugggaagaucacugccaauuuucucgcccauccccuaucgguuaucuggggcuacugucacaaaggaccagagacauuuacaucagucgaagacuucuugggacuuucacuuggacucucucugauucugaagguaaugaaacaccggguggguacugucuaacaagauggaugcugauugaggccgaguugaagugcuuugggaacacagcaguugcgaaaugcaaugagaaacaugaugaagaguuuugugacauguuaagacuguucgauuuuaacaaacaagcuauaaggaggcugaagacagaagcacagaugaguauccaacuaauaaacaaagcagugaaugcauugaucaaugaccagcuuauuaugaagaaucacuuaagagauaucaugggaauuccuuacugcaauuacagcaaguacugguaucuaaaucacacugugacagggaagacaucguugccaaggugcuggcuuguaucaaaugguuccuaccugaaugagacacauuuuucugaugauauugaacaacaggcagacaacaugauaacagaacuguugcaaaaggaauacauagacaggcaagggaaaacacccuuaggguuaguagaucuuuuugucuucagcaccagcuuuuaucucauuagcauuuuccuccaccuggucaaaaucccaacucacagacauaucacagggaaacccugcccuaaaccacacagacuuaaccacaugggcauaugcucauguggucuauacaaacauccugguguaccagucaaguggaaaagauagggacuagucccuguucccagagcccacuuuuuuuucuuuuuuugaaauaaaauagccugucuuucagaucuaaaaaaaaaaaaaaaaaaaaaaaaaaaaaaaaaaaaaaaaaaaaaaaaaaaaaaaaaaaaaaaaugcaucccccccccccccccccccccccccccccccaaaggcucuuuucagagccaccagaauu

SEQ ID NO: 2554 - RNA, 1768 nt, Artificial Sequence
  mRNA product Design a-2 comprising derived and/or modified sequence from LASV(Lassa virus/H.sapiens-wt/NGA/2016/ISTH_0009;Clade II)__AVO03571__GPC (wt)
gggagaguccgcucagccagguugcagaagcggcuuagcguguguccuaaucuucucucugcguguagguaggccugugccgcaaacaagcuuaccaugggacaaaucauaacauuuuuccaggaaguaccucaugucauagaggaagugaugaacauuguccugauugcucucagccuucuggcaauacugaaggggaucuacaauguugccaccuguggccuccuuggacugguguccuuucuccucuuauguggaaggucaugcucaacaacuuauaaggguguuuaugagcuacaaacucuagagcuggacauggcaagccuuaauaugacaaugccccugucuugcacaaagaacaacagucaccauuacaucauggucggaaaugagacuggcuuggagcugacuuuaacaaauacaaguauuaucaaccacaaguuuuguaaccuuucugaugcacauaaaaagaaucucuaugaccaugcucuaaugaguaucaucucaaccuuccacuuaucuauuccuaauuuuaaccaguaugaagcaaugaguugugacuucaauggggggaggauaaguguucaguacaaccuuagccacucuuaugcuguagaugcagccaaucacugugggacuaucgccaauggcguucuucagacuuucaugaggauggcuugggguggcaguuacauagcacuugauuccggaaaggggaguugggauuguauaaugacuuccuaccaauacuugauaauccagaacaccacuugggaagaucacugccaguuuucucgcccauccccuaucgguuauuuggggcuacugucacagaggaccagagacauuuacaucagucgaagacuucuugggacuuuuacuuggacucucucugauucugaagguaaugaaacaccggguggguacugucuaacaagauggaugcugauugaggccgaguugaagugcuuugggaacacagcaguugcgaaaugcaaugagaaacaugaugaagaguucugugacauguuaagacuguuugauuuuaauaaacaagccauaaggaggcugaagacagaagcacagaugaguauccaacugauaaacaaagcagugaaugcauugaucaaugaccagcuuauuaugaagaaccacuugagagauaucaugggaauuccuuacugcaauuacagcaaguacugguaucuaaaucacacuguaacagggaagacaucguugccaaggugcuggcuugugucaaaugguuccuaccugaaugagacacauuuuuccgaugacauugaacaacaggcagacaacaugauaacagaauuguugcagaaggaguacauagacaggcaagggaaaacacccuugggguuaguagaucuuuuugucuucagcaccagcuuuuaucucauuagcaucuuccuccaccuggucaaaauuccaacccacagacauaucacagggaaacccugccccaaaccacacagacuuaaccacaugggcauaugcucauguggucuauacaaccauccuggugugccagucaaguggaaaagauagggacuagucccuguucccagagcccacuuuuuuuucuuuuuuugaaauaaaauagccugucuuucagaucuaaaaaaaaaaaaaaaaaaaaaaaaaaaaaaaaaaaaaaaaaaaaaaaaaaaaaaaaaaaaaaaaugcaucccccccccccccccccccccccccccccccaaaggcucuuuucagagccaccagaauu

SEQ ID NO: 2555 - RNA, 1768 nt, Artificial Sequence
  mRNA product Design a-2 comprising derived and/or modified sequence from LASV(Lassa virus/H.sapiens-wt/NGA/2016/ISTH_0017;Clade II)__AVO03567__GPC (wt)
gggagaguccgcucagccagguugcagaagcggcuuagcguguguccuaaucuucucucugcguguagguaggccugugccgcaaacaagcuuaccaugggacaaaucauaacauuuuuccaggaaguaccucaugucauagaggaagugaugaacauuguccugauugcucucagccuucuggcaauacugaaagggaucuacaauguugcuaccuguggccucuuuggguugguguccuuccuccucuuaugugggagaucaugcucaacaacuuacaaggguguuuaugagcuacaaacucuagagcuagacauggcaagccuuaauaugacaaugcccuuaucuugcacgaagaacaauucccaccauuacaucauggucggaaaugagacuggcuuggagcugacuuuaacaaauacaagcauuaucaaccacaaguuuuguaaccuuucugaugcacauaaaaagaaucuuuaugaccaugccuuaaugagcaucauuucaaccuuccacuuauccauuccuaacuuuaaucaguaugaagcaaugaguugugacuucaaugggggaaaaauaaguguucaguacaaccuuagccauacuuaugcuauagaugcagcuaaccacugugggaccauugccaauggcguucuucagacuuuuaugaggauggcuugggguggcaguuacauagcacuugauuccggaaagggcagcugggacugcauuaugacuuccuaccaauauuugauaauccagaacaccacuugggaagaucacugccaguuuucucgcccaucccccaucgguuaucuggggcuacugucacaaaggaccagagacauuuacaucagucgaagacuucuugggacuuuuacauggacccucucugacucugaagguaaugaaacaccagguggguacugucuaacgagauggaugcugauugaggccgaguugaagugcuuugggaacacagcaguugcaaaaugcaaugagaaacaugaugaagaguuuugugauauguuaagauuauuugacuuuaacaaacaagcuauaaggaggcugaagacagaagcgcagaugaguauccaacugauaaacaaagcagugaacgcacugaucaaugaccagcugauuaugaagaaucauuuaagagauaucaugggaauuccuuacugcaauuacagcaaguauugguaucuaaaucacacuguaacagggaagacaucauuaccaagaugcuggcuugugucgaaugguuccuaccugaaugagacacauuuuucugaugacauugaacaacaagcagauaacaugauaacagaacuuuugcaaaaggaauauauggauaggcaagggaaaacacccuuaggguuaguagaucuuuuugucuucagcaccagcuuuuaucucauuagcaucuuccuccaccuggucagaaucccaacucacagacaugucauagggaaacccugcccuaaaccacacagacucaaccacaugggcauaugcucauguggucuguacaaacauccuggugugccagucaaauggaaaagauagggacuagucccuguucccagagcccacuuuuuuuucuuuuuuugaaauaaaauagccugucuuucagaucuaaaaaaaaaaaaaaaaaaaaaaaaaaaaaaaaaaaaaaaaaaaaaaaaaaaaaaaaaaaaaaaaugcaucccccccccccccccccccccccccccccccaaaggcucuuuucagagccaccagaauu

SEQ ID NO: 2556 - RNA, 1768 nt, Artificial Sequence
  mRNA product Design a-2 comprising derived and/or modified sequence from LASV(Lassa virus/H.sapiens-wt/NGA/2018/ISTH_0959;Clade II)__AVV65099__GPC (wt)
gggagaguccgcucagccagguugcagaagcggcuuagcguguguccuaaucuucucucugcguguagguaggccugugccgcaaacaagcuuaccaugggacaaaucauaacauuuuuccaggaaguaccucaugucauagaggaagugaugaacauuguccugauugcucucagccuuuuggcaauacugaaggggaucuacaauguuguuaccuguggccucuuuggauugguguccuuccuccucuuauguggaagaucauguucaacaacuuacaaggguguuuaugagcuacaaacucuggagcuggacauggcaagccuuaauaugacaaugcccuuaucuugcacgaagaacaacagccaccauuacaucauggucggaaaugagacuggcuuggagcugacuuuaacaaauacaaguaucaucaaccauaaauuuuguaaccucucugaugcacauaaaaagaaucuuuaugaucaugcuuuaaugaguaucauuucaaccuuccacuuauccauuccaaacuuuaaucaguaugaagcaaugagcugugacuucaaugggggaaagauaaguguucaguacaaccuuagccacgccuaugcuauagaugcagccaaccacugcgggacuauugccaauggcguucuucaaacuuuuaugaggauggcuugggguggcagcuauauagcacuugauuccggaaaggggaguugggacuguauaaugacuuccuaccaguauuugauaauccaaaacaccacuugggaagaucauugucaguuuucucgcccauccccuaucgguuaccuagggcuacugucacaaaggaccagggacauuuacaucagucgaagacuucuugggacuuuuacuuggacucucucugauucugaagguaaugaaacaccggguggguauugucuaacaagauggaugcugauugaggccgaguugaaaugcuuugggaacacagcaguugcgaaaugcaaugagaaacaugaugaagaguuuugugacauguuaagauuguuugacuuuaacaaacaagcuauaaggaggcuaaagacagaagcacagaugaguauccagcugauaaacaaagcagugaacgcacugaucaaugaccagcugauuaugaaaaaucauuugagagauaucauggggauuccuuacugcaauuacagcaaguacugguaucuaaaucauacuguaacagggaagacaucguugccaaggugcuggcuugugucaaaugguuccuaccugaaugagacacauuuuucugaugacauugaacaacaagcagacaauaugauaacagaacugcugcaaaaggaguacauagacaggcaagggaaaacaccuuuaggguuaguagaucuuuuugucuucagcaccagcuuuuaucucauuagcaucuuccuccaccugguuaaaaucccaacccacagacaugucauaggaaaacccugcccuaaaccacacagacuuaaucacaugggcauauguucauguggucuauacaaacauccuggugugccagucaaguggaaaagauagggacuagucccuguucccagagcccacuuuuuuuucuuuuuuugaaauaaaauagccugucuuucagaucuaaaaaaaaaaaaaaaaaaaaaaaaaaaaaaaaaaaaaaaaaaaaaaaaaaaaaaaaaaaaaaaaugcaucccccccccccccccccccccccccccccccaaaggcucuuuucagagccaccagaauu

SEQ ID NO: 2557 - RNA, 1768 nt, Artificial Sequence
  mRNA product Design a-2 comprising derived and/or modified sequence from LASV(LASV003-NIG-2008;Clade II)__AIT17580__GPC (wt)
gggagaguccgcucagccagguugcagaagcggcuuagcguguguccuaaucuucucucugcguguagguaggccugugccgcaaacaagcuuaccauggggcaaaucauaacauuuuuccaggaagugccucaugucauagaagaagugaugaacauuguccugauugcccucagccuuuuggcaauauugaaagggaucuacaauguugcuacuuguggccucuuuggacugguguccuuucuucucuuauguggaagaucaugcucaacaacuuacaaagguguuuaugagcuacaaacucuagagcuagacauggcaagccuuaauaugacaaugcccuuaucuugcacaaagaauaauagccaccauuacaucauggucggaaaugaaacuggcuuagagcugacuuuaacaaauacaaguaucaucaaccacaaguuuuguaaccuuucugaugcacauaaaaagaaucuuuaugaccaugcuuuaaugagcaucaucucaaccuuccacuuauccauuccuaacuuuaaucaauaugaagcaaugaguugugacuucaauggggggaagauaaguguucaguacaaccuuagccacacuuaugcuguagaugcagcuaaccacugugggacuauugccaauggcguucuucagacuuucaugaggauggcuugggguggcagcuacauagcacuugauuccggaaaagggaguugggauuguauaaugacuuccuaccaauaucugauaauccagaacaccacuugggaagaucauugccaguuuucucgcccaucccccaucgguuaucuggggcuacugucacaaaggaccagggacauuuacaucagucgaagacuccuugggacuuuuacuuggacccucucugauucugaaagcaaugaaacuccagguggguauugucuaacaagguggauguugauugaggccgagcugaagugcuuugggaacacagcaguugcgaaaugcaaugaaaaacaugaugaagaguuuugugacaugcuaagauuguuugacuuuaacaaacaagcuauaaggaggcugaaagcagaagcacagaugagcauccaacuaauaaacaaagcagugaaugcacugaucaaugaccagcugauaaugaagaaucauuuaagagauaucaugggaauuccuuacugcaauuacagcaaauauugguacuugaaucacacuguaacagggaggacaucguuaccaagaugcuggcuugugucaaaugguuccuaccugaaugagacacauuuuucugacgacauugaacaacaagcagacaauaugauaacagaacuguugcagaaggaguacauggacaggcaagggaaaacaccuuuaggguuaguagaucuuuuugucuucagcaccagcuuuuaucucaucagcaucuuccuccaccugguuaaaaucccaacccacagacaugucauagggaaacccugcccuaaaccacacagacucaaccacaugggcauaugcucauguggucuguacaaacauccuggugugccagucaaguggaaaagauagggacuagucccuguucccagagcccacuuuuuuuucuuuuuuugaaauaaaauagccugucuuucagaucuaaaaaaaaaaaaaaaaaaaaaaaaaaaaaaaaaaaaaaaaaaaaaaaaaaaaaaaaaaaaaaaaugcaucccccccccccccccccccccccccccccccaaaggcucuuuucagagccaccagaauu

SEQ ID NO: 2558 - RNA, 1768 nt, Artificial Sequence
  mRNA product Design a-2 comprising derived and/or modified sequence from LASV(LASV035-NIG-2009;Clade II)__AIT17588__GPC (wt)
gggagaguccgcucagccagguugcagaagcggcuuagcguguguccuaaucuucucucugcguguagguaggccugugccgcaaacaagcuuaccauggggcaaaucauaacauuuuuccaggaagugccucaugucauugaggaggugaugaacauugucuuaauugcucucagucuucuagcaauacugaaagggauuuacaauguugcuaccuguggccucuuuggguugguguccuuucuucucuuauguggaaggucaugcucaacaacuuacaaggguguuuaugagcuucaaacucuagagcuggauauggcaagccuuaauaugacaaugcccuuauccugcacgaagaacaacagccaccacuacaucaugguuggaaaugagacuggcuuggagcugacuuugacaaacacaaguaucaucaaccacaaguucugcaaccuuuccgaugcacauaaaaagaaucucuaugaccaugcuuuaaugagcaucaucucaacuuuccaccuauccaucccuaacuuuaaucaguaugaagcaaugaguugugacuucaauggggggaagauaaguguucaguacaaccucagccacgcuuaugcuguagaugcagcuaaccauugugggaccauugccaauggaguucuucaaacuuuuaugaggauggcuugggguggcaguuacauagcacuugauucuggaaaggggaguugggauuguauaaugacuuccuaccaauauuugauaauccaaaacaccacuugggaagaucacugccaguuuucucgcccauccccuauugguuaucuggggcuacugucacaaagaaccagggauauuuacaucagccgaagacuccuuggaacuuuuacuuggacucucucugauucugaaggcaaugaaacaccggguggauauuguuuaacaagauggaugcugauugaggccgaauuaaagugcuuugggaacacagcaguugcgaaaugcaaugagaaacaugaugaagaguuuugugacauguuaagguuguuugacuuuaacaaacaggcuauaaggaggcuaaaggcagaagcacagaugagcauccaacuaauaaacaaagcagugaacgcacugaucaaugaccagcucauuaugaagaaucauuuaagagauaucaugggaauuccuuacugcaauuacagcaaguauugguauuuaaaucacacuguaacagggaagacaucguugccaagaugcuggcuuguaucaaaugguuccuaccugaaugaaacacauuuuucugaugacauugaacaacaagcagauaacaugauaacagaauuguuacagaaagaguacauugacaggcaagggaaaacacccuuaggguugguggaucuuuuugucuucagcacuagcuucuaccuuauuagcaucuuccuccaccugguuaaaaucccaacccacagacaugucauagggaagcccugccccaagccacacagacucaaccacaugggcauaugcucauguggucuguacaaacauccugguguaccagucaaguggaaaagauagggacuagucccuguucccagagcccacuuuuuuuucuuuuuuugaaauaaaauagccugucuuucagaucuaaaaaaaaaaaaaaaaaaaaaaaaaaaaaaaaaaaaaaaaaaaaaaaaaaaaaaaaaaaaaaaaugcaucccccccccccccccccccccccccccccccaaaggcucuuuucagagccaccagaauu

SEQ ID NO: 2559 - RNA, 1768 nt, Artificial Sequence
  mRNA product Design a-2 comprising derived and/or modified sequence from LASV(LASV1000-NIG-2009;Clade II)__AIT17782__GPC (wt)
gggagaguccgcucagccagguugcagaagcggcuuagcguguguccuaaucuucucucugcguguagguaggccugugccgcaaacaagcuuaccaugggacaaaucauaacauuuuuccaggaaguuccucaugucauagaggaagugaugaacauuguccugauugcucucagccuccuggcaauacuaaaagggaucuacaauguugcuaccuguggccucuuuggauugguguccuuccuccucuuauguggaagaucaugcucaacaacuuacaaggguguuuaugagcugcaaacucuagagcuagacauggcaagccuuaauaugacaaugccucuaucuugcacgaagaauaacagccaccauuacaucauggucggaaaugagacuggcuuggagcugacuuuaacaaacacaaguauuaucaaucacaaguuuuguaaccuuucugaugcacacaaaaagaaucuuuaugaccaugcuuuaaugagcaucaucucaaccuuccauuuaucuauucccaacuucaaucaguaugaagcaaugaguugugacuucaaugggggaaagauaaguguucaguacaaccuuagccacacuuaugcuguagaugcagccaaccacugugggacuaucgccaauggcguccuucagaccuuuaugaggauggcuugggguggcaguuacauagcacuugauuccggaaaggggaguugggacuguauaaugacuuccuaucaauaucugauaauccaaaacaccacuugggaagaucacugccaguuuucucgcccaucuccuaucgguuaucuggggcuacugucacaaaggaccagagacauuuacaucagucgaagacuucuugggacuuucacuuggacucucucugauucugaagguaaugaaacaccggguggguacugucuaacaagguggaugcugauugaggccgaguugaagugcuuugggaacacagcaguugcgaaaugcaaugagaaacaugaugaagaguuuugugacauguuaagauuguuugacuuuaacaaacaagcuauaaagaggcugaagacagaagcacagaugaguauucaacugauaaacaaagcagugaacgcacugaucaaugaccagcugauuaugaagaaucauuugagagacaucaugggaauuccuuacuguaauuacagcaaguauugguaucuaaaucacaccguaacagggaagacaucguugccaaggugcuggcuugugucaaaugguuccuaccugaaugagacacacuuuucugaugacauugaacaacaagcagauaacaugauaacagaacuauugcaaaaggaguacauagacaggcaagggaaaacacccuuaggguuaguagaccuuuuugucuuuagcaccagcuuuuaucucauuagcaucuuccuccaccuggucaaaaucccaacccauagacaugucguagggaaacccugcccuaaaccacacagacucaaccacaugggcauaugcucauguggucuauacaaacauccugguguaccagucaaauggaaaagauagggacuagucccuguucccagagcccacuuuuuuuucuuuuuuugaaauaaaauagccugucuuucagaucuaaaaaaaaaaaaaaaaaaaaaaaaaaaaaaaaaaaaaaaaaaaaaaaaaaaaaaaaaaaaaaaaugcaucccccccccccccccccccccccccccccccaaaggcucuuuucagagccaccagaauu

SEQ ID NO: 2560 - RNA, 1768 nt, Artificial Sequence
  mRNA product Design a-2 comprising derived and/or modified sequence from LASV(LASV221-NIG-2010;Clade II)__AIT17624__GPC (wt)
gggagaguccgcucagccagguugcagaagcggcuuagcguguguccuaaucuucucucugcguguagguaggccugugccgcaaacaagcuuaccaugggacaaaucauaacauuuuuccaggaaguaccucaugucauagaggaagugaugaacauuguccugauugcucucagccuucuggcaauacugaaagggaucuacaauguugcuaccuguggccucuuuggauugguguccuuccuccucuuauguggaagaucaugcucaacaacuuacaaggguguuuaugagcuacaaacucuagagcuagacauggcaagccuuaauaugacaaugcccuuaucuugcacgaagaacaacucccaccauuacaucauggucggaaaugagacuggcuuggagcugacuuugacaaauacaagcauuaucaaccacaaguuuuguaaccuuucugaugcgcauaaaaagaaucuuuaugaccaugcuuuaaugaguaucaucucaaccuuccacuuguccauuccuaacuuuaaucaguaugaagcaaugaguugugauuucaaugggggaaagauaaguguucaguacaaccuuagccacacuuaugcuauagaugcagccaaccacugugggaccauugccaauggcguucuucagacuuucaugagaauggcuugggguggcaguuacauagcacuugauuccggaaaggggagcugggauugcauaaugacuuccuaccaauauuugauaauccaaaacaccacaugggaagaucacugccaguuuucucgcccaucccccaucgguuaucuggggcuacuaucacaaagaaccagggacauuuacauuagucgaagacuucuugggacuuucacuuggacucucucugacucugaagguaaugaaacaccggguggguauugucuaacaagauggaugcugauugaggccgaguugaagugcuuuggaaacacagcaguugcaaaaugcaaugaaaaacaugaugaagaguuuugugauauguugagauuguuugacuucaacaaacaagcuauaaggaggcuaaagacagaagcacagaugaguauccaacugauaaacaaagcggugaacgcacugaucaaugaccagcugaucaugaagaaucauuugagagauaucaugggaauuccuuacugcaauuacagcaaguauugguaucuaaaucacacuguaacagggaagacaucguugccaagaugcuggcuugugucgaaugguucuuaccugaaugagacacauuuuucugaugacauugaacaacaagcagacaacaugauaacagaaauguugcaaaaggaguacauggacaggcaagggaaaacacccuuaggguuaguagaucuuuuugucuucagcaccagcuuuuaucucauuagcaucuuccuccaccuaguuaaaauuccaacccacagacaugucauagggaaacccugcccuaaaccacacagacucaaccacaugggcauauguucauguggucuguauaagcauccuggcgugccagucaaguggaaaagauagggacuagucccuguucccagagcccacuuuuuuuucuuuuuuugaaauaaaauagccugucuuucagaucuaaaaaaaaaaaaaaaaaaaaaaaaaaaaaaaaaaaaaaaaaaaaaaaaaaaaaaaaaaaaaaaaugcaucccccccccccccccccccccccccccccccaaaggcucuuuucagagccaccagaauu

SEQ ID NO: 2561 - RNA, 1768 nt, Artificial Sequence
  mRNA product Design a-2 comprising derived and/or modified sequence from LASV(LASV237-NIG-2010;Clade II)__AIT17638__GPC (wt)
gggagaguccgcucagccagguugcagaagcggcuuagcguguguccuaaucuucucucugcguguagguaggccugugccgcaaacaagcuuaccaugggacaaaucauaacauuuuuccaggaaguaccucaugucauagaggaagugaugaacauuguccugauugcucucagccuucuggcaauacugaaggggaucuacaauguugccaccuguggccuauuuggacugguguccuuucuccucuuauguggaagaucaugcucaacaacuuauaaggguguuuaugagcuacaaacucuagagcuggauauggcaagccuuaauaugacaaugccccuaucuugcacaaagaacaacagucaccauuacaucauggucggaaaugagacuggcuuggagcugacuuuaacaaauacaaguauuaucaaccacaaguuuuguaaccuuucugaugcacauaaaaaggaucucuaugaccaugcuuuaaugaguaucaucucaaccuuccacuuaucuauuccuaauuuuaaucaguaugaagcaaugaguugugacuucaauggggggaagauaaguguucaguacaaccuuagccacacuuaugcuguagaugcagccaaucacugugggacuaucgccaauggcguucuucagacuuuuaugaggauggcuugggguggcaguuacauagcacuugauuccggaaaggggaguugggauuguauaaugacuuccuaccaauauuugauaauccagaacaccacuugggaagaucacugccaguuuucucgcccauccccuaucgguuaucuggggcuacugucacaaaggaccagagacauuuacaucagucgaagacuucuugggacuuuuacuuggacucucucugauucugaagguaaugaaacaccggguggguacugucuaacaagauggaugcugauugaggccgaguugaagugcuuugggaacacagcaguugcgaaaugcaaugagaaacaugaugaagaguuuugugacauguuaagacuguuugauuucaacaaacaagcuauaaggaggcuaaagacagaagcacagaugaguauccaacugauaaacaaagcagugaaugcauugaucaaugaccagcuuauuaugaagaaucacuugagagauaucaugggaauuccuuacugcaauuacagcaaguacugguaucugaaucacacuguaacagggaagacaucguugccgaggugcuggcuugugucaaaugguuccuaccugaaugagacacauuuuucugaugacauugaacaacaggcagacaacaugauaacagaacuguugcaaaaggaguacauggacaggcaagggaaaacacccuuaggguuaguagaccuuuuugucuucagcaccagcuuuuaucucauuagcaucuuccuccaccugaucaaaaucccaacccacagacauaucacagggaaacccugcccuaaaccacacagacuuaaccacaugggcauaugcucauguggucuauacaaacauccugguguaccagucaaguggaaaagauagggacuagucccuguucccagagcccacuuuuuuuucuuuuuuugaaauaaaauagccugucuuucagaucuaaaaaaaaaaaaaaaaaaaaaaaaaaaaaaaaaaaaaaaaaaaaaaaaaaaaaaaaaaaaaaaaugcaucccccccccccccccccccccccccccccccaaaggcucuuuucagagccaccagaauu

SEQ ID NO: 2562 - RNA, 1768 nt, Artificial Sequence
  mRNA product Design a-2 comprising derived and/or modified sequence from LASV(LASV253-NIG-2011;Clade II)__AIT17670__GPC (wt)
gggagaguccgcucagccagguugcagaagcggcuuagcguguguccuaaucuucucucugcguguagguaggccugugccgcaaacaagcuuaccauggggcaaaucauaacauuuuuucaggaagugccucaugucauagaagaagugaugaacauuguccugauugcccucagccuucuggcaauauugaaagggaucuacaauguugcuacuuguggccucuuuggacugguguccuuucuucucuuauguggaagaucaugcucaacaacuuacaaagguguuuaugagcuacaaacucuagagcuagacauggcaagccuuaauaugacaaugcccuuaucuugcacaaagaauaauagccaccauuacaucauggucggaaaugaaacuggcuuagagcugacuuuaacaaauacaaguaucaucaaccacaaguuuuguaaccuuucugaugcacauaaaaagaaucuuuaugaccaugcuuuaaugagcaucaucucaaccuuccacuuauccauuccuaacuucaaucaauaugaagcaaugaguugugacuucaauggggggaagauaaguguucaguacaaccuuagccacacuuaugcuguagaugcagcuaaccacugugggacuauugccaauggcguucuucagacuuuuaugaggauggcuugggguggcagcuacauagcacuugauuccggaaaagggagcugggauuguauaaugacuuccuaccaauauuugauaauccagaacaccacuugggaggaucacugccaguuuucucgcccaucccccaucgguuaucuggggcuacugucacaaaggaccagggacauuuacaucagucgaagacuccuuggaacuuuuacuuggacccucucugauucugaaggcaaugaaacuccagguggguauugucuaacaagguggauguugauugaggccgaguugaagugcuuugggaacacagcaguugcgaaaugcaaugagaaacaugaugaagaguuuugugacaugcuaagauuguuugacuuuaauaaacaagcuauaaggagacugaaagcagaagcacagaugaguauucaacuaauaaacaaagcagugaaugcacugaucaaugaccagcugauaaugaagaaucauuuaagagauaucauggggauuccuuacugcaauuacagcaaguauugguaucugaaucacacuguaacaggaaggacaucguuaccaagaugcuggcuugugucaaaugguuccuaccugaaugagacacauuuuucugacgacauugaacaacaagcagacaacaugauaacagaacuguugcagaaggaguacauagacaggcaagggaaaacaccuuuaggguuaguggaucuuuuugucuucagcaccagcuuuuaucucaucagcaucuuccuccaccugguuaaaaucccaacccacagacauaucauagggaaacccugcccuaaaccacacagacucaaccacaugggcauaugcucauguggucuguacaaacauccuggugugccaguuaaguggaaaagauagggacuagucccuguucccagagcccacuuuuuuuucuuuuuuugaaauaaaauagccugucuuucagaucuaaaaaaaaaaaaaaaaaaaaaaaaaaaaaaaaaaaaaaaaaaaaaaaaaaaaaaaaaaaaaaaaugcaucccccccccccccccccccccccccccccccaaaggcucuuuucagagccaccagaauu

SEQ ID NO: 2563 - RNA, 1768 nt, Artificial Sequence
  mRNA product Design a-2 comprising derived and/or modified sequence from LASV(LASV254-NIG-2011;Clade II)__AIT17674__GPC (wt)
gggagaguccgcucagccagguugcagaagcggcuuagcguguguccuaaucuucucucugcguguagguaggccugugccgcaaacaagcuuaccaugggacaaaucauaacauuuuuccaggaaguaccucaugucauagaggaagugaugaacauuguucugauugcucucagccuucuggcaauauugaaagggaucuacaauguugcuaccuguggccucuuuggauugguguccuuucuucucuuauguggaagaucaugcucaacaacuuacaaggguguuuaugagcuacaaacucuagagcuagacaugacaaaccucaauaugacaaugccuuuauccugcacgaaaaacaacagccaccauuacaucauggucggaaaugagacuggucuggagcugacuuuaacaaauacaagcaucaucaaccacaaguuuuguaaccuuucugaugcacauaaaaagaaucuuuauaaccaugcuuuaaugaguauuauuucaacuuuccacuuauccauuccuaacuuuaaucaguaugaagcaaugaguugugacuucaaugggggcaagauaaguguccaguacaaccuuagccauaguuaugcuguggaugcagcuaaccacugugggaccauugccaauggcgugcuucagacuuuuaugaggauggcuugggguggcaguuacauagcacuugauuccggaaaggggaauugggauuguauaaugaccuccuaccaauauuugauaauccaaaacaccacuugggaagaucacugucaguuuucucgcccauccccuauugguuaucugggguuacugucacaaaggaccagggacauuuacaucagucgaagacuucuugggacuuuuacuuggacucucucugauucugaagguaaugaaacaccagguggguauugucuaacaagauggaugcugauugaggccgaguugaagugcuuugggaacacagcaguugcgaaauguaaugagaaacaugaugaggaguuuugugacauguuaagauuguuugacuuuaacaaacaagcuauaaggaggcugaagacagaggcacaggcgaauauccaacugauaaauaaagcagugaacgcacugaucaaugaccagcugaucaugaagaaucauuugagagauaucaugggaauuccuuacugcaauuacagcaaguauugguacuuaaaucacacuguaacagggaagacaucguugccaagaugcuggcuugugucaaauggcuccuacuugaaugagacacauuuuucugaugacauugaacaacaagcagacaauaugauaacagaacuguugcagaaggaguacauggacaggcaagggaaaacacccuuaggguugguagaucuuuuugucuucagcaccagcuuuuaucucauuagcaucuuccuccaccugguuaaaaucccaacccacagacaugucauagggaaacccugcccuaaaccacacagacucaaccacaugggcauaugcucauguggucuguacaaacauccugguguaccagucaaguggaaaagauagggacuagucccuguucccagagcccacuuuuuuuucuuuuuuugaaauaaaauagccugucuuucagaucuaaaaaaaaaaaaaaaaaaaaaaaaaaaaaaaaaaaaaaaaaaaaaaaaaaaaaaaaaaaaaaaaugcaucccccccccccccccccccccccccccccccaaaggcucuuuucagagccaccagaauu

SEQ ID NO: 2564 - RNA, 1768 nt, Artificial Sequence
  mRNA product Design a-2 comprising derived and/or modified sequence from LASV(Nig08-A19;Clade III)__ADU56618__GPC (wt)
gggagaguccgcucagccagguugcagaagcggcuuagcguguguccuaaucuucucucugcguguagguaggccugugccgcaaacaagcuuaccaugggacaaauugugacauucuuccaggaagucccucauguuaucgaggaagugaugaauaucguccucauagcauugucaauuuuggcaauccuaaaaggacucuacaacauugcuacauguggcuugauaggccuugucacauuccucuuacuuucuggaaggucauguucaaugaccuacaaaggaguuuaugaacuacagacccuugaacugaacaugaacacucugaauaugacuaugccgcuaucuuguacaaagaacaauagucaccacuacaucauggugggaaacgagacagggcuugagcucaccuuaaccaacacaagcuugcuccaucacaaauucugcaaccuaucagaugcucauaagaaaaaucuuuaugaucacacucucaugagcauuaucuccacauuccauuuguccauuccuaacuuuaaucaguaugaggcaaugaguugugauuuuaaugguggcaagaucacugugcaauacaaucugagucauagcuaugcaauugaugcagcaaaccauuguggcacaguggcaaacgguguguugcaaacauuuaugaggauggcuuggggagguaguuacauugcccuugauuccggacgugggaaaugggauuguauaaugaccaguuaucaauacuuaaucauccagaacacaaccugggaagaucauugucaauuuuccagaccauccccaauuggauaucuugggcuccucucacagagaacuagagacauauacauuaguagaagacuacuaggaacauuuacuuggacacuuucugacucagaaggaaaugagacaccaggagguuacugucucacuagauggauguugauugaggcugaacuaaaguguuucgggaauacagcuguagcuaagugcaaugaaaaacacgaugaagaguuuugugacaugcuaaggcuauuugacuucaauaagcaagcuauaaggagguuaaaggcagaggcccaaaugagcauacagcugaucaacaaagcaguuaaugcucuaauaaacgaucagcugaucaugaagaaucaucuaagggacaucaugggaauaccauacugcaauuacagcaaguacugguaucucaaucacaccucaacagggaggaccucauuaccgagauguuggcuuguuucaaaugggucauaucucaaugaaacucacuuuucagaugacauugagcagcaagcugauaacaugauaacugaaauguugcaaaaagaauaccuggacagacaaggaaagaccccauugggauugguagaucuuuuugucuucaguacaaguuuuuacuuaaucaguauuuuccuccaucuggucaaaauaccaacccauagacacauuguagggaagccuugccccaaaccucauagguugaaccacaugggcaucugcucuuguggucuauauaaacagccaggaguacccguuagauggaagagauaaggacuagucccuguucccagagcccacuuuuuuuucuuuuuuugaaauaaaauagccugucuuucagaucuaaaaaaaaaaaaaaaaaaaaaaaaaaaaaaaaaaaaaaaaaaaaaaaaaaaaaaaaaaaaaaaaugcaucccccccccccccccccccccccccccccccaaaggcucuuuucagagccaccagaauu

SEQ ID NO: 2565 - RNA, 1771 nt, Artificial Sequence
  mRNA product Design a-2 comprising derived and/or modified sequence from LASV(G1180-SLE-2010;Clade IV)__AIT17168__GPC (wt)
gggagaguccgcucagccagguugcagaagcggcuuagcguguguccuaaucuucucucugcguguagguaggccugugccgcaaacaagcuuaccaugggacagauagugacauucuuccaggaagugccucauguaauagaagaggugaugaacauuguucucauugcacugucuauacuagcagugcugaaaggucuguacaauuuugcaacauguggccucguuggucuacucacuuuccuccuguuguguggcagaucuugcacagcuagucguuacaaagggguuuaugagcuucagacucuggaacuaaacauggagacacucaauaugaccaugccucucuccugcacaaagaacaacagucaucauuauauaaugguggguaaugagacaggacuagaacugacuuugacuaacacgagcaucauuaaucauaaauuuugcaaucugucugaugcccacaaaaagaaccuuuaugaccacgcucuuaugagcauaauuucaacuuuccacuuauccauccccaacuucaaucaguaugaggcaaugagcugcgauuuuaaugggggaaagauuagugugcaguacaaccugagucacagcuaugcuggggaugcagccaaucauugugguacuguugcaaauggugucuugcagaccuucaugaggauggcuuggggugggagcuacauugcucuugacucaggccauggcaguugggacuguauuaugacuaguuaucaauaucugauaauccaaaauacaaccugggaagaucacugccaguucucaagaccaucucccauugguuaucucgggcuccuuucacaaagaaccagagauauuuacauuaguagaagacuacuaggcacauucacauggacacugucagauucugaaggcaaggacacaccagggggauauugucugaccagauggaugcuaauugaagcugaacuaaaaugcuucgggaacacagcuguggcaaaauguaaugagaagcaugaugaggaauuuugugacaugcugaggcuguuugacuucaacaaacaagccauucaaagguugaaagcugaagcacaaaugagcauucaauugaucaacaaggcaguaaaugcuuugauaaaugaccaacuuauaaugaagaaccauuuacgagacaucaugggaaucccauacuguaauuacagcaaguauugguaccucaaccacacaaccacugggaaaacaucacugccuaaguguuggcuuguaucaaaugguucauacuuaaaugagacccacuuuucugaugauauugagcaacaagcugacaacaugaucacugagauguuacagaaggaguauauggaaaggcagggcaagacaccauugggccuaguugaccucuuuguguuuagcacaaguuucuaucucauuagcaucuuccuucaccuggucaaaauaccaacucauaggcauauuguaggcaagucgugucccaaaccucauagauugaaucacaugggcauauguuccuguggacucuacaaacagcccggugugccugugaaauggaagagaugaggacuagucccuguucccagagcccacuuuuuuuucuuuuuuugaaauaaaauagccugucuuucagaucuaaaaaaaaaaaaaaaaaaaaaaaaaaaaaaaaaaaaaaaaaaaaaaaaaaaaaaaaaaaaaaaaugcaucccccccccccccccccccccccccccccccaaaggcucuuuucagagccaccagaauu

SEQ ID NO: 2566 - RNA, 1771 nt, Artificial Sequence
  mRNA product Design a-2 comprising derived and/or modified sequence from LASV(G1442-SLE-2011;Clade IV)__AIT17180__GPC (wt)
gggagaguccgcucagccagguugcagaagcggcuuagcguguguccuaaucuucucucugcguguagguaggccugugccgcaaacaagcuuaccaugggacaaauagugacauucuuucaggaagugccucaugugauagaggagguaaugaacauugugcucauugcacuauccauacuggcagugcugaagggucuauacaauguugcaacaugcggccugauugguuuagucaccuuccuauuguuaugugguaggucuugcacaacaacucuuuacaaaggaguuuacgaacuucagacucuggaauuaaacauggagacacucaauaugacuaugccucucucuuguacaaagaacaacagucaccacuauauaaggguggguaaugagacaggacuagaguugacccugaccaacacaagcaucaucaaucacaaguuuugcaaucuaucugaugcucacaaaaagaaccucuaugaucaugcuuugaugagcauaaucucgacuuuucacuuguccauucccaacuucaaccaauaugaggcaaugagcugugacuucaauggagggaagauuagugugcaguauaaccugagucacagcuaugcuggagaugcagccaaccauugugguacaguugcaaaugguguuuuacaaaccuucaugaggauggcuuggggugggaguuacaucgcccuugacucaggucguggcaauugggacuguauuaugacuaguuaucaauaccuaauaauucagaauacgaccugggaugaucauugccaauucucaagaccaucccccaucgguuaucuugggcuccucucacaaaggaccagagauguuuauaucaguagaagacugcuaggcacauucacauggacacugucagauucugaaggcaaggacacaccaggaggguacugucugaccagguggaugcuaauugaagcugaacugaaaugcuuuggcaacacagcuguagcaaaauguaaugagaaacaugaugaagaauucugugacaugcuaaggcuguuugacuucaauaaacaagcuauucagagguugaaagccgaagcacaaaugaguauucaguugaucaacaaagcagugaaugcuuugauaaaugaccaacuaauaaugaaaaaccaucuacgggacaucauggggauuccauacugcaauuacagcaaguacugguaucucaacaacacagccacugggaaaacaucacugcccaaauguuggcuuauaucaaauggcucauauuugaacgaaacucacuucucugaugacauugaacaggaagcugacaauaugaucacugagauguuacaaaaagaauacauggagaggcaggggaagacaccauuaggucugguugaccucuuuguguucagcacaaguuucuaucucauuagcaucuuccuucaccuagucaaaauaccaacucacaggcauauugugggcaaaucauguccuaaaccccauagguugaaucacauggguauuugcucuuguggacuuuauaaacaacccggugugccuguaagauggaagagaugaggacuagucccuguucccagagcccacuuuuuuuucuuuuuuugaaauaaaauagccugucuuucagaucuaaaaaaaaaaaaaaaaaaaaaaaaaaaaaaaaaaaaaaaaaaaaaaaaaaaaaaaaaaaaaaaaugcaucccccccccccccccccccccccccccccccaaaggcucuuuucagagccaccagaauu

SEQ ID NO: 2567 - RNA, 1771 nt, Artificial Sequence
  mRNA product Design a-2 comprising derived and/or modified sequence from LASV(G3010-SLE-2013;Clade IV)__AIT17344__GPC (wt)
gggagaguccgcucagccagguugcagaagcggcuuagcguguguccuaaucuucucucugcguguagguaggccugugccgcaaacaagcuuaccaugggacagauaguaacauucuuccaggaagugccucaugugauagaagaggugaugaacauuguucucauugcacugucuauauuagcagugcugaaaggucuguacaauuuugcaacauguggccucguugguuugguuaccuuccuccuguuaugugguaggucuugcacaaccagucuuuacaaagggguuuaugagcuucagacucuggaacuaaacauggagacacucaauaugaccaugccucucuccuguacaaagaacaacagucaucauuauauuaugguggguaaugagacaggacuagaacugaccuugaccaacacgagcaucauuaaucauaaauuuugcaaucugucugaugcccacaaaaagaaccucuauaaucacgcucuuaugagcauaauuucaacuuuccaucuguccauucccaacuucaaucaguaugaggcaaugagcugcgauuucaaugggggaaagauuagugugcaguacaaccugagucacaguuaugcuggggaugcggccagccauuguggcacuguugcaaauggugucuuacagacuuucaugaggauggcuugggguggaagcuauauugcucuugacucaggcuauggcaagugggacugcauuaugacuaguuaucaguaccugauaauucaaaauacaaccugggaagaucacugccaauucucaagaccaucucccauuggcuaucucgggcuccucucacaaaggaccagagauauuuauauuaguagaagacugcugggcacauucacauggacacugucggauucugaagguaaggacacaccagggggauauuguuugaccagauggaugcuaauugaagcugaacuaaagugcuucgggaacacagcuguagcaaaauguaaugagaagcaugaugaggaauuuugugacaugcugaggcuguuugacuucaacaaacaagccauucaaagauugaaaacugaagcacaaaugagcauucaguugaucaacaaggcaguaaaugccuuaauaaaugaccagcuuauaaugaagaaccaucuacgagacauaaugggaauuccauacuguaacuacagcaaguauugguaccucaaccacacaaccacugggaaaacaucacugccuaaauguuggcuuguaucaaauggcucauacuugaaugagacccacuuuucugaugauauugaacaacaggcugacaacaugaucacugagauguuacagaaagaguacauggagaggcaggggaagacaccauugggccuggucgaccuuuuuguguucagcacaaguuucuaucucaucaguaucuuucuucaccuagucaaaauaccaacucauagacauauuguaggaaagucgugucccaaaccucacagauugaaucacaugggcauauguuccuguggacucuacaaacagcccggugugccugugagauggaagagaugaggacuagucccuguucccagagcccacuuuuuuuucuuuuuuugaaauaaaauagccugucuuucagaucuaaaaaaaaaaaaaaaaaaaaaaaaaaaaaaaaaaaaaaaaaaaaaaaaaaaaaaaaaaaaaaaaugcaucccccccccccccccccccccccccccccccaaaggcucuuuucagagccaccagaauu

SEQ ID NO: 2568 - RNA, 1771 nt, Artificial Sequence
  mRNA product Design a-2 comprising derived and/or modified sequence from LASV(G502-SLE-2009;Clade IV)__AIT17126__GPC (wt)
gggagaguccgcucagccagguugcagaagcggcuuagcguguguccuaaucuucucucugcguguagguaggccugugccgcaaacaagcuuaccaugggacagauagugacauucuuccaggaaguaccucauguaauagaagaggugaugaacauuguucucauugcacugucuauacuagcagugcugaaaggucuguauaauuuugcaacauguggccucguuggucuacucaccuuccuccuauuguguggcaggucuugcacaaccggacuuuacaaagggguuuaugagcuucaaacucuggaacuaaacauggagacacucaauaugaccaugccucucuccugcacaaagaacaacagucaucauuauauaaugguggguaaugagacaggacuagaacugacuuugacuaacacgagcaucauuaaucauaaauuuugcaaucugucugaugcccacaaaaagaaccuuuaugaccacgcucuuaugagcauaauuucaacuuuccacuuguccauccccaacuucaaucaguaugaggcaaugagcugcgauuuuaaugggggaaagauuaguguacaguacaaccugagccacaguuaugcuggggaugcggcugaucauuguggcacuguugcaaauggugucuugcagacuuucaugaggauggccuggggugggagcuacauugcucuugacucaggucguggcaggugggacuguauuaugacuaguuaucaauauuugauaauccaaaauacaaccugggaagaucacugccaguucucaagaccaucucccaucgguuaucucgggcuccucucacaaagaacuagagacauuuacauuaguagaaggcuacuaggcacauucacauggacacugucagauucugaaggcaaggacacaccaggaggauauugucugacuagauggaugcugauugaggcugaauuaaaaugcuucgggaacacagcuguagcaaaauguaaugagaagcaugaugaggaauuuugugacaugcugaggcuguuugacuucaacaaacaagccauucaaagguuaaaagcugaagcacagaugagcauucaauugaucaacaaggcaguaaaugcuuugauaaaugaccaacuuguaaugaagaaccacuuacgggacaucaugggaauuccauacuguaauuacagcagguauugguaucucaaccacacaaccacuggaagaacaucacugccuaaauguuggcuugugucaaauggcucauacuuaaacgagacccacuuuucugaugauauugagcaacaagcugacaacaugaucacugagauguuacagaaggaauauauggaaaggcagggaaagacaccauuaggucugguugaccucuuuguguucagcacaaguuucuaucuuauuagcaucuuccuucaccuggucaagauaccaacucauaggcauauugugggcaagucgugucccaaaccucauagauugaaucacaugggcauauguuccuguggacucuacaaacagcccgguguaccugugaaauggaagagaugaggacuagucccuguucccagagcccacuuuuuuuucuuuuuuugaaauaaaauagccugucuuucagaucuaaaaaaaaaaaaaaaaaaaaaaaaaaaaaaaaaaaaaaaaaaaaaaaaaaaaaaaaaaaaaaaaugcaucccccccccccccccccccccccccccccccaaaggcucuuuucagagccaccagaauu

SEQ ID NO: 2569 - RNA, 1771 nt, Artificial Sequence
  mRNA product Design a-2 comprising derived and/or modified sequence from LASV(G733-SLE-2010;Clade IV)__AIT17154__GPC (wt)
gggagaguccgcucagccagguugcagaagcggcuuagcguguguccuaaucuucucucugcguguagguaggccugugccgcaaacaagcuuaccaugggacagauagugacauucuuccaggaagugccucauguaauagaagaggugaugaacauuguucucauugcacugucuauacuagcaguccugaagggucuguacaacuuugcaacauguggcaucguugguuuggucagcuuucuccuguuguguggcaggucuugcacaaccagucuuuacaaagggguuuaugagcuucagacucuggagcuaaacauggagacacuuaacaugaccaugccucucucuugcacaaagaacaacagucaucauuauauaauggugggcaaugagacgggauuggaacugaccuugaccaacacgagcauuaucaaucauaaauuuugcaaucuaucugaugcccauaagaagaaccucuaugaccacgcccuuaugaguauaaucucaaccuuccacuuguccauccccaacuucaaucaguaugaagcaaugagcugugauuucaaugggggaaagauuaguguacaguacaaccugagucacagcuaugcuggggaugcagccaaccauuguggcacaauugcaaauggugucuuacagacuuucaugaggauggccuggggugggagcuacauugcucuugacucaggccgugacaggugggacugcauaaugaccaguuaucaauaucugauaauccaaaacacaaccugggaagaucacugccaauucucaagaccaucucccaucgguuaucuugggcuccucucacaaaggaccagagauauauauauuaguaggagacuacugggcacauuuacauggacauugucagauucugaagguaaggacacaccaggaggguauugucuaaccagauggaugcugauugaggcugagcugaaaugcuuugggaacacagcuguggcaaaaugcaaugagaaacaugaugaggaauuuugugauaugcuaaggcuguuugacuucaacaaacaagccauucaaagguuaaaagcugaggcacaaaugagcauucaguugaucaacaaagcagugaaugcuuugauaaacgaccaacuaauaaugaagaaccaucuacgggacaucaugggaauuccauacuguaauuacagcaaguacugguaccucaaccacacaacuacugggaaaacaucacugccuaaauguuggcuugugucgaaugguucauacuuaaacgagacucacuuuucugaugacauugaacaacaagcugacaauaugaucacugagauguuacagaaggaauacauggaaaggcaggggaagacaccauugggucuaguugaccucuuuguguucagcacaaguuucuaucucauuagcaucuuccuucauuuggucaaaauaccaacucauaggcauguuguaggcaagucgugucccaagccucacagauugaaucacaugggcauaugcuccugcggacucuauggacagccugguguaccugugaaauggaagagaugaggacuagucccuguucccagagcccacuuuuuuuucuuuuuuugaaauaaaauagccugucuuucagaucuaaaaaaaaaaaaaaaaaaaaaaaaaaaaaaaaaaaaaaaaaaaaaaaaaaaaaaaaaaaaaaaaugcaucccccccccccccccccccccccccccccccaaaggcucuuuucagagccaccagaauu

SEQ ID NO: 2570 - RNA, 1771 nt, Artificial Sequence
  mRNA product Design a-2 comprising derived and/or modified sequence from MOPV/LASV reassortant(IGS-1;Clade IV)__AFY05576__GPC (wt)
gggagaguccgcucagccagguugcagaagcggcuuagcguguguccuaaucuucucucugcguguagguaggccugugccgcaaacaagcuuaccaugggacaaauagugacauucuuccaggaagugccucauguaauagaagaggugaugaacauuguucucauugcacugucuguacuagcagugcugaaaggucuguacaauuuugcaacguguggccuuguugguuuggucacuuuccuccuguugugugguaggucuugcacaaccagucuuuauaaagggguuuaugagcuucagacucuggaacuaaacauggagacacucaauaugaccaugccucucuccugcacaaagaacaacagucaucauuauauaauggugggcaaugagacaggacuagaacugaccuugaccaacacgagcauuauuaaucacaaauuuugcaaucugucugaugcccacaaaaagaaccucuaugaccacgcucuuaugagcauaaucucaacuuuccacuuguccauccccaacuucaaucaguaugaggcaaugagcugcgauuuuaaugggggaaagauuagugugcaguacaaccugagucacagcuaugcuggggaugcagccaaccauugugguacuguugcaaaugguguguuacagacuuuuaugaggauggcuuggggugggagcuacauugcucuugacucaggccguggcaacugggacuguauuaugacuaguuaucaauaucugauaauccaaaauacaaccugggaagaucacugccaauucucgagaccaucucccaucgguuaucucgggcuccucucacaaaggacuagagauauuuauauuaguagaagauugcuaggcacauucacauggacacugucagauucugaaggugaagacacaccagggggauauugucugaccagguggaugcuaauugaggcugaacuaaaaugcuucgggaacacagcuguggcaaaauguaaugagaagcaugaugaggaauuuugugacaugcugaggcuguuugacuucaacaaacaagccauucaaagguugaaagcugaagcacaaaugagcauucaguugaucaacaaagcaguaaaugcuuugauaaaugaccaacuuauaaugaagaaccaucuacgggacaucaugggaauuccauacuguaauuacagcaaguauugguaccucaaccacacaacuacugggagaacaucacugcccaaauguuggcuuguaucaaaugguucauacuugaacgagacccacuuuucugaugauauugaacaacaagcugacaauaugaucacugagauguuacagaaggaguauauggagaggcaggggaagacaccauugggucuaguugaccucuuuguguucagcacaaguuucuaucuuauuagcaucuuccuucaccuagucaaaauaccaacucauaggcauauuguaggcaagucgugucccaaaccucacagauugaaucauaugggcauuuguuccuguggacucuacaaacagccuggugugccugugaaauggaagagaugaggacuagucccuguucccagagcccacuuuuuuuucuuuuuuugaaauaaaauagccugucuuucagaucuaaaaaaaaaaaaaaaaaaaaaaaaaaaaaaaaaaaaaaaaaaaaaaaaaaaaaaaaaaaaaaaaugcaucccccccccccccccccccccccccccccccaaaggcucuuuucagagccaccagaauu

SEQ ID NO: 2571 - RNA, 1771 nt, Artificial Sequence
  mRNA product Design a-2 comprising derived and/or modified sequence from LASV(LM765-SLE-2012;Clade IV)__AIT17814__GPC (wt)
gggagaguccgcucagccagguugcagaagcggcuuagcguguguccuaaucuucucucugcguguagguaggccugugccgcaaacaagcuuaccaugggacaaauagugacauucuuccaggaagugccccaugucauagaagaggugaugaacauuguucucauugcacuguccauacuagcagugcugaaaggucuguacaauuuugcaacauguggccucguuggcuuggucacuuuccuccuguuguguggcaggucuuguacaacuagccuuuacaaagggguuuaugagcuucagacucuggaacuaaacauggaaacacucaauaugaccaugccucucuccugcacaaagaacaauagucaucauuauauaauggugggcaaugagacaggacuagaacugaccuugaccaacacgagcauuauugaucauaaauuuugcaaucugucugaugcccacagaaagaaccucuaugaccacgcucuuaugagcauuaucucaacuuuccacuugucuaucccuaacuucaaucaguaugaggcaaugagcugcgauuucaaugggggaaagauuaguguacaguacaaccugagucacagcuaugccaaggacgcagccgaccauuguggaacuguugcaaaugguguauuacagacuuucaugaggauggcuuggggugggagcuacaucgcucuugacucaggccguggcaggugggacuguauuaugacuaguuaucaauaucugauaauccaaaauacaaccugggaagaucacugccaauucucgagaccaucucccaucgguuaucucgggcuccucucacagaggaccagagauauuuauauuaguagaaggcuacuaggcacauucacauggacacugucagauucugaaggcaaggacacaccagggggauauugucuaaccagauggaugcuaauugaggcugagcuaaagugcuucgggaauacagcuguggcaaaauguaaugagaagcaugaugaggaauuuugugacaugcugagguuguuugacuuuaacaagcaagccauucaaagguugaaagcugaagcacaaaugagcauucaguugaucaacaaagcaguaaaugcuuugauaaaugaccaacuuauaaugaagaaccaucuacgggacaucauggggauuccauacuguaauuacagcaaguauugguaccucaaccacacaacuacuggaaaaacaucacugcccaaguguuggcuuguaucaaaugguucauaccugaacgagacccacuuuucugaugacauugaacaacaagcugacaacaugaucaccgagauguuacagaaggaguauauggagaggcaggggaagacaccauugggucugguugaccucuuuguguucagcacaagcuucuaucucauuagcaucuuccuucaccuaguuaaaauaccaacucauaggcauauuguaggcaagccgugucccaaaccucacagguugaaucauaugggcauuuguuccuguggacucuauaaacagccuggugugccuguaaaauggaagagaugaggacuagucccuguucccagagcccacuuuuuuuucuuuuuuugaaauaaaauagccugucuuucagaucuaaaaaaaaaaaaaaaaaaaaaaaaaaaaaaaaaaaaaaaaaaaaaaaaaaaaaaaaaaaaaaaaugcaucccccccccccccccccccccccccccccccaaaggcucuuuucagagccaccagaauu

SEQ ID NO: 2572 - RNA, 1771 nt, Artificial Sequence
  mRNA product Design a-2 comprising derived and/or modified sequence from LASV(LM776-SLE-2012;Clade IV)__AIT17824__GPC (wt)
gggagaguccgcucagccagguugcagaagcggcuuagcguguguccuaaucuucucucugcguguagguaggccugugccgcaaacaagcuuaccaugggacagauagugacauucuuccaggaagugccucauguaauagaagaggugaugaacauuguccucauugcgcugucuauauuagcagugcugaaaggucuguacaacuuugcaacauguggccucguugguuugguuacuuuccuccuguuguguggcaggucuugcacaaccaguguuuauaaaggggucuaugagcuucagacucuggaguuaaacauggagacacucaauaugaccaugccucucuccugcacaaagaauaacagucaucauuauauaaugguagguaaugagacaggacuagaacugaccuugaccaacacaagcauuauuaaucauaaauuuugcaaucugucugaugcccacaaaaagaaccucuaugaccaugcccuuaugagcauaauuucaacuuuccacuuguccauccccaacuucaaucaguaugaagcaaugagcugugauuucaaugggggaaagauuagugugcaguacaaccugagucacagcuaugcuggggaugcugccaaccauuguggcacuguugcaaauggugucuuacagacuuucaugaggauggcuuggggugggagcuacauugcucuugacucaggccauggcaagugggacuguauuaugacuaguuaucaauaucugauaauccaaaauacaaccugggaagaucacugccaauucucaagaccaucuccuaucgguuaucuugggcuucucucacaaaggaccagagauauuuauaucaguagaagacuacuaggcacauucacauggacacugucagauucugaaggcaaggacacaccagggggauauugucugaccagauggaugcugauugaagcugaauuaaaaugcuucgggaacacagcuguagcaaaauguaaugagaagcaugaugaggaauuuugugacauguugaggcuguuugacuucaacaaacaagccauucaaagguugaaagcugaagcacaaaugagcauucaguugaucaacaaggcaguaaaugccuugauaaaugaucaacuuauaaugaagaaccaucuacgggacaucaugggaaucccauacuguaauuacagcaaauauugguaccucaaccacacaacuacugggaaaacaucacugccuaaauguuggcuugucucaaaugggucauacuugaacgagacccacuuuucugaugauauugaacaacaagcugacaacaugaucacugagauguuacagaaggaguauauggagaggcaggggaagacaccauugggccuaguugaccucuuuguguucagcacaaguuucuaucucaucagcaucuuccuucaccuagucaaaauaccaacucauaggcauauuguaggcaagucguguccuaaaccucacagauugaaucacaugggcauauguuccuguggacucuacaaacagcccggugugccugugagauggaaaagaugaggacuagucccuguucccagagcccacuuuuuuuucuuuuuuugaaauaaaauagccugucuuucagaucuaaaaaaaaaaaaaaaaaaaaaaaaaaaaaaaaaaaaaaaaaaaaaaaaaaaaaaaaaaaaaaaaugcaucccccccccccccccccccccccccccccccaaaggcucuuuucagagccaccagaauu

SEQ ID NO: 2573 - RNA, 1771 nt, Artificial Sequence
  mRNA product Design a-2 comprising derived and/or modified sequence from LASV(Mad39;Clade IV)__ANH09722__GPC (wt)
gggagaguccgcucagccagguugcagaagcggcuuagcguguguccuaaucuucucucugcguguagguaggccugugccgcaaacaagcuuaccauggggcaaauugugacauucuuucaggaagugccucauguaauugaggaggugaugaacauuguacucauugcacuauccauacuggcagugcuaaagggucuguacaauguugcaacauguggccucauuggcuugguuaccuuccuccugcugugugguagaucuuguacaaccacucuuuauaaagggguuuaugagcuucaagcucuggaacuaaacauggaaacacucaacaugacuaugccucucucuugcacaaaaaacaacucucaucacuauauaagggugggcaaugaaacaggccuagaacugaccuugaccaacacaagccucauaaaucacaaguucugcaaucugucugaugcucacaaaaagaaccucuaugaucaugcucuuaugagcauaaucucaacuuuccauuuguccauccccaacuucaaucaguaugaagcaaugagcugugauuucaaugaugggaagaucaguguacaguacaaccuaagccacaccuacgcuggggauacagccaaccacugugguacuguugcgaacgguguuuuacagacuuucaugaggauggcuuggggugggaguuacauugcucuugauucaggccgugguggaugggacugcauuaugaccagcuaucaauauuugauaauucagaacacaaccugggaagaucacugucaguucucaagaccaucucccaucggguaccuugggcuccucucacaaagaaccagagacauuuauaucaguagaagacuacugggcacauucacauggacacuaucagauucugaggguaaagacacaccagggggguacugucuaacuagguggaugcugauugaagcugaauugaaaugcuuuggcaacacagcuguagcaaaaugcaaugagaagcaugaugaggaauuuugugauauguugaggcuauuugacuuuaacaaacaagccauucaaagauugaaagcugaagcacaaaugaguauucagcugaucaacaaagcagugaaugccuugauaaaugaucaacugauaaugaaaaaccauuugcgggacauuauggggauuccguacugcaacuacagcaaguauugguaucuuaaucacacagucaccggaaagacaucauuacccaaaugcuggcuuguaucaaauggcucauaccuaaacgagacccacuucucugaugauauugagcagcaagcugauaacaugauuacugagaugcuacagaaggaauacauggagagacaggggaagacaccacuuggucugguugaccucuuuguauuuagcacaaguuucuaucucauuagcauuuuccuucaccuagugaaaauaccaacucauaggcauguugugggcaaaccguguccuaaaccucacagacugaaccacauggguauauguucuuguggguucuacaagcaaccuggugugccugugagauggaagagaugaggacuagucccuguucccagagcccacuuuuuuuucuuuuuuugaaauaaaauagccugucuuucagaucuaaaaaaaaaaaaaaaaaaaaaaaaaaaaaaaaaaaaaaaaaaaaaaaaaaaaaaaaaaaaaaaaugcaucccccccccccccccccccccccccccccccaaaggcucuuuucagagccaccagaauu

SEQ ID NO: 2574 - RNA, 1771 nt, Artificial Sequence
  mRNA product Design a-2 comprising derived and/or modified sequence from LASV(Z0947-SLE-2011;Clade IV)__AIT17840__GPC (wt)
gggagaguccgcucagccagguugcagaagcggcuuagcguguguccuaaucuucucucugcguguagguaggccugugccgcaaacaagcuuaccaugggacaaauagugacauucuuccaggaagugccccaugucauagaagaggugaugaacaucguucucauugcacugucuauacuagcaguguugaaaggucuguacaauuuugcaacauguggccucguuggcuuggucacuuuccuccuguuguguggcaggucuugcacaauuagccuuuacaaggggguuuaugagcuucagacucuggaacuaaacauggaaacacucaauaugaccaugccucucuccuguacaaagaacaacagucaucauuauauaauggugggcaaugagacaggacuagaacugaccuugaccaacacgagcauuauuaaucauaaauuuugcaaucugucugaugcccacaaaaagaaccucuaugaccaugcucuuaugagcauuaucucaacuuuccacuuguccaucccuaacuucaaucaguaugaggcaaugagcugcgauuucaaugggggaaagauuagugugcaguacaaccugagucacagcuaugccggggacgcagccaaccauugugguacuguugcaaaugguguauuacagacuuucaugaggauggcuuggggugggagcuacaucgcucuugacucaggccgugacaggugggacuguauuaugacuaguuaucaauaucugauaauccaaaauacaaccugggaagaucacugccaauucucgagaccaucucccaucgguuaucucgggcuccucucacaaaggaccagagauauuuauauuaguagaaggcuacuaggcacauucacauggacacugucagauucugaaggcaaggacacaccagggggauauugucuaaccagauggaugcuaauugaggcugagcuaaagugcuucgggaacacagccguggcaaaauguaaugagaagcaugaugaggaauuuugugacaugcugagguuguuugacuuuaacaaacaagccauucaaagguugaaagcugaagcacaaaugagcauucaguugaucaacaaagcaguaaaugcuuugauaaaugaccaacuuauaaugaagaaccaucuacgggacaucauggggauuccauacuguaauuacagcaaguauugguaccucaaccacacaacuacuggaaaaacaucacugcccaaguguuggcuuguaucaaaugguucauaccugaacgagacccacuuuucugaugacaucgaacaacaagcugacaacaugaucacugagauguuacagaaggaguauauggagaggcaggggaagacaccauugggucugguugaccucuuuguguucagcacaagcuucuaucucauuagcaucuuccuucaccuaguuaaaauaccaacucauaggcauauuguaggcaagccgugucccaaaccucacagguugaaucauaugggcauuuguuccuguggacucuauaaacagccuggugugccugugaaauggaagagaugaggacuagucccuguucccagagcccacuuuuuuuucuuuuuuugaaauaaaauagccugucuuucagaucuaaaaaaaaaaaaaaaaaaaaaaaaaaaaaaaaaaaaaaaaaaaaaaaaaaaaaaaaaaaaaaaaugcaucccccccccccccccccccccccccccccccaaaggcucuuuucagagccaccagaauu

SEQ ID NO: 2575 - RNA, 1771 nt, Artificial Sequence
  mRNA product Design a-2 comprising derived and/or modified sequence from LASV(Josiah;Clade IV)__NP_694870__GPC (opt1) R7280
gggagaguccgcucagccagguugcagaagcggcuuagcguguguccuaaucuucucucugcguguagguaggccugugccgcaaacaagcuuaccaugggccagaucgugaccuucuuccaggaggucccccacgugaucgaggaggugaugaacaucguccugaucgcccucagcgugcuggccgugcugaaggggcucuacaacuucgcgaccugcggccuggucgggcuggugacguuccuccugcugugcggccgcuccugcaccaccagccucuacaaggggguguacgagcugcagacccuggagcucaacauggagacgcugaacaugaccaugccgcuguccugcaccaagaacaacagccaccacuacaucauggucggcaacgagaccggccucgagcugacgcugaccaacaccuccaucaucaaccacaaguucugcaaccucagcgacgcccacaagaagaaccuguacgaccacgcccugauguccaucaucagcaccuuccaccucuccauccccaacuucaaccaguacgaggccaugagcugcgacuucaacgggggcaagaucuccgugcaguacaaccugagccacuccuacgccggggacgcggccaaccacugcggcacgguggccaacgggguccugcagaccuucaugcggauggccuggggcggcagcuacaucgcgcucgacuccgggcgcggcaacugggacugcaucaugaccagcuaccaguaccugaucauccagaacaccacgugggaggaccacugccaguucucccggcccagccccaucggguaccugggccuccugucccagcgcacccgggacaucuacaucagccgccggcugcucggcaccuucaccuggacgcugagcgacuccgaggggaaggacaccccgggcggguacugccugacccgcuggaugcucaucgaggccgagcugaagugcuucggcaacaccgccguggccaagugcaacgagaagcacgacgaggaguucugcgacaugcugcggcuguucgacuucaacaagcaggccauccagcgccugaaggcggaggcccagaugagcauccagcugaucaacaaggccgugaacgcccucaucaacgaccagcugaucaugaagaaccaccuccgggacaucauggggauccccuacugcaacuacuccaaguacugguaccucaaccacacgaccaccggccgcaccagccugcccaagugcuggcuggucuccaacggcagcuaccucaacgagacgcacuucuccgacgacaucgagcagcaggccgacaacaugaucaccgagaugcugcagaaggaguacauggagcggcaggggaagacgccccugggccucguggaccuguucguguucagcaccuccuucuaccugaucagcaucuuccugcaccucgucaagaucccgacccaccgccacaucguggggaaguccugccccaagccccaccggcugaaccacaugggcaucugcagcugcgggcuguacaagcagcccggcgugccggucaaguggaagcgcugaggacuagucccuguucccagagcccacuuuuuuuucuuuuuuugaaauaaaauagccugucuuucagaucuaaaaaaaaaaaaaaaaaaaaaaaaaaaaaaaaaaaaaaaaaaaaaaaaaaaaaaaaaaaaaaaaugcaucccccccccccccccccccccccccccccccaaaggcucuuuucagagccaccagaauu

SEQ ID NO: 2576 - RNA, 1768 nt, Artificial Sequence
  mRNA product Design a-2 comprising derived and/or modified sequence from LASV(LP;Clade I)__AAF86701__GPC (opt1)
gggagaguccgcucagccagguugcagaagcggcuuagcguguguccuaaucuucucucugcguguagguaggccugugccgcaaacaagcuuaccaugggccagaucaucaccuucuuccaggaggugccccacgucaucgaggaggugaugaacaucgugcugaucgcccucagccugcuggccauccucaaggggcuguacaacaucgcgaccugcggcaucaucgggcuggucgccuuccucuuccugugcggcaaguccugcagccugacgcucaagggcggguacgagcugcagacccuggagcucaacauggagacccugaacaugaccaugccgcuguccugcacgaagaacagcucccaccacuacauccgcgugggcaacgagaccgggcucgagcugacccugaccaacacgagcaucaucaaccacaaguucugcaaccucuccgacgcccacaagaagaaccuguacgaccacgcccugaugagcaucaucuccaccuuccaccucagcauccccaacuucaaccaguacgaggccauguccugcgacuucaacggcgggaagaucagcgugcaguacaaccugucccacagcuacgcgggcgacgccgccgagcacugcgggaccgucgccaacggcgugcugcagaccuucaugcggauggcguggggcgggcgcuacaucgcccucgacuccggcaaggggaacugggacugcaucaugacgagcuaccaguaccugaucauccagaacaccaccugggaggaccacugccaguucucccggcccagccccaucggcuaccugggccuccugucccagcgcacccgggacaucuacaucagccgccggcugcucgggacguucaccuggacccugagcgacuccgagggcaacgagacccccgggggcuacugccugacgcgcuggaugcucaucgaggccgagcugaagugcuucgggaacaccgccguggccaagugcaacgagaagcacgacgaggaguucugcgacaugcugcggcuguucgacuucaacaagcaggcgauccgccggcugaaggccgaggcccagaugagcauccagcugaucaacaaggccgucaacgcccucaucaacgaccagcugaucaugaagaaccaccuccgcgacaucaugggcauccccuacugcaacuacuccaaguacugguaccucaaccacaccagcuccggccggaccagccugcccaagugcuggcugaucuccaacgggagcuaccucaacgagacgcaguucuccgacgacaucgagcagcaggcggacaacaugaucaccgagaugcugcagaaggaguacaucgagcgccagggcaagaccccgcuggggcucguggacaucuucaucuucagcaccuccuucuaccugaucagcaucuuccugcaccugaucaagaucccgacgcaccggcacaucgugggcaagcccugccccaagccccaccgccucaaccacaugggggucugcuccugcggccuguacaagcacccgggcgugcccaccaaguggaagcggugaggacuagucccuguucccagagcccacuuuuuuuucuuuuuuugaaauaaaauagccugucuuucagaucuaaaaaaaaaaaaaaaaaaaaaaaaaaaaaaaaaaaaaaaaaaaaaaaaaaaaaaaaaaaaaaaaugcaucccccccccccccccccccccccccccccccaaaggcucuuuucagagccaccagaauu

SEQ ID NO: 2577 - RNA, 1768 nt, Artificial Sequence
  mRNA product Design a-2 comprising derived and/or modified sequence from LASV(803213;Clade II)__AAF86703__GPC (opt1)
gggagaguccgcucagccagguugcagaagcggcuuagcguguguccuaaucuucucucugcguguagguaggccugugccgcaaacaagcuuaccaugggccagaucaucaccuucuuccaggaggugccccacgucaucgaggaggugaugaacaucgugcugaucgcccucagccugcuggccauccucaaggggaucuacaacgucgcgaccugcggccuguucgggcugaucuccuuccuccugcugugcggccgcagcugcuccgugacguacaaggggguguacgagcuccagacccuggagcugaacauggccaaccucaacaugaccaugccgcugagcugcaccaagaacaacucccaccacuacaucauggucggcaacgagacgggccuggagcucacccugaccaacaccagcaucaucaaccacaaguucugcaaccuguccgacgcccacaagaagaaccucuacgaccacgcccugaugagcaucaucuccacguuccaccugagcauccccaacuucaaccaguacgaggccauguccugcgacuucaacgggggcaagaucagcgugcaguacaaccucucccacagcuucgcgguggacgccgccaaccacugcgggaccaucgccaacggcguccugcagaccuucaugcggauggcguggggcggguccuacaucgcccuggacagcggcaaggggaacugggacugcaucaugaccuccuaccaguaccucaucauccagaacacgaccugggaggaccacugccaguucagccgccccucccccaucggcuaccuggggcugcucagccagcggacccgcgacaucuacaucagccggcgccugcugggcaccuucacguggacccucuccgacagcgagggcaacgaggcccccgggggcuacugccugacccgguggaugcugaucgaggccgagcucaagugcuucgggaacaccgccguggcgaagugcaacgagaagcacgacgaggaguucugcgacaugcugcgccuguucgacuucaacaagcaggccaucaagcggcucaagacggaggcccagauguccauccagcugaucaacaaggccgugaacgcccugaucaacgaccagcucaucaugaagaaccaccuccgcgacaucaugggcauccccuacugcaacuacagccgguacugguaccugaaccacaccgucaccgggaagaccucccugccccgcugcuggcuggugagcaacggcuccuaccugaacgagacgcacuucagcgacgacaucgagcagcaggcggacaacaugaucaccgagaugcuccagaaggaguacauggaccggcagggcaagaccccgcuggggcugguggaccucuucgucuucuccaccagcuucuaccugaucuccaucuuccugcaccuggugaagaucccgacgcaccgccacaucgugggcaagcccugccccaagccccaccggcucaaccacauggggaucugcagcugcggccuguacaagcacccggggguccccgugaaguggaagcgcugaggacuagucccuguucccagagcccacuuuuuuuucuuuuuuugaaauaaaauagccugucuuucagaucuaaaaaaaaaaaaaaaaaaaaaaaaaaaaaaaaaaaaaaaaaaaaaaaaaaaaaaaaaaaaaaaaugcaucccccccccccccccccccccccccccccccaaaggcucuuuucagagccaccagaauu

SEQ ID NO: 2578 - RNA, 1768 nt, Artificial Sequence
  mRNA product Design a-2 comprising derived and/or modified sequence from LASV(GA391;Clade III)__CAA36645__GPC (opt1)
gggagaguccgcucagccagguugcagaagcggcuuagcguguguccuaaucuucucucugcguguagguaggccugugccgcaaacaagcuuaccaugggccagaucgugaccuucuuccaggaggucccccacgugaucgaggaggugaugaacaucguccugaucgcccucagcauccuggccauccugaaggggcucuacaacguggcgaccugcggccugaucgggcuggugacguuccuccugcuguccggccgcagcugcucccucaucuacaaggggaccuacgagcugcagacccuggagcucaacauggagacccugaacaugacgaugccgcugagcugcaccaagaacaacucccaccacuacauccgggucggcaacgagaccggccucgagcugacccugacgaacaccagcauccucaaccacaaguucugcaaccuguccgacgcccacaagcgcaaccuguacgaccacagccucauguccaucaucagcaccuuccaccuguccauccccaacuucaaccaguacgaggccaugagcugcgacuucaacgggggcaagaucaccgugcaguacaaccugucccacagcuucgccguggacgccgcggggcacugcggcacgcucgccaacgggguccugcagaccuucaugcggauggccuggggcggcuccuacaucgcccuggacagcgggcgcggcaacugggacugcaucaugaccuccuaccaguaccucaucauccagaacaccacgugggacgaccacugccaguucagccggcccucccccaucggguaccugggccugcucagccagcgcacccgggacaucuacaucagccgccggcugcugggcaccuucaccuggacgcucuccgacagcgaggggaacgagaccccgggcggguacugccugacccgcuggaugcugaucgaggcggagcucaagugcuucggcaacaccgccguggccaagugcaacgagaagcacgacgaggaguucugcgacaugcugcggcuguucgacuucaacaagcaggccauccgccggcucaagacggaggcccagauguccauccagcugaucaacaaggcggugaacgcccugaucaacgaccagcucaucaugaagaaccaccuccgcgacaucauggggauccccuacugcaacuacagccgguacugguaccugaaccacaccuccaccggcaagaccagccugccccgcugcuggcugaucuccaacggcagcuaccugaacgagacgaaguucuccgacgacaucgagcagcaggccgacaacaugaucaccgagaugcuccagaaggaguacaucgaccggcaggggaagacgccccugggccuggucgaccuguucguguucagcaccuccuucuaccucaucagcaucuuccugcaccuggugaagaucccgacccaccgccacaucgucgggaagcccugccccaagccccaccggcucaaccacaugggcaucugcuccugcgggcuguacaagcagccgggcgugcccgugcgcuggaagcggugaggacuagucccuguucccagagcccacuuuuuuuucuuuuuuugaaauaaaauagccugucuuucagaucuaaaaaaaaaaaaaaaaaaaaaaaaaaaaaaaaaaaaaaaaaaaaaaaaaaaaaaaaaaaaaaaaugcaucccccccccccccccccccccccccccccccaaaggcucuuuucagagccaccagaauu

SEQ ID NO: 2579 - RNA, 1771 nt, Artificial Sequence
  mRNA product Design a-2 comprising derived and/or modified sequence from LASV(AV;Clade V)__CCA30314__GPC (opt1)
gggagaguccgcucagccagguugcagaagcggcuuagcguguguccuaaucuucucucugcguguagguaggccugugccgcaaacaagcuuaccaugggccagaucgugaccuucuuccaggaggucccccacgugaucgaggaggugaugaacaucguccugaucgcccucagcauccuggccgugcugaaggggcucuacaacaucgcgaccugcggccugaucgggcugaucacguuccuccugcugugcggccgcuccugcagcuccaaccucuacaaggggguguacgagcugcagagccuggaccucaacauggagacccugaacaugaccaugccgcuguccugcaccaagaacaacagccaccacuacauccgggucggcaacgacacgggccucgagcugacccugaccaacaccuccauccucaaccacaaguucugcaaccugagcgacgcccacaagaaggaccuguacgaccacgcccucauguccaucaucagcacguuccaccuguccauccccaacuucaaccaguacgaggccaugagcugcgacuucaacgggggcaagaucuccgugcaguacaaccugagccacuccuacgccaucgacgcggccaaccacugcgggaccguggccaacggcauccuccagaccuucaugcgcauggccuggggcgggagcuacaucgcgcuggacuccggccgggggaacugggacugcaucaugaccagcuaccaguaccugaucauccagaacacgaccugggagaaccacugccaguucucccgccccagccccaucggcuaccucgggcugcugagccagcggacccgcgacaucuacaucucccggcgccuccugggcaccuucacguggacccugagcgacuccgagggcaacgccacccccgggggcuacugccucacccgguggaugcugaucgaggccgagcugaagugcuucgggaacacggccgucgccaagugcaacgagaagcacgacgaggaguucugcgacaugcuccgccuguucgacuucaacaagcaggcgaucagccggcugaaguccgaggcccagaugagcauccagcucaucaacaaggccgugaacgcccugaucaacgaccagcugaucaugaagaaccaccuccgcgacaucaugggcauccccuacugcaacuacuccaaguacugguaccugaaccacaccaucaccgggaagaccagccugcccaagugcuggcucguguccaacggcagcuaccugaacgagacgcacuucuccgacgacaucgagcagcaggccgacaacaugaucaccgagaugcugcagaaggaguacauggagcggcagggcaagaccccgcucgggcuggucgaccuguucguguucagcaccuccuucuaccugaucagcaucuuccuccgccuggugaagaucccgacgcaccggcacaucgucggcaagcccugccccaagccccaccgccugaaccacauggggaucugcuccugcggccucuacaagcagccgggggugcccgugcgguggaagcgcugaggacuagucccuguucccagagcccacuuuuuuuucuuuuuuugaaauaaaauagccugucuuucagaucuaaaaaaaaaaaaaaaaaaaaaaaaaaaaaaaaaaaaaaaaaaaaaaaaaaaaaaaaaaaaaaaaugcaucccccccccccccccccccccccccccccccaaaggcucuuuucagagccaccagaauu

SEQ ID NO: 2580 - RNA, 1768 nt, Artificial Sequence
  mRNA product Design a-2 comprising derived and/or modified sequence from LASV(Togo/2016/7082;Clade VI)__AMR44577__GPC (opt1)
gggagaguccgcucagccagguugcagaagcggcuuagcguguguccuaaucuucucucugcguguagguaggccugugccgcaaacaagcuuaccaugggccagaucaucaccuucuuccaggaggugccccacgucaucgaggaggugaugaacaucgugcugaucgcccucagccugcuggccauccucaagggggucuacaacguggcgaccugcggcaucaucgggcuggugacguuccuguuccucugcggccgcuccugcagccugaucuacaagggguccuacgagcugcagacccucgagcugaacauggagacccugaacaugaccaugccgcucagcugcacgaagaacuccagccaccacuacauccgggucggcaacgagaccggccuggagcugacccucaccaacacguccaucaucaaccacaaguucugcaaccugagcgacgcccacaagcgcaaccuguacgaccacgcccucauguccauccugagcaccuuccaccuguccauccccaacuucaaccaguacgaggccaugagcugcgacuucaacgggggcaagaucuccgugcaguacaaccucagccacgccuacgcgguggacgccgccgagcacugcgggaccgucgccaacggcgugcugcagaccuucaugcggauggcguggggcggguccuacaucgcccuggacagcggccgcgggaacugggacugcaucaugacguccuaccaguaccucaucauccagaacaccaccugggaggaccacugccaguucagccggcccucccccaucggcuaccuggggcugcucagccagcgcacccgggacaucuacaucagccgccggcugcugggcacguucaccuggacccucuccgacagcgagggcaacgagacccccgggggcuacugccugacgcgcuggaugcugaucgaggccgagcucaagugcuucgggaacaccgccguggccaagugcaacgagaagcacgacgaggaguucugcgacaugcugcggcuguucgacuucaacaagcaggcgauccagcgccucaaguccgaggcccagaugagcauccagcugaucaacaaggccgucaacgcccugaucaacgaccagcucaucaugaagaaccaccuccgggacaugaugggcauccccuacugcaacuacuccaaguacugguaccugaaccacaccagcuccgggcgcaccagccugcccaagugcuggcugguguccaacggcagcuaccugaacgagacgcacuucuccgacgacaucgagcagcaggccgacaacaugaucaccgagaugcuccagaaggaguacaucgaccggcagggcaagaccccgcuggggcugguggaccucuucgucuucagcaccuccuucuaccugaucagcaucuuccugcaccugaucaagaucccgacgcaccgccacaucgugggcaagcccugccccaagccccaccggcucaaccacauggggaucugcuccugcggccuguacaagcagccgggggugcccacccgcuggaagcggugaggacuagucccuguucccagagcccacuuuuuuuucuuuuuuugaaauaaaauagccugucuuucagaucuaaaaaaaaaaaaaaaaaaaaaaaaaaaaaaaaaaaaaaaaaaaaaaaaaaaaaaaaaaaaaaaaugcaucccccccccccccccccccccccccccccccaaaggcucuuuucagagccaccagaauu

SEQ ID NO: 2581 - RNA, 1768 nt, Artificial Sequence
  mRNA product Design a-2 comprising derived and/or modified sequence from LASV(KAK-428;Clade n.d. (VII))__ANH09740__GPC (opt1)
gggagaguccgcucagccagguugcagaagcggcuuagcguguguccuaaucuucucucugcguguagguaggccugugccgcaaacaagcuuaccaugggccagaucgugaccuucuuccaggaggucccccacgugaucgaggaggugaugaacaucguccugaucgcccucagccugcuggccauccucaaggggcuguacaacuucgcgaccugcggcgugaucgggcugaucacguuccuccugcugugcggccgcuccugcagcgccaccuacaaggggcaguacgagcuccagacccuggagcugaacauggagucccucaacaugaccaugccgcugagcugcacgaagaacaacucccaccacuacauccgggccggcaacaacaccggccuggagcucacccugaccaacacgagcaucaucucccacaaguucugcaaccugagcgacgcccacaagaagaaccucuacgaccacacccugauguccaucaucaccaccuuccaccugagcauccccaacuucaaccaguacgaggccauguccugcgacuucaacgggggcaagaucagcauccaguacaaccucucccacagcuacgcgggggacgccgcccagcacugcggcacgguggccaacgggguccugcagaccuucaugcgcauggcguggggcggcuccuaccuggcccucgacagcgggcggcgcggcugggacugcaucaucuccagcuaccaguaccugaucauccagaacaccaccugggacgaccacugccaguucucccggcccagccccaucggguaccugggcuucgugagccagaagacgcgcgacaucuacaucucccggcgccuccugggcaccuucaccuggacccugagcgacuccgaggggcacgacaugccgggcggguacugccucacgcgguggaugcugaucgaggccgaccugaagugcuucggcaacaccgccguggccaagugcaacgagaagcacgacgaggaguucugcgacauguggcgccucuucgacuucaacaagcaggcgauccagcggcugaaggccgaggcccagaugaacauccagcugaucaacaaggccgucaacgcccucaucaacgaccagcugaugaugaagaaccaccuccgcgacaucauggggauccccuacugcaacuacagcaaguucugguaccugaacaacaccaccacgggccggaccucccugccccgcugcuggcugaucagcaacggcuccuaccucaacgagacccacuucagcgacgacaucgagcagcaggcggacaacaugaucaccgagaugcugcagaaggaguacauggaccggcaggggaagacgccccugggccucguggaccuguucguguucuccaccagcuucuaccugaucaccaucuuccuccaccuggucaagaucccgacccaccgccacaucguggggaagcccugccccaagccccaccggcugaaccacaugggcaucugcuccugcgggcuguacaagcagccgggcgugcccguccgcuggaagcggugaggacuagucccuguucccagagcccacuuuuuuuucuuuuuuugaaauaaaauagccugucuuucagaucuaaaaaaaaaaaaaaaaaaaaaaaaaaaaaaaaaaaaaaaaaaaaaaaaaaaaaaaaaaaaaaaaugcaucccccccccccccccccccccccccccccccaaaggcucuuuucagagccaccagaauu

SEQ ID NO: 2582 - RNA, 1768 nt, Artificial Sequence; identical to SEQ ID NO: 2576
  mRNA product Design a-2 comprising derived and/or modified sequence from LASV(Pinneo-NIG-1969;Clade I)__AIT17836__GPC (opt1)

SEQ ID NO: 2583 - RNA, 1768 nt, Artificial Sequence
  mRNA product Design a-2 comprising derived and/or modified sequence from LASV(ISTH0009-NIG-2011;Clade II)__AIT17404__GPC (opt1)
gggagaguccgcucagccagguugcagaagcggcuuagcguguguccuaaucuucucucugcguguagguaggccugugccgcaaacaagcuuaccaugggccagaucaucaccuucuuccaggaggugccccacgucaucgaggaggugaugaacaucgugcugaucgcccucagccugcuggccauccucaaggggaucuacaacgucgcgaccugcggccuguucgggcugguguccuuccuccugcugugcggccgcagcugcuccacgaccuacaaggggguguacgagcuccagacccuggagcuggacauggccagccucaacaugaccaugccgcuguccugcacgaagaacaacagccaccacuacaucauggucggcaacgagaccggccuggagcucacccugaccaacacguccaucaucaaccacaaguucugcaaccugagcgacgcccacaagaagaaccucuacgaccacgcccugauguccaucaucagcaccuuccaccuguccauccccaacuucaaccaguacgaggccaugagcugcgacuucaacgggggcaagaucuccgugcaguacaaccucagccacgcguacgccguggacgccgccaaccacugcgggaccaucgcgaacggcguccugcagaccuucaugcggauggccuggggcggguccuacaucgcccuggacagcggcaagggguccugggacugcaucaugacgagcuaccaguaccucaucauccagaacaccaccugggaggaccacugccaguucucccgccccagccccaucggcuaccuggggcugcucagccagcggacccgcgacaucuacaucucccggcgccugcugggcacguucaccuggacccucagcgacuccgagggcaacgagacccccgggggcuacugccugacgcgguggaugcugaucgaggccgagcucaagugcuucgggaacaccgccguggcgaagugcaacgagaagcacgacgaggaguucugcgacaugcugcgccuguucgacuucaacaagcaggccauccggcgccucaagaccgaggcccagaugagcauccagcugaucaacaaggccgugaacgcccugaucaacgaccagcucaucaugaagaaccaccuccgggacaucaugggcaucccguacugcaacuacuccaaguacugguaccugaaccacaccgucacggggaagaccagccugccccgcugcuggcugguguccaacggcagcuaccugaacgagacccacuucuccgacgacaucgagcagcaggcggacaacaugaucaccgagcuccugcagaaggaguacauggaccggcagggcaagacgccccuggggcucguggaccuguucgucuucagcaccuccuucuaccugaucagcaucuuccugcaccucaucaagaucccgacccaccgccacaucaccggcaagcccugccccaagccccaccggcugaaccacauggggaucugcuccugcggccuguacaagcacccgggggugcccgugaaguggaagcgcugaggacuagucccuguucccagagcccacuuuuuuuucuuuuuuugaaauaaaauagccugucuuucagaucuaaaaaaaaaaaaaaaaaaaaaaaaaaaaaaaaaaaaaaaaaaaaaaaaaaaaaaaaaaaaaaaaugcaucccccccccccccccccccccccccccccccaaaggcucuuuucagagccaccagaauu

SEQ ID NO: 2584 - RNA, 1768 nt, Artificial Sequence
  mRNA product Design a-2 comprising derived and/or modified sequence from LASV(ISTH2010-NIG-2012;Clade II)__AIT17482__GPC (opt1)
gggagaguccgcucagccagguugcagaagcggcuuagcguguguccuaaucuucucucugcguguagguaggccugugccgcaaacaagcuuaccaugggccagaucaucaccuucuuccaggaggugccccacgucaucgaggaggugaugaacaucgugcugaucgcccucagccugcuggccauccucaaggggaucuacaacgucgcgaccugcggccuguucgggcugguguccuuccuccugcugugcggccgcagcugcuccacgaccuacaaggggguguacgagcuccagacccuggagcuggacauggccagccucaacaugaccaugccgcuguccugcacgaagaacaacagccaccacuacaucauggucggcaacgagaccggccuggagcucacccugaccaacacguccaucaucaaccacaaguucugcaaccugagcgacgcccacaagaagaaccucuacgaccacgcccugauguccaucaucagcaccuuccaccuguccauccccaacuucaaccaguacgaggccaugagcugcgacuucaacgggggcaagaucuccgugcaguacaaccucagccacgcguacgccguggacgccgccaaccacugcgggaccaucgcgaacggcguccugcagaccuucaugcggauggccuggggcggguccuacaucgcccuggacagcggcaagggguccugggacugcaucaugacgagcuaccaguaccucaucauccagaacaucaccugggaggaccacugccaguucucccgccccagccccaucggcuaccuggggcugcucagccagcggacccgcgacaucuacaucucccggcgccugcugggcaccuucacguggacccucagcgacuccgagggcaacgagacccccgggggcuacugccugacccgguggaugcugaucgaggccgagcucaagugcuucgggaacacggccguggcgaagugcaacgagaagcacgacgaggaguucugcgacaugcugcgccuguucgacuucaacaagcaggccauccggcgccucaagaccgaggcccagaugagcauccagcugaucaacaaggccgugaacgcccugaucaacgaccagcucaucaugaagaaccaccuccgggacaucaugggcauccccuacugcaacuacuccaaguacugguaccugaaccacaccgucaccgggaagacgagccugccccgcugcuggcugguguccaacggcagcuaccugaacgagacccacuucuccgacgacaucgagcagcaggcggacaacaugaucaccgagcuccugcagaaggaguacaucgaccggcagggcaagaccccgcuggggcucguggaccuguucgucuucagcacguccuucuaccugaucagcaucuuccugcaccucgugaagaucccgacccaccgccacguggucggcaagcccugccccaagccccaccggcugaaccacauggggaucugcuccugcggccuguacaagcacccgggggugcccgugaaguggaagcgcugaggacuagucccuguucccagagcccacuuuuuuuucuuuuuuugaaauaaaauagccugucuuucagaucuaaaaaaaaaaaaaaaaaaaaaaaaaaaaaaaaaaaaaaaaaaaaaaaaaaaaaaaaaaaaaaaaugcaucccccccccccccccccccccccccccccccaaaggcucuuuucagagccaccagaauu

SEQ ID NO: 2585 - RNA, 1768 nt, Artificial Sequence
  mRNA product Design a-2 comprising derived and/or modified sequence from LASV(Lassa virus/H.sapiens-wt/NGA/2015/ISTH_0543;Clade II)__AVO03639__GPC (opt1)
gggagaguccgcucagccagguugcagaagcggcuuagcguguguccuaaucuucucucugcguguagguaggccugugccgcaaacaagcuuaccaugggccagaucaucaccuucuuccaggaggugccccacgucaucgaggaggugaugaacaucgugcugaucgcccucagccugcuggccauccucaaggggaucuacaacgucgcgaccugcggccuguucgggcugguguccuuccuccugcugugcggccgcagcugcuccacgaccuacaaggggguguacgagcuccagacccuggagcuggacauggccaaccucaacaugaccaugccgcugagcugcacgaagaacaacucccaccacuacaucauggucggcaacgagaccggccuggagcucacccugaccaacacgagcaucaucaaccacaaguucugcaaccuguccgacgcccacaagaagaaccucuacgaccacgcccugaugagcaucaucuccaccuuccaccugagcauccccaacuucaaccaguacgaggccauguccugcgacuucaacgggggcaagaucagcgugcaguacaaccucucccacaccuacgcgguggacgccgccaaccacugcgggaccaucgccaacggcguccugcagacguucaugcggauggcguggggcgggagcuacaucgcccuggacuccggcaaggggagcugggacugcaucaugaccuccuaccaguaccucgugauccagaacaccaccugggaggaccacugccaguucagccgccccucccccaucggcuaccuggggcugcucagccagcggacgcgcgacaucuacaucagccggcgccugcugggcaccuucaccuggacccucuccgacagcgagggcaacgagacgcccgggggcuacugccugacccgguggaugcugaucgaggccgagcucaagugcuucgggaacaccgccguggccaagugcaacgagaagcacgacgaggaguucugcgacaugcugcgccuguucgacuucaacaagcaggcgauccggcgccucaagaccgaggcccagauguccauccagcugaucaacaaggccgucaacgcccugaucaacgaccagcucaucaugaagaaccaccuccgggacaucaugggcauccccuacugcaacuacagcaaguacugguaccugaaccacacggugaccgggaagaccucccugccccgcugcuggcuggugagcaacggcuccuaccugaacgagacccacuucagcgacgacaucgagcagcaggccgacaacaugaucacggagcuccugcagaaggaguacaucgaccggcagggcaagaccccgcuggggcucgucgaccuguucguguucuccaccagcuucuaccugaucuccaucuuccugcaccucgugaagaucccgacccaccgccacaucacgggcaagcccugccccaagccccaccggcugaaccacauggggaucugcagcugcggccuguacaagcacccggggguccccgugaaguggaagcgcugaggacuagucccuguucccagagcccacuuuuuuuucuuuuuuugaaauaaaauagccugucuuucagaucuaaaaaaaaaaaaaaaaaaaaaaaaaaaaaaaaaaaaaaaaaaaaaaaaaaaaaaaaaaaaaaaaugcaucccccccccccccccccccccccccccccccaaaggcucuuuucagagccaccagaauu

SEQ ID NO: 2586 - RNA, 1768 nt, Artificial Sequence
  mRNA product Design a-2 comprising derived and/or modified sequence from LASV(Lassa virus/H.sapiens-wt/NGA/2016/ISTH_0009;Clade II)__AVO03571__GPC (opt1)
gggagaguccgcucagccagguugcagaagcggcuuagcguguguccuaaucuucucucugcguguagguaggccugugccgcaaacaagcuuaccaugggccagaucaucaccuucuuccaggaggugccccacgucaucgaggaggugaugaacaucgugcugaucgcccucagccugcuggccauccucaaggggaucuacaacgucgcgaccugcggccugcuggggcucguguccuuccugcugcucugcggccgcagcugcuccacgaccuacaaggggguguacgagcugcagacccuggagcucgacauggccagccugaacaugaccaugccgcuguccugcacgaagaacaacagccaccacuacaucauggucggcaacgagaccggccucgagcugacccugaccaacacguccaucaucaaccacaaguucugcaaccucagcgacgcccacaagaagaaccuguacgaccacgcccugauguccaucaucagcaccuuccaccucuccauccccaacuucaaccaguacgaggccaugagcugcgacuucaacgggggccggaucuccgugcaguacaaccugagccacuccuacgcgguggacgccgccaaccacugcgggaccaucgccaacggcguccugcagaccuucaugcgcauggcguggggcgggagcuacaucgcccucgacuccggcaaggggagcugggacugcaucaugacguccuaccaguaccugaucauccagaacaccaccugggaggaccacugccaguucagccggcccagccccaucggcuaccuggggcuccugucccagcgcacccgggacaucuacaucagccgccggcugcucggcacguucaccuggacccuguccgacagcgagggcaacgagacccccgggggcuacugccugacgcgcuggaugcucaucgaggccgagcugaagugcuucgggaacaccgccguggccaagugcaacgagaagcacgacgaggaguucugcgacaugcugcggcuguucgacuucaacaagcaggcgauccgccggcugaagaccgaggcccagauguccauccagcugaucaacaaggccgugaacgcccucaucaacgaccagcugaucaugaagaaccaccuccgcgacaucaugggcaucccguacugcaacuacagcaaguacugguaccucaaccacaccgucacggggaagaccucccugccccggugcuggcuggugagcaacggcuccuaccucaacgagacccacuucagcgacgacaucgagcagcaggccgacaacaugaucaccgagcugcugcagaaggaguacaucgaccgccagggcaagacgccccucgggcugguggaccuguucgucuucuccaccagcuucuaccugaucuccaucuuccuccaccuggugaagaucccgacccaccggcacaucaccggcaagcccugccccaagccccaccgccugaaccacauggggaucugcagcugcggccucuacaaccacccgggggugcccgucaaguggaagcggugaggacuagucccuguucccagagcccacuuuuuuuucuuuuuuugaaauaaaauagccugucuuucagaucuaaaaaaaaaaaaaaaaaaaaaaaaaaaaaaaaaaaaaaaaaaaaaaaaaaaaaaaaaaaaaaaaugcaucccccccccccccccccccccccccccccccaaaggcucuuuucagagccaccagaauu

SEQ ID NO: 2587 - RNA, 1768 nt, Artificial Sequence
  mRNA product Design a-2 comprising derived and/or modified sequence from LASV(Lassa virus/H.sapiens-wt/NGA/2016/ISTH_0017;Clade II)__AVO03567__GPC (opt1)
gggagaguccgcucagccagguugcagaagcggcuuagcguguguccuaaucuucucucugcguguagguaggccugugccgcaaacaagcuuaccaugggccagaucaucaccuucuuccaggaggugccccacgucaucgaggaggugaugaacaucgugcugaucgcccucagccugcuggccauccucaaggggaucuacaacgucgcgaccugcggccuguucgggcugguguccuuccuccugcugugcggccgcagcugcuccacgaccuacaaggggguguacgagcuccagacccuggagcuggacauggccagccucaacaugaccaugccgcuguccugcacgaagaacaacagccaccacuacaucauggucggcaacgagaccggccuggagcucacccugaccaacacguccaucaucaaccacaaguucugcaaccugagcgacgcccacaagaagaaccucuacgaccacgcccugauguccaucaucagcaccuuccaccuguccauccccaacuucaaccaguacgaggccaugagcugcgacuucaacgggggcaagaucuccgugcaguacaaccucagccacaccuacgcgaucgacgccgccaaccacugcgggaccaucgccaacggcgugcugcagacguucaugcggauggcguggggcggguccuacaucgcccuggacagcggcaagggguccugggacugcaucaugaccagcuaccaguaccucaucauccagaacaccaccugggaggaccacugccaguucucccgccccagccccaucggcuaccuggggcugcucagccagcggacgcgcgacaucuacaucucccggcgccugcugggcaccuucaccuggacccucagcgacuccgagggcaacgagacgcccgggggcuacugccugacccgguggaugcugaucgaggccgagcucaagugcuucgggaacaccgccgucgccaagugcaacgagaagcacgacgaggaguucugcgacaugcugcgccuguucgacuucaacaagcaggcgauccggcgccucaagaccgaggcccagaugagcauccagcugaucaacaaggccgugaacgcccugaucaacgaccagcucaucaugaagaaccaccuccgggacaucaugggcauccccuacugcaacuacuccaaguacugguaccugaaccacacggugaccgggaagaccagccugccccgcugcuggcuggucuccaacggcagcuaccugaacgagacccacuucuccgacgacaucgagcagcaggccgacaacaugaucacggagcuccugcagaaggaguacauggaccggcagggcaagaccccgcuggggcucguggaccuguucguguucagcaccuccuucuaccugaucagcaucuuccugcaccucguccgcaucccgacccaccggcacgugaucggcaagcccugccccaagccccaccgccugaaccacauggggaucugcuccugcggccuguacaagcacccgggggugcccgucaaguggaagcggugaggacuagucccuguucccagagcccacuuuuuuuucuuuuuuugaaauaaaauagccugucuuucagaucuaaaaaaaaaaaaaaaaaaaaaaaaaaaaaaaaaaaaaaaaaaaaaaaaaaaaaaaaaaaaaaaaugcaucccccccccccccccccccccccccccccccaaaggcucuuuucagagccaccagaauu

SEQ ID NO: 2588 - RNA, 1768 nt, Artificial Sequence
  mRNA product Design a-2 comprising derived and/or modified sequence from LASV(Lassa virus/H.sapiens-wt/NGA/2018/ISTH_0959;Clade II)__AVV65099__GPC (opt1)
gggagaguccgcucagccagguugcagaagcggcuuagcguguguccuaaucuucucucugcguguagguaggccugugccgcaaacaagcuuaccaugggccagaucaucaccuucuuccaggaggugccccacgucaucgaggaggugaugaacaucgugcugaucgcccucagccugcuggccauccucaaggggaucuacaacgucgugaccugcggccuguucgggcugguguccuuccuccugcugugcggccgcagcugcuccacgaccuacaagggggucuacgagcuccagacccuggagcuggacauggcgagccucaacaugaccaugccgcuguccugcacgaagaacaacagccaccacuacaucauggugggcaacgagaccggccuggagcucacccugaccaacacguccaucaucaaccacaaguucugcaaccugagcgacgcccacaagaagaaccucuacgaccacgcccugauguccaucaucagcaccuuccaccuguccauccccaacuucaaccaguacgaggccaugagcugcgacuucaacgggggcaagaucuccgugcaguacaaccucagccacgccuacgcgaucgacgccgccaaccacugcgggaccaucgccaacggcguccugcagaccuucaugcggauggcguggggcggguccuacaucgcccuggacagcggcaagggguccugggacugcaucaugacgagcuaccaguaccucaucauccagaacaccaccugggaggaccacugccaguucucccgccccagccccaucggcuaccuggggcugcucagccagcggacccgcgacaucuacaucucccggcgccugcugggcacguucaccuggacccucagcgacuccgagggcaacgagacccccgggggcuacugccugacgcgguggaugcugaucgaggccgagcucaagugcuucgggaacaccgccguggccaagugcaacgagaagcacgacgaggaguucugcgacaugcugcgccuguucgacuucaacaagcaggcgauccggcgccucaagaccgaggcccagaugagcauccagcugaucaacaaggccgugaacgcccugaucaacgaccagcucaucaugaagaaccaccuccgggacaucaugggcaucccguacugcaacuacuccaaguacugguaccugaaccacaccgucacggggaagaccagccugccccgcugcuggcugguguccaacggcagcuaccugaacgagacccacuucuccgacgacaucgagcagcaggccgacaacaugaucaccgagcuccugcagaaggaguacaucgaccggcagggcaagacgccccuggggcucguggaccuguucgucuucagcaccuccuucuaccugaucagcaucuuccugcaccucgugaagaucccgacccaccgccacgugaucggcaagcccugccccaagccccaccggcugaaccacauggggaucugcuccugcggccuguacaagcacccggggguccccgugaaguggaagcgcugaggacuagucccuguucccagagcccacuuuuuuuucuuuuuuugaaauaaaauagccugucuuucagaucuaaaaaaaaaaaaaaaaaaaaaaaaaaaaaaaaaaaaaaaaaaaaaaaaaaaaaaaaaaaaaaaaugcaucccccccccccccccccccccccccccccccaaaggcucuuuucagagccaccagaauu

SEQ ID NO: 2589 - RNA, 1768 nt, Artificial Sequence
  mRNA product Design a-2 comprising derived and/or modified sequence from LASV(LASV003-NIG-2008;Clade II)__AIT17580__GPC (opt1)
gggagaguccgcucagccagguugcagaagcggcuuagcguguguccuaaucuucucucugcguguagguaggccugugccgcaaacaagcuuaccaugggccagaucaucaccuucuuccaggaggugccccacgucaucgaggaggugaugaacaucgugcugaucgcccucagccugcuggccauccucaaggggaucuacaacgucgcgaccugcggccuguucgggcugguguccuuccuccugcugugcggccgcagcugcuccacgaccuacaaggggguguacgagcuccagacccuggagcuggacauggccagccucaacaugaccaugccgcuguccugcacgaagaacaacagccaccacuacaucauggucggcaacgagaccggccuggagcucacccugaccaacacguccaucaucaaccacaaguucugcaaccugagcgacgcccacaagaagaaccucuacgaccacgcccugauguccaucaucagcaccuuccaccuguccauccccaacuucaaccaguacgaggccaugagcugcgacuucaacgggggcaagaucuccgugcaguacaaccucagccacaccuacgcgguggacgccgccaaccacugcgggaccaucgccaacggcguccugcagacguucaugcggauggcguggggcggguccuacaucgcccuggacagcggcaagggguccugggacugcaucaugaccagcuaccaguaccucaucauccagaacaccaccugggaggaccacugccaguucucccgccccagccccaucggcuaccuggggcugcucagccagcggacgcgcgacaucuacaucucccggcgccugcugggcaccuucaccuggacccucagcgacuccgagagcaacgagacgccgggcggguacugccugacccgguggaugcugaucgaggccgagcucaagugcuucggcaacaccgccguggccaagugcaacgagaagcacgacgaggaguucugcgacaugcugcgccuguucgacuucaacaagcaggcgauccggcgccucaaggccgaggcccagauguccauccagcugaucaacaaggccgugaacgcccugaucaacgaccagcucaucaugaagaaccaccuccgggacaucauggggauccccuacugcaacuacagcaaguacugguaccugaaccacaccgucacgggccgcaccucccugccccggugcuggcuggugagcaacggguccuaccugaacgagacccacuucagcgacgacaucgagcagcaggcggacaacaugaucaccgagcuccugcagaaggaguacauggaccgccagggcaagacgccccugggccucguggaccuguucgucuucuccaccagcuucuaccugaucuccaucuuccugcaccucgugaagaucccgacccaccggcacgugaucgggaagcccugccccaagccccaccgccugaaccacaugggcaucugcagcugcgggcuguacaagcacccgggcguccccgugaaguggaagcggugaggacuagucccuguucccagagcccacuuuuuuuucuuuuuuugaaauaaaauagccugucuuucagaucuaaaaaaaaaaaaaaaaaaaaaaaaaaaaaaaaaaaaaaaaaaaaaaaaaaaaaaaaaaaaaaaaugcaucccccccccccccccccccccccccccccccaaaggcucuuuucagagccaccagaauu

SEQ ID NO: 2590 - RNA, 1768 nt, Artificial Sequence
  mRNA product Design a-2 comprising derived and/or modified sequence from LASV(LASV035-NIG-2009;Clade II)__AIT17588__GPC (opt1)
gggagaguccgcucagccagguugcagaagcggcuuagcguguguccuaaucuucucucugcguguagguaggccugugccgcaaacaagcuuaccaugggccagaucaucaccuucuuccaggaggugccccacgucaucgaggaggugaugaacaucgugcugaucgcccucagccugcuggccauccucaaggggaucuacaacgucgcgaccugcggccuguucgggcugguguccuuccuccugcugugcggccgcagcugcuccacgaccuacaaggggguguacgagcuccagacccuggagcuggacauggccagccucaacaugaccaugccgcuguccugcacgaagaacaacagccaccacuacaucauggucggcaacgagaccggccuggagcucacccugaccaacacguccaucaucaaccacaaguucugcaaccugagcgacgcccacaagaagaaccucuacgaccacgcccugauguccaucaucagcaccuuccaccuguccauccccaacuucaaccaguacgaggccaugagcugcgacuucaacgggggcaagaucuccgugcaguacaaccucagccacgcguacgccguggacgccgccaaccacugcgggaccaucgcgaacggcguccugcagaccuucaugcggauggccuggggcggguccuacaucgcccuggacagcggcaagggguccugggacugcaucaugacgagcuaccaguaccucaucauccagaacaccaccugggaggaccacugccaguucucccgccccagccccaucggcuaccuggggcugcucagccagcggacccgcgacaucuacaucucccggcgccugcugggcacguucaccuggacccucagcgacuccgagggcaacgagacccccgggggcuacugccugacgcgguggaugcugaucgaggccgagcucaagugcuucgggaacaccgccguggcgaagugcaacgagaagcacgacgaggaguucugcgacaugcugcgccuguucgacuucaacaagcaggccauccggcgccucaaggccgaggcccagaugagcauccagcugaucaacaaggccgugaacgcgcugaucaacgaccagcucaucaugaagaaccaccuccgggacaucaugggcauccccuacugcaacuacuccaaguacugguaccugaaccacaccgucaccgggaagacgagccugccccgcugcuggcugguguccaacggcagcuaccugaacgagacccacuucuccgacgacaucgagcagcaggccgacaacaugaucaccgagcuccugcagaaggaguacaucgaccggcagggcaagaccccgcuggggcucguggaccuguucgucuucagcacguccuucuaccugaucagcaucuuccugcaccucgugaagaucccgacccaccgccacgugaucggcaagcccugccccaagccccaccggcugaaccacauggggaucugcuccugcggccuguacaagcacccggggguccccgugaaguggaagcgcugaggacuagucccuguucccagagcccacuuuuuuuucuuuuuuugaaauaaaauagccugucuuucagaucuaaaaaaaaaaaaaaaaaaaaaaaaaaaaaaaaaaaaaaaaaaaaaaaaaaaaaaaaaaaaaaaaugcaucccccccccccccccccccccccccccccccaaaggcucuuuucagagccaccagaauu

SEQ ID NO: 2591 - RNA, 1768 nt, Artificial Sequence
  mRNA product Design a-2 comprising derived and/or modified sequence from LASV(LASV1000-NIG-2009;Clade II)__AIT17782__GPC (opt1)
gggagaguccgcucagccagguugcagaagcggcuuagcguguguccuaaucuucucucugcguguagguaggccugugccgcaaacaagcuuaccaugggccagaucaucaccuucuuccaggaggugccccacgucaucgaggaggugaugaacaucgugcugaucgcccucagccugcuggccauccucaaggggaucuacaacgucgcgaccugcggccuguucgggcugguguccuuccuccugcugugcggccgcagcugcuccacgaccuacaaggggguguacgagcuccagacccuggagcuggacauggccagccucaacaugaccaugccgcuguccugcacgaagaacaacagccaccacuacaucauggucggcaacgagaccggccuggagcucacccugaccaacacguccaucaucaaccacaaguucugcaaccugagcgacgcccacaagaagaaccucuacgaccacgcccugauguccaucaucagcaccuuccaccuguccauccccaacuucaaccaguacgaggccaugagcugcgacuucaacgggggcaagaucuccgugcaguacaaccucagccacaccuacgcgguggacgccgccaaccacugcgggaccaucgccaacggcguccugcagacguucaugcggauggcguggggcggguccuacaucgcccuggacagcggcaagggguccugggacugcaucaugaccagcuaccaguaccucaucauccagaacaccaccugggaggaccacugccaguucucccgccccagccccaucggcuaccuggggcugcucagccagcggacgcgcgacaucuacaucucccggcgccugcugggcaccuucaccuggacccucagcgacuccgagggcaacgagacgcccgggggcuacugccugacccgguggaugcugaucgaggccgagcucaagugcuucgggaacaccgccguggccaagugcaacgagaagcacgacgaggaguucugcgacaugcugcgccuguucgacuucaacaagcaggcgaucaagcggcucaagaccgaggcccagaugagcauccagcugaucaacaaggccgugaacgcccugaucaacgaccagcucaucaugaagaaccaccuccgcgacaucaugggcauccccuacugcaacuacuccaaguacugguaccugaaccacacggucaccgggaagaccagccugccccggugcuggcugguguccaacggcagcuaccugaacgagacccacuucuccgacgacaucgagcagcaggccgacaacaugaucacggagcuccugcagaaggaguacaucgaccgccagggcaagaccccgcuggggcucguggaccuguucgucuucagcaccuccuucuaccugaucagcaucuuccugcaccucgugaagaucccgacccaccggcacguggucggcaagcccugccccaagccccaccgccugaaccacauggggaucugcuccugcggccuguacaagcacccgggggugcccgugaaguggaagcggugaggacuagucccuguucccagagcccacuuuuuuuucuuuuuuugaaauaaaauagccugucuuucagaucuaaaaaaaaaaaaaaaaaaaaaaaaaaaaaaaaaaaaaaaaaaaaaaaaaaaaaaaaaaaaaaaaugcaucccccccccccccccccccccccccccccccaaaggcucuuuucagagccaccagaauu

SEQ ID NO: 2592 - RNA, 1768 nt, Artificial Sequence
  mRNA product Design a-2 comprising derived and/or modified sequence from LASV(LASV221-NIG-2010;Clade II)__AIT17624__GPC (opt1)
gggagaguccgcucagccagguugcagaagcggcuuagcguguguccuaaucuucucucugcguguagguaggccugugccgcaaacaagcuuaccaugggccagaucaucaccuucuuccaggaggugccccacgucaucgaggaggugaugaacaucgugcugaucgcccucagccugcuggccauccucaaggggaucuacaacgucgcgaccugcggccuguucgggcugguguccuuccuccugcugugcggccgcagcugcuccacgaccuacaaggggguguacgagcuccagacccuggagcuggacauggccagccucaacaugaccaugccgcuguccugcacgaagaacaacagccaccacuacaucauggucggcaacgagaccggccuggagcucacccugaccaacacguccaucaucaaccacaaguucugcaaccugagcgacgcccacaagaagaaccucuacgaccacgcccugauguccaucaucagcaccuuccaccuguccauccccaacuucaaccaguacgaggccaugagcugcgacuucaacgggggcaagaucuccgugcaguacaaccucagccacaccuacgcgaucgacgccgccaaccacugcgggaccaucgccaacggcgugcugcagacguucaugcggauggcguggggcggguccuacaucgcccuggacagcggcaagggguccugggacugcaucaugaccagcuaccaguaccucaucauccagaacaccaccugggaggaccacugccaguucucccgccccagccccaucggcuaccuggggcugcucagccagcggacgcgcgacaucuacaucucccggcgccugcugggcaccuucaccuggacccucagcgacuccgagggcaacgagacgcccgggggcuacugccugacccgguggaugcugaucgaggccgagcucaagugcuucgggaacaccgccgucgccaagugcaacgagaagcacgacgaggaguucugcgacaugcugcgccuguucgacuucaacaagcaggcgauccggcgccucaagaccgaggcccagaugagcauccagcugaucaacaaggccgugaacgcccugaucaacgaccagcucaucaugaagaaccaccuccgggacaucaugggcauccccuacugcaacuacuccaaguacugguaccugaaccacacggugaccgggaagaccagccugccccgcugcuggcuggucuccaacggcagcuaccugaacgagacccacuucuccgacgacaucgagcagcaggccgacaacaugaucacggagaugcuccagaaggaguacauggaccggcagggcaagaccccgcuggggcugguggaccucuucguguucagcaccuccuucuaccugaucagcaucuuccugcaccuggucaagaucccgacccaccgccacgugaucggcaagcccugccccaagccccaccggcucaaccacauggggaucugcuccugcggccuguacaagcacccgggggugcccgucaaguggaagcgcugaggacuagucccuguucccagagcccacuuuuuuuucuuuuuuugaaauaaaauagccugucuuucagaucuaaaaaaaaaaaaaaaaaaaaaaaaaaaaaaaaaaaaaaaaaaaaaaaaaaaaaaaaaaaaaaaaugcaucccccccccccccccccccccccccccccccaaaggcucuuuucagagccaccagaauu

SEQ ID NO: 2593 - RNA, 1768 nt, Artificial Sequence
  mRNA product Design a-2 comprising derived and/or modified sequence from LASV(LASV237-NIG-2010;Clade II)__AIT17638__GPC (opt1)
gggagaguccgcucagccagguugcagaagcggcuuagcguguguccuaaucuucucucugcguguagguaggccugugccgcaaacaagcuuaccaugggccagaucaucaccuucuuccaggaggugccccacgucaucgaggaggugaugaacaucgugcugaucgcccucagccugcuggccauccucaaggggaucuacaacgucgcgaccugcggccuguucgggcugguguccuuccuccugcugugcggccgcagcugcuccacgaccuacaaggggguguacgagcuccagacccuggagcuggacauggccagccucaacaugaccaugccgcuguccugcacgaagaacaacagccaccacuacaucauggucggcaacgagaccggccuggagcucacccugaccaacacguccaucaucaaccacaaguucugcaaccugagcgacgcccacaagaaggaccucuacgaccacgcccugauguccaucaucagcaccuuccaccuguccauccccaacuucaaccaguacgaggccaugagcugcgacuucaacgggggcaagaucuccgugcaguacaaccucagccacaccuacgcgguggacgccgccaaccacugcgggaccaucgccaacggcguccugcagacguucaugcggauggcguggggcggguccuacaucgcccuggacagcggcaagggguccugggacugcaucaugaccagcuaccaguaccucaucauccagaacaccaccugggaggaccacugccaguucucccgccccagccccaucggcuaccuggggcugcucagccagcggacgcgcgacaucuacaucucccggcgccugcugggcaccuucaccuggacccucagcgacuccgagggcaacgagacgcccgggggcuacugccugacccgguggaugcugaucgaggccgagcucaagugcuucgggaacaccgccguggccaagugcaacgagaagcacgacgaggaguucugcgacaugcugcgccuguucgacuucaacaagcaggcgauccggcgccucaagaccgaggcccagaugagcauccagcugaucaacaaggccgugaacgcccugaucaacgaccagcucaucaugaagaaccaccuccgggacaucaugggcauccccuacugcaacuacuccaaguacugguaccugaaccacacggucaccgggaagaccagccugccccgcugcuggcugguguccaacggcagcuaccugaacgagacccacuucuccgacgacaucgagcagcaggccgacaacaugaucacggagcuccugcagaaggaguacauggaccggcagggcaagaccccgcuggggcucguggaccuguucgucuucagcaccuccuucuaccugaucagcaucuuccugcaccucaucaagaucccgacccaccgccacaucacgggcaagcccugccccaagccccaccggcugaaccacauggggaucugcuccugcggccuguacaagcacccgggggugcccgugaaguggaagcgcugaggacuagucccuguucccagagcccacuuuuuuuucuuuuuuugaaauaaaauagccugucuuucagaucuaaaaaaaaaaaaaaaaaaaaaaaaaaaaaaaaaaaaaaaaaaaaaaaaaaaaaaaaaaaaaaaaugcaucccccccccccccccccccccccccccccccaaaggcucuuuucagagccaccagaauu

SEQ ID NO: 2594 - RNA, 1768 nt, Artificial Sequence
  mRNA product Design a-2 comprising derived and/or modified sequence from LASV(LASV253-NIG-2011;Clade II)__AIT17670__GPC (opt1)
gggagaguccgcucagccagguugcagaagcggcuuagcguguguccuaaucuucucucugcguguagguaggccugugccgcaaacaagcuuaccaugggccagaucaucaccuucuuccaggaggugccccacgucaucgaggaggugaugaacaucgugcugaucgcccucagccugcuggccauccucaaggggaucuacaacgucgcgaccugcggccuguucgggcugguguccuuccuccugcugugcggccgcagcugcuccacgaccuacaaggggguguacgagcuccagacccuggagcuggacauggccagccucaacaugaccaugccgcuguccugcacgaagaacaacagccaccacuacaucauggucggcaacgagaccggccuggagcucacccugaccaacacguccaucaucaaccacaaguucugcaaccugagcgacgcccacaagaagaaccucuacgaccacgcccugauguccaucaucagcaccuuccaccuguccauccccaacuucaaccaguacgaggccaugagcugcgacuucaacgggggcaagaucuccgugcaguacaaccucagccacaccuacgcgguggacgccgccaaccacugcgggaccaucgccaacggcguccugcagacguucaugcggauggcguggggcggguccuacaucgcccuggacagcggcaagggguccugggacugcaucaugaccagcuaccaguaccucaucauccagaacaccaccugggaggaccacugccaguucucccgccccagccccaucggcuaccuggggcugcucagccagcggacgcgcgacaucuacaucucccggcgccugcugggcaccuucaccuggacccucagcgacuccgagggcaacgagacgcccgggggcuacugccugacccgguggaugcugaucgaggccgagcucaagugcuucgggaacaccgccguggccaagugcaacgagaagcacgacgaggaguucugcgacaugcugcgccuguucgacuucaacaagcaggcgauccggcgccucaaggccgaggcccagaugagcauccagcugaucaacaaggccgugaacgcccugaucaacgaccagcucaucaugaagaaccaccuccgggacaucaugggcaucccguacugcaacuacuccaaguacugguaccugaaccacaccgucacggggcgcaccagccugccccggugcuggcugguguccaacggcagcuaccugaacgagacccacuucuccgacgacaucgagcagcaggcggacaacaugaucaccgagcuccugcagaaggaguacaucgaccgccagggcaagacgccccuggggcucguggaccuguucgucuucagcaccuccuucuaccugaucagcaucuuccugcaccucgugaagaucccgacccaccggcacaucaucggcaagcccugccccaagccccaccgccugaaccacauggggaucugcuccugcggccuguacaagcacccgggggugcccgucaaguggaagcggugaggacuagucccuguucccagagcccacuuuuuuuucuuuuuuugaaauaaaauagccugucuuucagaucuaaaaaaaaaaaaaaaaaaaaaaaaaaaaaaaaaaaaaaaaaaaaaaaaaaaaaaaaaaaaaaaaugcaucccccccccccccccccccccccccccccccaaaggcucuuuucagagccaccagaauu

SEQ ID NO: 2595 - RNA, 1768 nt, Artificial Sequence
  mRNA product Design a-2 comprising derived and/or modified sequence from LASV(LASV254-NIG-2011;Clade II)__AIT17674__GPC (opt1)
gggagaguccgcucagccagguugcagaagcggcuuagcguguguccuaaucuucucucugcguguagguaggccugugccgcaaacaagcuuaccaugggccagaucaucaccuucuuccaggaggugccccacgucaucgaggaggugaugaacaucgugcugaucgcccucagccugcuggccauccucaaggggaucuacaacgucgcgaccugcggccuguucgggcugguguccuuccuccugcugugcggccgcagcugcuccacgaccuacaaggggguguacgagcuccagacccuggagcuggacaugaccaaccucaacaugacgaugccgcugagcugcaccaagaacaacucccaccacuacaucauggucggcaacgagaccggccuggagcucacccugacgaacaccagcaucaucaaccacaaguucugcaaccuguccgacgcccacaagaagaaccucuacaaccacgcccugaugagcaucaucuccaccuuccaccugagcauccccaacuucaaccaguacgaggccauguccugcgacuucaacgggggcaagaucagcgugcaguacaaccucucccacagcuacgccguggacgcggccaaccacugcgggaccaucgccaacggcguccugcagacguucaugcggauggccuggggcggguccuacaucgcgcuggacagcggcaaggggaacugggacugcaucaugaccuccuaccaguaccucaucauccagaacaccaccugggaggaccacugccaguucagccgccccucccccaucggcuaccuggggcugcucagccagcggacgcgcgacaucuacaucagccggcgccugcugggcaccuucaccuggacccucuccgacagcgagggcaacgagacgcccgggggcuacugccugacccgguggaugcugaucgaggccgagcucaagugcuucgggaacaccgccguggccaagugcaacgagaagcacgacgaggaguucugcgacaugcugcgccuguucgacuucaacaagcaggccauccggcgccucaagaccgaggcgcaggccaacauccagcugaucaacaaggccgugaacgcccugaucaacgaccagcucaucaugaagaaccaccuccgggacaucaugggcauccccuacugcaacuacuccaaguacugguaccugaaccacacggucaccgggaagaccagccugccccgcugcuggcugguguccaacggcagcuaccugaacgagacccacuucuccgacgacaucgagcagcaggccgacaacaugaucacggagcuccugcagaaggaguacauggaccggcagggcaagaccccgcuggggcucguggaccuguucgucuucagcaccuccuucuaccugaucagcaucuuccugcaccucgugaagaucccgacccaccgccacgugaucggcaagcccugccccaagccccaccggcugaaccacauggggaucugcuccugcggccuguacaagcacccggggguccccgugaaguggaagcgcugaggacuagucccuguucccagagcccacuuuuuuuucuuuuuuugaaauaaaauagccugucuuucagaucuaaaaaaaaaaaaaaaaaaaaaaaaaaaaaaaaaaaaaaaaaaaaaaaaaaaaaaaaaaaaaaaaugcaucccccccccccccccccccccccccccccccaaaggcucuuuucagagccaccagaauu

SEQ ID NO: 2596 - RNA, 1768 nt, Artificial Sequence
  mRNA product Design a-2 comprising derived and/or modified sequence from LASV(Nig08-A19;Clade III)__ADU56618__GPC (opt1)
gggagaguccgcucagccagguugcagaagcggcuuagcguguguccuaaucuucucucugcguguagguaggccugugccgcaaacaagcuuaccaugggccagaucgugaccuucuuccaggaggucccccacgugaucgaggaggugaugaacaucguccugaucgcccucagcauccuggccauccugaaggggcucuacaacaucgcgaccugcggccugaucgggcuggugacguuccuccugcuguccggccgcagcugcuccaugaccuacaaggggguguacgagcuccagacccuggagcugaacaugaacacccucaacaugacgaugccgcugagcugcaccaagaacaacucccaccacuacaucauggucggcaacgagaccggccuggagcucacccugacgaacaccagccugcuccaccacaaguucugcaaccuguccgacgcccacaagaagaaccuguacgaccacacccucaugagcaucaucuccaccuuccaccugagcauccccaacuucaaccaguacgaggccauguccugcgacuucaacgggggcaagaucacggugcaguacaaccugagccacuccuacgccaucgacgccgcgaaccacugcgggaccguggccaacggcguccuccagaccuucaugcggauggccuggggcgggagcuacaucgcccuggacuccggccgcgggaagugggacugcaucaugaccagcuaccaguaccugaucauccagaacacgaccugggaggaccacugccaguucucccggcccagccccaucggcuaccucgggcugcugucccagcgcacccgggacaucuacaucagccgccggcuccugggcaccuucacguggacccugagcgacuccgagggcaacgagacccccgggggcuacugccucacccgcuggaugcugaucgaggcggagcugaagugcuucgggaacacggccguggccaagugcaacgagaagcacgacgaggaguucugcgacaugcuccggcuguucgacuucaacaagcaggccauccgccggcugaaggccgaggcgcagaugagcauccagcucaucaacaaggccgugaacgcccugaucaacgaccagcugaucaugaagaaccaccuccgcgacaucaugggcauccccuacugcaacuacuccaaguacugguaccugaaccacaccagcaccgggcggaccucccugccccgcugcuggcucgucagcaacggcuccuaccugaacgagacgcacuucagcgacgacaucgagcagcaggccgacaacaugaucaccgagaugcugcagaaggaguaccucgaccggcagggcaagaccccgcuggggcugguggaccuguucguguucuccaccagcuucuaccucaucuccaucuuccugcaccuggucaagaucccgacgcaccgccacaucgugggcaagcccugccccaagccccaccggcucaaccacauggggaucugcagcugcggccuguacaagcagccgggggugcccguccgcuggaagcggugaggacuagucccuguucccagagcccacuuuuuuuucuuuuuuugaaauaaaauagccugucuuucagaucuaaaaaaaaaaaaaaaaaaaaaaaaaaaaaaaaaaaaaaaaaaaaaaaaaaaaaaaaaaaaaaaaugcaucccccccccccccccccccccccccccccccaaaggcucuuuucagagccaccagaauu

SEQ ID NO: 2597 - RNA, 1771 nt, Artificial Sequence
  mRNA product Design a-2 comprising derived and/or modified sequence from LASV(G1180-SLE-2010;Clade IV)__AIT17168__GPC (opt1)
gggagaguccgcucagccagguugcagaagcggcuuagcguguguccuaaucuucucucugcguguagguaggccugugccgcaaacaagcuuaccaugggccagaucgugaccuucuuccaggaggucccccacgugaucgaggaggugaugaacaucguccugaucgcccucagcauccuggccgugcugaaggggcucuacaacuucgcgaccugcggccugguggggcugcucaccuuccugcugcucugcggccgcuccugcaccgccagccgguacaagggggucuacgagcugcagacccuggagcucaacauggagacccugaacaugacgaugccgcuguccugcaccaagaacaacagccaccacuacaucauggugggcaacgagaccggccucgagcugacccugacgaacaccuccaucaucaaccacaaguucugcaaccucagcgacgcccacaagaagaaccuguacgaccacgcccugauguccaucaucagcaccuuccaccucuccauccccaacuucaaccaguacgaggccaugagcugcgacuucaacgggggcaagaucuccgugcaguacaaccugagccacuccuacgcgggggacgccgccaaccacugcggcaccgucgccaacggggugcugcagacguucaugcgcauggcguggggcggcagcuacaucgcccucgacuccgggcacggcagcugggacugcaucaugaccuccuaccaguaccugaucauccagaacaccaccugggaggaccacugccaguucagccggcccucccccaucggguaccugggccuccugagccagcgcacgcgggacaucuacaucagccgccggcugcucggcaccuucaccuggacccuguccgacagcgaggggaaggacacgccgggcggguacugccugacccgcuggaugcucaucgaggccgagcugaagugcuucggcaacaccgccguggccaagugcaacgagaagcacgacgaggaguucugcgacaugcugcggcuguucgacuucaacaagcaggcgauccagcgccugaaggccgaggcccagauguccauccagcugaucaacaaggccgucaacgcccucaucaacgaccagcugaucaugaagaaccaccuccgggacaucauggggauccccuacugcaacuacagcaaguacugguaccucaaccacaccacgaccggcaagaccucccugcccaagugcuggcuggugagcaacggcuccuaccucaacgagacccacuucagcgacgacaucgagcagcaggcggacaacaugaucacggagaugcugcagaaggaguacauggagcgccaggggaagacgccccugggccucguggaccuguucgucuucuccaccagcuucuaccugaucuccaucuuccugcaccucgugaagaucccgacccaccggcacaucgugggcaagagcugccccaagccccaccgccugaaccacauggggaucugcuccugcgggcuguacaagcagcccggcgucccggugaaguggaagcggugaggacuagucccuguucccagagcccacuuuuuuuucuuuuuuugaaauaaaauagccugucuuucagaucuaaaaaaaaaaaaaaaaaaaaaaaaaaaaaaaaaaaaaaaaaaaaaaaaaaaaaaaaaaaaaaaaugcaucccccccccccccccccccccccccccccccaaaggcucuuuucagagccaccagaauu

SEQ ID NO: 2598 - RNA, 1771 nt, Artificial Sequence
  mRNA product Design a-2 comprising derived and/or modified sequence from LASV(G1442-SLE-2011;Clade IV)__AIT17180__GPC (opt1)
gggagaguccgcucagccagguugcagaagcggcuuagcguguguccuaaucuucucucugcguguagguaggccugugccgcaaacaagcuuaccaugggccagaucgugaccuucuuccaggaggucccccacgugaucgaggaggugaugaacaucguccugaucgcccucagcauccuggccgugcugaaggggcucuacaacguggcgaccugcggccugaucgggcuggucacguuccuccugcugugcggccgcuccugcaccaccacccucuacaaggggguguacgagcugcagacgcuggagcucaacauggagacccugaacaugaccaugccgcugagcugcaccaagaacaacucccaccacuacauccgggugggcaacgagacgggccucgagcugacccugaccaacaccagcaucaucaaccacaaguucugcaaccucuccgacgcccacaagaagaaccuguacgaccacgcccugaugagcaucaucuccacguuccaccucagcauccccaacuucaaccaguacgaggccauguccugcgacuucaacgggggcaagaucagcguccaguacaaccugucccacagcuacgccggggacgcggccaaccacugcggcaccguggccaacggggugcugcagaccuucaugcgcauggccuggggcggcuccuacaucgcgcucgacagcgggcggggcaacugggacugcaucaugaccuccuaccaguaccugaucauccagaacacgaccugggacgaccacugccaguucagccgccccucccccaucggguaccugggccuccugagccagcggacccgcgacgucuacaucucccggcgccugcucggcaccuucacguggacccugagcgacagcgaggggaaggacaccccgggcggguacugccugacccgguggaugcucaucgaggccgagcugaagugcuucggcaacacggccguggccaagugcaacgagaagcacgacgaggaguucugcgacaugcugcgccucuucgacuucaacaagcaggccauccagcggcugaaggcggaggcccagauguccauccagcugaucaacaaggccgugaacgcccucaucaacgaccagcugaucaugaagaaccaccuccgcgacaucauggggauccccuacugcaacuacagcaaguacugguaccugaacaacaccgccaccggcaagaccucccugcccaagugcuggcugaucagcaacggcuccuaccucaacgagacgcacuucagcgacgacaucgagcaggaggcggacaacaugaucaccgagaugcugcagaaggaguacauggagcggcaggggaagacgccccugggccucgucgaccuguucguguucuccaccagcuucuaccugaucuccaucuuccugcaccucgugaagaucccgacccaccgccacaucgucggcaagagcugccccaagccccaccggcugaaccacauggggaucugcuccugcgggcuguacaagcagcccggcgugccggugcgcuggaagcggugaggacuagucccuguucccagagcccacuuuuuuuucuuuuuuugaaauaaaauagccugucuuucagaucuaaaaaaaaaaaaaaaaaaaaaaaaaaaaaaaaaaaaaaaaaaaaaaaaaaaaaaaaaaaaaaaaugcaucccccccccccccccccccccccccccccccaaaggcucuuuucagagccaccagaauu

SEQ ID NO: 2599 - RNA, 1771 nt, Artificial Sequence
  mRNA product Design a-2 comprising derived and/or modified sequence from LASV(G3010-SLE-2013;Clade IV)__AIT17344__GPC (opt1)
gggagaguccgcucagccagguugcagaagcggcuuagcguguguccuaaucuucucucugcguguagguaggccugugccgcaaacaagcuuaccaugggccagaucgugaccuucuuccaggaggucccccacgugaucgaggaggugaugaacaucguccugaucgcccucagcauccuggccgugcugaaggggcucuacaacuucgcgaccugcggccugguggggcuggucacguuccuccugcugugcggccgcuccugcaccaccagccucuacaaggggguguacgagcugcagacccuggagcucaacauggagacgcugaacaugaccaugccgcuguccugcaccaagaacaacagccaccacuacaucauggugggcaacgagaccggccucgagcugacgcugaccaacaccuccaucaucaaccacaaguucugcaaccucagcgacgcccacaagaagaaccuguacaaccacgcccugauguccaucaucagcaccuuccaccucuccauccccaacuucaaccaguacgaggccaugagcugcgacuucaacgggggcaagaucuccguccaguacaaccugagccacuccuacgccggggacgcggccagccacugcggcacgguggccaacggggugcugcagaccuucaugcggauggccuggggcggcuccuacaucgcgcucgacagcggguacggcaagugggacugcaucaugaccuccuaccaguaccugaucauccagaacaccacgugggaggaccacugccaguucagccgccccucccccaucggguaccugggccuccugagccagcggacccgcgacaucuacaucagccggcgccugcucggcaccuucaccuggacgcuguccgacagcgaggggaaggacaccccgggcggguacugccugacccgguggaugcucaucgaggccgagcugaagugcuucggcaacaccgccgucgccaagugcaacgagaagcacgacgaggaguucugcgacaugcugcgccucuucgacuucaacaagcaggccauccagcggcugaagacggaggcgcagauguccauccagcugaucaacaaggccgugaacgcccucaucaacgaccagcugaucaugaagaaccaccuccgcgacaucauggggauccccuacugcaacuacagcaaguacugguaccugaaccacaccaccaccggcaagacgucccugcccaagugcuggcuggugagcaacggcuccuaccucaacgagacccacuucagcgacgacaucgagcagcaggccgacaacaugaucaccgagaugcugcagaaggaguacauggagcggcaggggaagacgccccugggccucgucgaccuguucguguucuccaccagcuucuaccugaucuccaucuuccugcaccucgugaagaucccgacccaccgccacaucgucggcaagagcugccccaagccccaccggcugaaccacauggggaucugcuccugcgggcuguacaagcagcccggcgugccggugcgcuggaagcggugaggacuagucccuguucccagagcccacuuuuuuuucuuuuuuugaaauaaaauagccugucuuucagaucuaaaaaaaaaaaaaaaaaaaaaaaaaaaaaaaaaaaaaaaaaaaaaaaaaaaaaaaaaaaaaaaaugcaucccccccccccccccccccccccccccccccaaaggcucuuuucagagccaccagaauu

SEQ ID NO: 2600 - RNA, 1771 nt, Artificial Sequence
  mRNA product Design a-2 comprising derived and/or modified sequence from LASV(G502-SLE-2009;Clade IV)__AIT17126__GPC (opt1)
gggagaguccgcucagccagguugcagaagcggcuuagcguguguccuaaucuucucucugcguguagguaggccugugccgcaaacaagcuuaccaugggccagaucgugaccuucuuccaggaggucccccacgugaucgaggaggugaugaacaucguccugaucgcccucagcauccuggccgugcugaaggggcucuacaacuucgcgaccugcggccugguggggcugcucacguuccugcugcucugcggccgcuccugcaccaccgggcuguacaagggcgucuacgagcugcagacccucgagcugaacauggagacgcugaacaugaccaugccgcucagcugcaccaagaacaacucccaccacuacaucauggugggcaacgagaccgggcuggagcugacgcucaccaacaccagcaucaucaaccacaaguucugcaaccuguccgacgcccacaagaagaaccuguacgaccacgcccucaugagcaucaucuccaccuuccaccugagcauccccaacuucaaccaguacgaggccauguccugcgacuucaacggcgggaagaucagcgugcaguacaaccugucccacagcuacgccggcgacgcggccgaccacugcgggacggucgccaacggcgugcuccagaccuucaugcggauggccuggggcggguccuacaucgcgcuggacagcggccgcgggcggugggacugcaucaugaccuccuaccaguaccugaucauccagaacaccacgugggaggaccacugccaguucagccgccccucccccaucggcuaccucggccugcugagccagcggacccgcgacaucuacaucucccggcgccuccuggggaccuucaccuggacgcugagcgacagcgagggcaaggacacccccgggggcuacugccucacccgguggaugcugaucgaggccgagcugaagugcuucgggaacaccgccguggccaagugcaacgagaagcacgacgaggaguucugcgacaugcuccgccuguucgacuucaacaagcaggccauccagcggcugaaggcggaggcccagauguccauccagcucaucaacaaggccgucaacgcccugaucaacgaccagcuggugaugaagaaccaccuccgcgacaucaugggcauccccuacugcaacuacagccgguacugguaccugaaccacacgaccaccggccgcaccucccugcccaagugcuggcucgugagcaacggguccuaccugaacgagacgcacuucagcgacgacaucgagcagcaggccgacaacaugaucaccgagaugcugcagaaggaguacauggagcggcagggcaagaccccgcucgggcuggucgaccuguucguguucuccaccagcuucuaccugaucuccaucuuccuccaccuggugaagaucccgacgcaccgccacaucgucggcaagagcugccccaagccccaccggcugaaccacauggggaucugcuccugcggccucuacaagcagcccggcgugccggugaaguggaagcgcugaggacuagucccuguucccagagcccacuuuuuuuucuuuuuuugaaauaaaauagccugucuuucagaucuaaaaaaaaaaaaaaaaaaaaaaaaaaaaaaaaaaaaaaaaaaaaaaaaaaaaaaaaaaaaaaaaugcaucccccccccccccccccccccccccccccccaaaggcucuuuucagagccaccagaauu

SEQ ID NO: 2601 - RNA, 1771 nt, Artificial Sequence
  mRNA product Design a-2 comprising derived and/or modified sequence from LASV(G733-SLE-2010;Clade IV)__AIT17154__GPC (opt1)
gggagaguccgcucagccagguugcagaagcggcuuagcguguguccuaaucuucucucugcguguagguaggccugugccgcaaacaagcuuaccaugggccagaucgugaccuucuuccaggaggucccccacgugaucgaggaggugaugaacaucguccugaucgcccucagcauccuggccgugcugaaggggcucuacaacuucgcgaccugcggcaucguggggcuggucuccuuccugcuccugugcggccgcagcugcacgaccucccuguacaaggggguguacgagcuccagacccuggagcugaacauggagacccucaacaugacgaugccgcugagcugcaccaagaacaacucccaccacuacaucauggugggcaacgagaccggccuggagcucacccugacgaacaccagcaucaucaaccacaaguucugcaaccuguccgacgcccacaagaagaaccucuacgaccacgcccugaugagcaucaucuccaccuuccaccugagcauccccaacuucaaccaguacgaggccauguccugcgacuucaacgggggcaagaucagcguccaguacaaccucucccacagcuacgccggggacgcggccaaccacugcggcaccaucgccaacggggugcugcagacguucaugcggauggccuggggcggcuccuacaucgcgcuggacagcgggcgcgaccggugggacugcaucaugaccuccuaccaguaccucaucauccagaacaccaccugggaggaccacugccaguucagccgccccucccccaucggcuaccuggggcugcucagccagcggacgcgcgacaucuacaucagccggcgccugcugggcaccuucaccuggacccucuccgacagcgagggcaaggacacgcccgggggcuacugccugacccgguggaugcugaucgaggccgagcucaagugcuucgggaacaccgccguggccaagugcaacgagaagcacgacgaggaguucugcgacaugcugcgccuguucgacuucaacaagcaggccauccagcggcucaaggcggaggcccagauguccauccagcugaucaacaaggccgucaacgcccugaucaacgaccagcucaucaugaagaaccaccuccgcgacaucaugggcauccccuacugcaacuacagcaaguacugguaccugaaccacaccacgaccgggaagaccucccugcccaagugcuggcuggugagcaacggcuccuaccugaacgagacccacuucagcgacgacaucgagcagcaggccgacaacaugaucacggagaugcuccagaaggaguacauggagcggcagggcaagaccccgcuggggcugguggaccucuucgucuucuccaccagcuucuaccugaucuccaucuuccugcaccuggugaagaucccgacccaccgccacguggucggcaagagcugccccaagccccaccggcucaaccacauggggaucugcuccugcggccuguacgggcagcccggcgugccggugaaguggaagcgcugaggacuagucccuguucccagagcccacuuuuuuuucuuuuuuugaaauaaaauagccugucuuucagaucuaaaaaaaaaaaaaaaaaaaaaaaaaaaaaaaaaaaaaaaaaaaaaaaaaaaaaaaaaaaaaaaaugcaucccccccccccccccccccccccccccccccaaaggcucuuuucagagccaccagaauu

SEQ ID NO: 2602 - RNA, 1771 nt, Artificial Sequence
  mRNA product Design a-2 comprising derived and/or modified sequence from MOPV/LASV reassortant(IGS-1;Clade IV)__AFY05576__GPC (opt1)
gggagaguccgcucagccagguugcagaagcggcuuagcguguguccuaaucuucucucugcguguagguaggccugugccgcaaacaagcuuaccaugggccagaucgugaccuucuuccaggaggucccccacgugaucgaggaggugaugaacaucguccugaucgcccucagcgugcuggccgugcugaaggggcucuacaacuucgcgaccugcggccuggucgggcuggugacguuccuccugcugugcggccgcuccugcaccaccagccucuacaaggggguguacgagcugcagacccuggagcucaacauggagacgcugaacaugaccaugccgcuguccugcaccaagaacaacagccaccacuacaucauggucggcaacgagaccggccucgagcugacgcugaccaacaccuccaucaucaaccacaaguucugcaaccucagcgacgcccacaagaagaaccuguacgaccacgcccugauguccaucaucagcaccuuccaccucuccauccccaacuucaaccaguacgaggccaugagcugcgacuucaacgggggcaagaucuccgugcaguacaaccugagccacuccuacgccggggacgcggccaaccacugcggcacgguggccaacgggguccugcagaccuucaugcggauggccuggggcggcagcuacaucgcgcucgacuccgggcgcggcaacugggacugcaucaugaccagcuaccaguaccugaucauccagaacaccacgugggaggaccacugccaguucucccggcccagccccaucggguaccugggccuccugucccagcgcacccgggacaucuacaucagccgccggcugcucggcaccuucaccuggacgcugagcgacuccgagggggaggacaccccgggcggguacugccugacccgcuggaugcucaucgaggccgagcugaagugcuucggcaacaccgccguggccaagugcaacgagaagcacgacgaggaguucugcgacaugcugcggcuguucgacuucaacaagcaggccauccagcgccugaaggcggaggcccagaugagcauccagcugaucaacaaggccgugaacgcccucaucaacgaccagcugaucaugaagaaccaccuccgggacaucauggggauccccuacugcaacuacuccaaguacugguaccucaaccacacgaccaccggccgcaccagccugcccaagugcuggcuggucuccaacggcagcuaccucaacgagacgcacuucuccgacgacaucgagcagcaggccgacaacaugaucaccgagaugcugcagaaggaguacauggagcggcaggggaagacgccccugggccucguggaccuguucguguucagcaccuccuucuaccugaucagcaucuuccugcaccucgucaagaucccgacccaccgccacaucguggggaaguccugccccaagccccaccggcugaaccacaugggcaucugcagcugcgggcuguacaagcagcccggcgugccggucaaguggaagcgcugaggacuagucccuguucccagagcccacuuuuuuuucuuuuuuugaaauaaaauagccugucuuucagaucuaaaaaaaaaaaaaaaaaaaaaaaaaaaaaaaaaaaaaaaaaaaaaaaaaaaaaaaaaaaaaaaaugcaucccccccccccccccccccccccccccccccaaaggcucuuuucagagccaccagaauu

SEQ ID NO: 2603 - RNA, 1771 nt, Artificial Sequence
  mRNA product Design a-2 comprising derived and/or modified sequence from LASV(LM765-SLE-2012;Clade IV)__AIT17814__GPC (opt1)
gggagaguccgcucagccagguugcagaagcggcuuagcguguguccuaaucuucucucugcguguagguaggccugugccgcaaacaagcuuaccaugggccagaucgugaccuucuuccaggaggucccccacgugaucgaggaggugaugaacaucguccugaucgcccucagcauccuggccgugcugaaggggcucuacaacuucgcgaccugcggccugguggggcuggucacguuccuccugcugugcggccgcuccugcaccaccagccucuacaaggggguguacgagcugcagacccuggagcucaacauggagacgcugaacaugaccaugccgcuguccugcaccaagaacaacagccaccacuacaucauggugggcaacgagaccggccucgagcugacgcugaccaacaccuccaucaucgaccacaaguucugcaaccucagcgacgcccaccggaagaaccuguacgaccacgcccugauguccaucaucagcaccuuccaccucuccauccccaacuucaaccaguacgaggccaugagcugcgacuucaacgggggcaagaucuccguccaguacaaccugagccacuccuacgccaaggacgcggccgaccacugcgggacgguggccaacggcgugcugcagaccuucaugcgcauggccuggggcgggagcuacaucgcgcucgacuccggccgggggcgcugggacugcaucaugaccagcuaccaguaccugaucauccagaacaccacgugggaggaccacugccaguucucccggcccagccccaucggcuaccuggggcuccugucccagcgcacccgggacaucuacaucagccgccggcugcucggcaccuucaccuggacgcugagcgacuccgagggcaaggacacccccgggggcuacugccugacccgcuggaugcucaucgaggccgagcugaagugcuucgggaacaccgccgucgccaagugcaacgagaagcacgacgaggaguucugcgacaugcugcggcuguucgacuucaacaagcaggccauccagcgccugaaggcggaggcccagaugagcauccagcugaucaacaaggccgugaacgcccucaucaacgaccagcugaucaugaagaaccaccuccgggacaucaugggcauccccuacugcaacuacuccaaguacugguaccucaaccacacgaccaccgggaagaccagccugcccaagugcuggcugguguccaacggcagcuaccucaacgagacgcacuucuccgacgacaucgagcagcaggccgacaacaugaucaccgagaugcugcagaaggaguacauggagcgccagggcaagaccccgcuggggcucgucgaccuguucguguucagcaccuccuucuaccugaucagcaucuuccugcaccucgugaagaucccgacgcaccggcacaucgucggcaagcccugccccaagccccaccgccugaaccacauggggaucugcuccugcggccuguacaagcagccgggggugcccgugaaguggaagcggugaggacuagucccuguucccagagcccacuuuuuuuucuuuuuuugaaauaaaauagccugucuuucagaucuaaaaaaaaaaaaaaaaaaaaaaaaaaaaaaaaaaaaaaaaaaaaaaaaaaaaaaaaaaaaaaaaugcaucccccccccccccccccccccccccccccccaaaggcucuuuucagagccaccagaauu

SEQ ID NO: 2604 - RNA, 1771 nt, Artificial Sequence
  mRNA product Design a-2 comprising derived and/or modified sequence from LASV(LM776-SLE-2012;Clade IV)__AIT17824__GPC (opt1)
gggagaguccgcucagccagguugcagaagcggcuuagcguguguccuaaucuucucucugcguguagguaggccugugccgcaaacaagcuuaccaugggccagaucgugaccuucuuccaggaggucccccacgugaucgaggaggugaugaacaucguccugaucgcccucagcauccuggccgugcugaaggggcucuacaacuucgcgaccugcggccugguggggcuggucacguuccuccugcugugcggccgcuccugcaccaccagcguguacaaggggguguacgagcuccagacccuggagcugaacauggagacgcucaacaugaccaugccgcuguccugcaccaagaacaacagccaccacuacaucauggucggcaacgagaccggccuggagcucacgcugaccaacaccuccaucaucaaccacaaguucugcaaccugagcgacgcccacaagaagaaccucuacgaccacgcccugauguccaucaucagcaccuuccaccuguccauccccaacuucaaccaguacgaggccaugagcugcgacuucaacgggggcaagaucuccgugcaguacaaccucagccacuccuacgccggggacgcggccaaccacugcggcacgguggccaacgggguccugcagaccuucaugcggauggccuggggcggcagcuacaucgcgcuggacuccgggcacggcaagugggacugcaucaugaccagcuaccaguaccucaucauccagaacaccacgugggaggaccacugccaguucucccgccccagccccaucggguaccugggccugcucucccagcggacccgcgacaucuacaucagccggcgccugcugggcaccuucaccuggacgcucagcgacuccgaggggaaggacaccccgggcggguacugccugacccgguggaugcugaucgaggccgagcucaagugcuucggcaacaccgccguggccaagugcaacgagaagcacgacgaggaguucugcgacaugcugcgccuguucgacuucaacaagcaggccauccagcggcucaaggcggaggcccagaugagcauccagcugaucaacaaggccgugaacgcccugaucaacgaccagcucaucaugaagaaccaccuccgcgacaucauggggauccccuacugcaacuacuccaaguacugguaccugaaccacacgaccaccggcaagaccagccugcccaagugcuggcuggucuccaacggcagcuaccugaacgagacgcacuucuccgacgacaucgagcagcaggccgacaacaugaucaccgagaugcuccagaaggaguacauggagcggcaggggaagacgccccugggccugguggaccucuucguguucagcaccuccuucuaccugaucagcaucuuccugcaccuggucaagaucccgacccaccgccacaucguggggaaguccugccccaagccccaccggcucaaccacaugggcaucugcagcugcgggcuguacaagcagcccggcgugccgguccgcuggaagcggugaggacuagucccuguucccagagcccacuuuuuuuucuuuuuuugaaauaaaauagccugucuuucagaucuaaaaaaaaaaaaaaaaaaaaaaaaaaaaaaaaaaaaaaaaaaaaaaaaaaaaaaaaaaaaaaaaugcaucccccccccccccccccccccccccccccccaaaggcucuuuucagagccaccagaauu

SEQ ID NO: 2605 - RNA, 1771 nt, Artificial Sequence
  mRNA product Design a-2 comprising derived and/or modified sequence from LASV(Mad39;Clade IV)__ANH09722__GPC (opt1)
gggagaguccgcucagccagguugcagaagcggcuuagcguguguccuaaucuucucucugcguguagguaggccugugccgcaaacaagcuuaccaugggccagaucgugaccuucuuccaggaggucccccacgugaucgaggaggugaugaacaucguccugaucgcccucagcauccuggccgugcugaaggggcucuacaacguggcgaccugcggccugaucgggcuggucacguuccuccugcugugcggccgcuccugcaccaccacccucuacaaggggguguacgagcugcaggcccuggagcucaacauggagacgcugaacaugaccaugccgcugagcugcaccaagaacaacucccaccacuacauccgggugggcaacgagaccggccucgagcugacgcugaccaacaccagccucaucaaccacaaguucugcaaccuguccgacgcccacaagaagaaccuguacgaccacgcccucaugagcaucaucuccaccuuccaccugagcauccccaacuucaaccaguacgaggccauguccugcgacuucaacgacgggaagaucagcguccaguacaaccugucccacacguacgcgggcgacaccgccaaccacugcgggaccguggccaacggcgugcuccagaccuucaugcgcauggccuggggcgggagcuacaucgcgcuggacuccggccgcgggggcugggacugcaucaugacgagcuaccaguaccugaucauccagaacaccaccugggaggaccacugccaguucucccggcccagccccaucggguaccucggccugcugucccagcggacccgcgacaucuacaucagccggcgccuccugggcacguucaccuggacccuguccgacagcgaggggaaggacaccccgggcggguacugccucacgcgguggaugcugaucgaggccgagcugaagugcuucggcaacaccgccgucgccaagugcaacgagaagcacgacgaggaguucugcgacaugcuccgccuguucgacuucaacaagcaggccauccagcggcugaaggcggaggcccagaugagcauccagcucaucaacaaggccgugaacgcccugaucaacgaccagcugaucaugaagaaccaccuccgcgacaucauggggauccccuacugcaacuacuccaaguacugguaccugaaccacaccgugaccggcaagacgagccugcccaagugcuggcucgucuccaacggcagcuaccugaacgagacccacuucuccgacgacaucgagcagcaggccgacaacaugaucaccgagaugcugcagaaggaguacauggagcggcaggggaagacgccccucggccugguggaccuguucguguucagcaccuccuucuaccugaucagcaucuuccuccaccuggucaagaucccgacccaccgccacgugguggggaagcccugccccaagccccaccggcugaaccacaugggcaucugcuccugcggguucuacaagcagccgggcguccccgugcgcuggaagcggugaggacuagucccuguucccagagcccacuuuuuuuucuuuuuuugaaauaaaauagccugucuuucagaucuaaaaaaaaaaaaaaaaaaaaaaaaaaaaaaaaaaaaaaaaaaaaaaaaaaaaaaaaaaaaaaaaugcaucccccccccccccccccccccccccccccccaaaggcucuuuucagagccaccagaauu

SEQ ID NO: 2606 - RNA, 1771 nt, Artificial Sequence
  mRNA product Design a-2 comprising derived and/or modified sequence from LASV(Z0947-SLE-2011;Clade IV)__AIT17840__GPC (opt1)
gggagaguccgcucagccagguugcagaagcggcuuagcguguguccuaaucuucucucugcguguagguaggccugugccgcaaacaagcuuaccaugggccagaucgugaccuucuuccaggaggucccccacgugaucgaggaggugaugaacaucguccugaucgcccucagcauccuggccgugcugaaggggcucuacaacuucgcgaccugcggccugguggggcuggucacguuccuccugcugugcggccgcuccugcaccaucagccucuacaaggggguguacgagcugcagacccuggagcucaacauggagacccugaacaugacgaugccgcuguccugcaccaagaacaacagccaccacuacaucauggugggcaacgagaccggccucgagcugacccugacgaacaccuccaucaucaaccacaaguucugcaaccucagcgacgcccacaagaagaaccuguacgaccacgcccugauguccaucaucagcaccuuccaccucuccauccccaacuucaaccaguacgaggccaugagcugcgacuucaacgggggcaagaucuccguccaguacaaccugagccacuccuacgccggggacgcggccaaccacugcggcaccguggccaacggggugcugcagacguucaugcggauggccuggggcggcagcuacaucgcgcucgacuccgggcgcgaccggugggacugcaucaugaccagcuaccaguaccugaucauccagaacaccaccugggaggaccacugccaguucucccgccccagccccaucggcuaccuggggcuccugucccagcggacgcgcgacaucuacaucagccggcgccugcucggcaccuucaccuggacccugagcgacuccgagggcaaggacacgcccgggggcuacugccugacccgguggaugcucaucgaggccgagcugaagugcuucgggaacaccgccgucgccaagugcaacgagaagcacgacgaggaguucugcgacaugcugcgccucuucgacuucaacaagcaggccauccagcggcugaaggcggaggcccagaugagcauccagcugaucaacaaggccgugaacgcccucaucaacgaccagcugaucaugaagaaccaccuccgcgacaucaugggcauccccuacugcaacuacuccaaguacugguaccugaaccacaccacgaccgggaagaccagccugcccaagugcuggcugguguccaacggcagcuaccucaacgagacccacuucuccgacgacaucgagcagcaggccgacaacaugaucacggagaugcugcagaaggaguacauggagcggcagggcaagaccccgcuggggcucgucgaccuguucguguucagcaccuccuucuaccugaucagcaucuuccugcaccucgugaagaucccgacccaccgccacaucgucggcaagcccugccccaagccccaccggcugaaccacauggggaucugcuccugcggccuguacaagcagccgggggugcccgugaaguggaagcgcugaggacuagucccuguucccagagcccacuuuuuuuucuuuuuuugaaauaaaauagccugucuuucagaucuaaaaaaaaaaaaaaaaaaaaaaaaaaaaaaaaaaaaaaaaaaaaaaaaaaaaaaaaaaaaaaaaugcaucccccccccccccccccccccccccccccccaaaggcucuuuucagagccaccagaauu

SEQ ID NO: 2607 - RNA, 1771 nt, Artificial Sequence
  mRNA product Design a-2 comprising derived and/or modified sequence from LASV(Josiah;Clade IV)__NP_694870__GPC (opt2)
gggagaguccgcucagccagguugcagaagcggcuuagcguguguccuaaucuucucucugcguguagguaggccugugccgcaaacaagcuuaccaugggccagaucgucaccuucuuccaggaggucccccacgucaucgaggaggucaugaacaucguccucaucgcccucuccguccucgccguccucaagggccucuacaacuucgccaccugcggccucgucggccucgucaccuuccuccuccucugcggccgcuccugcaccaccucccucuacaagggcgucuacgagcuccagacccucgagcucaacauggagacccucaacaugaccaugccccucuccugcaccaagaacaacucccaccacuacaucauggucggcaacgagaccggccucgagcucacccucaccaacaccuccaucaucaaccacaaguucugcaaccucuccgacgcccacaagaagaaccucuacgaccacgcccucauguccaucaucuccaccuuccaccucuccauccccaacuucaaccaguacgaggccauguccugcgacuucaacggcggcaagaucuccguccaguacaaccucucccacuccuacgccggcgacgccgccaaccacugcggcaccgucgccaacggcguccuccagaccuucaugcgcauggccuggggcggcuccuacaucgcccucgacuccggccgcggcaacugggacugcaucaugaccuccuaccaguaccucaucauccagaacaccaccugggaggaccacugccaguucucccgccccucccccaucggcuaccucggccuccucucccagcgcacccgcgacaucuacaucucccgccgccuccucggcaccuucaccuggacccucuccgacuccgagggcaaggacacccccggcggcuacugccucacccgcuggaugcucaucgaggccgagcucaagugcuucggcaacaccgccgucgccaagugcaacgagaagcacgacgaggaguucugcgacaugcuccgccucuucgacuucaacaagcaggccauccagcgccucaaggccgaggcccagauguccauccagcucaucaacaaggccgucaacgcccucaucaacgaccagcucaucaugaagaaccaccuccgcgacaucaugggcauccccuacugcaacuacuccaaguacugguaccucaaccacaccaccaccggccgcaccucccuccccaagugcuggcucgucuccaacggcuccuaccucaacgagacccacuucuccgacgacaucgagcagcaggccgacaacaugaucaccgagaugcuccagaaggaguacauggagcgccagggcaagaccccccucggccucgucgaccucuucgucuucuccaccuccuucuaccucaucuccaucuuccuccaccucgucaagauccccacccaccgccacaucgucggcaaguccugccccaagccccaccgccucaaccacaugggcaucugcuccugcggccucuacaagcagcccggcguccccgucaaguggaagcgcugaggacuagucccuguucccagagcccacuuuuuuuucuuuuuuugaaauaaaauagccugucuuucagaucuaaaaaaaaaaaaaaaaaaaaaaaaaaaaaaaaaaaaaaaaaaaaaaaaaaaaaaaaaaaaaaaaugcaucccccccccccccccccccccccccccccccaaaggcucuuuucagagccaccagaauu

SEQ ID NO: 2608 - RNA, 1768 nt, Artificial Sequence
  mRNA product Design a-2 comprising derived and/or modified sequence from LASV(LP;Clade I)__AAF86701__GPC (opt2)
gggagaguccgcucagccagguugcagaagcggcuuagcguguguccuaaucuucucucugcguguagguaggccugugccgcaaacaagcuuaccaugggccagaucaucaccuucuuccaggaggucccccacgucaucgaggaggucaugaacaucguccucaucgcccucucccuccucgccauccucaagggccucuacaacaucgccaccugcggcaucaucggccucgucgccuuccucuuccucugcggcaaguccugcucccucacccucaagggcggcuacgagcuccagacccucgagcucaacauggagacccucaacaugaccaugccccucuccugcaccaagaacuccucccaccacuacauccgcgucggcaacgagaccggccucgagcucacccucaccaacaccuccaucaucaaccacaaguucugcaaccucuccgacgcccacaagaagaaccucuacgaccacgcccucauguccaucaucuccaccuuccaccucuccauccccaacuucaaccaguacgaggccauguccugcgacuucaacggcggcaagaucuccguccaguacaaccucucccacuccuacgccggcgacgccgccgagcacugcggcaccgucgccaacggcguccuccagaccuucaugcgcauggccuggggcggccgcuacaucgcccucgacuccggcaagggcaacugggacugcaucaugaccuccuaccaguaccucaucauccagaacaccaccugggaggaccacugccaguucucccgccccucccccaucggcuaccucggccuccucucccagcgcacccgcgacaucuacaucucccgccgccuccucggcaccuucaccuggacccucuccgacuccgagggcaacgagacccccggcggcuacugccucacccgcuggaugcucaucgaggccgagcucaagugcuucggcaacaccgccgucgccaagugcaacgagaagcacgacgaggaguucugcgacaugcuccgccucuucgacuucaacaagcaggccauccgccgccucaaggccgaggcccagauguccauccagcucaucaacaaggccgucaacgcccucaucaacgaccagcucaucaugaagaaccaccuccgcgacaucaugggcauccccuacugcaacuacuccaaguacugguaccucaaccacaccuccuccggccgcaccucccuccccaagugcuggcucaucuccaacggcuccuaccucaacgagacccaguucuccgacgacaucgagcagcaggccgacaacaugaucaccgagaugcuccagaaggaguacaucgagcgccagggcaagaccccccucggccucgucgacaucuucaucuucuccaccuccuucuaccucaucuccaucuuccuccaccucaucaagauccccacccaccgccacaucgucggcaagcccugccccaagccccaccgccucaaccacaugggcgucugcuccugcggccucuacaagcaccccggcguccccaccaaguggaagcgcugaggacuagucccuguucccagagcccacuuuuuuuucuuuuuuugaaauaaaauagccugucuuucagaucuaaaaaaaaaaaaaaaaaaaaaaaaaaaaaaaaaaaaaaaaaaaaaaaaaaaaaaaaaaaaaaaaugcaucccccccccccccccccccccccccccccccaaaggcucuuuucagagccaccagaauu

SEQ ID NO: 2609 - RNA, 1768 nt, Artificial Sequence
  mRNA product Design a-2 comprising derived and/or modified sequence from LASV(803213;Clade II)__AAF86703__GPC (opt2)
gggagaguccgcucagccagguugcagaagcggcuuagcguguguccuaaucuucucucugcguguagguaggccugugccgcaaacaagcuuaccaugggccagaucaucaccuucuuccaggaggucccccacgucaucgaggaggucaugaacaucguccucaucgcccucucccuccucgccauccucaagggcaucuacaacgucgccaccugcggccucuucggccucaucuccuuccuccuccucugcggccgcuccugcuccgucaccuacaagggcgucuacgagcuccagacccucgagcucaacauggccaaccucaacaugaccaugccccucuccugcaccaagaacaacucccaccacuacaucauggucggcaacgagaccggccucgagcucacccucaccaacaccuccaucaucaaccacaaguucugcaaccucuccgacgcccacaagaagaaccucuacgaccacgcccucauguccaucaucuccaccuuccaccucuccauccccaacuucaaccaguacgaggccauguccugcgacuucaacggcggcaagaucuccguccaguacaaccucucccacuccuucgccgucgacgccgccaaccacugcggcaccaucgccaacggcguccuccagaccuucaugcgcauggccuggggcggcuccuacaucgcccucgacuccggcaagggcaacugggacugcaucaugaccuccuaccaguaccucaucauccagaacaccaccugggaggaccacugccaguucucccgccccucccccaucggcuaccucggccuccucucccagcgcacccgcgacaucuacaucucccgccgccuccucggcaccuucaccuggacccucuccgacuccgagggcaacgaggcccccggcggcuacugccucacccgcuggaugcucaucgaggccgagcucaagugcuucggcaacaccgccgucgccaagugcaacgagaagcacgacgaggaguucugcgacaugcuccgccucuucgacuucaacaagcaggccaucaagcgccucaagaccgaggcccagauguccauccagcucaucaacaaggccgucaacgcccucaucaacgaccagcucaucaugaagaaccaccuccgcgacaucaugggcauccccuacugcaacuacucccgcuacugguaccucaaccacaccgucaccggcaagaccucccucccccgcugcuggcucgucuccaacggcuccuaccucaacgagacccacuucuccgacgacaucgagcagcaggccgacaacaugaucaccgagaugcuccagaaggaguacauggaccgccagggcaagaccccccucggccucgucgaccucuucgucuucuccaccuccuucuaccucaucuccaucuuccuccaccucgucaagauccccacccaccgccacaucgucggcaagcccugccccaagccccaccgccucaaccacaugggcaucugcuccugcggccucuacaagcaccccggcguccccgucaaguggaagcgcugaggacuagucccuguucccagagcccacuuuuuuuucuuuuuuugaaauaaaauagccugucuuucagaucuaaaaaaaaaaaaaaaaaaaaaaaaaaaaaaaaaaaaaaaaaaaaaaaaaaaaaaaaaaaaaaaaugcaucccccccccccccccccccccccccccccccaaaggcucuuuucagagccaccagaauu

SEQ ID NO: 2610 - RNA, 1768 nt, Artificial Sequence
  mRNA product Design a-2 comprising derived and/or modified sequence from LASV(GA391;Clade III)__CAA36645__GPC (opt2)
gggagaguccgcucagccagguugcagaagcggcuuagcguguguccuaaucuucucucugcguguagguaggccugugccgcaaacaagcuuaccaugggccagaucgucaccuucuuccaggaggucccccacgucaucgaggaggucaugaacaucguccucaucgcccucuccauccucgccauccucaagggccucuacaacgucgccaccugcggccucaucggccucgucaccuuccuccuccucuccggccgcuccugcucccucaucuacaagggcaccuacgagcuccagacccucgagcucaacauggagacccucaacaugaccaugccccucuccugcaccaagaacaacucccaccacuacauccgcgucggcaacgagaccggccucgagcucacccucaccaacaccuccauccucaaccacaaguucugcaaccucuccgacgcccacaagcgcaaccucuacgaccacucccucauguccaucaucuccaccuuccaccucuccauccccaacuucaaccaguacgaggccauguccugcgacuucaacggcggcaagaucaccguccaguacaaccucucccacuccuucgccgucgacgccgccggccacugcggcacccucgccaacggcguccuccagaccuucaugcgcauggccuggggcggcuccuacaucgcccucgacuccggccgcggcaacugggacugcaucaugaccuccuaccaguaccucaucauccagaacaccaccugggacgaccacugccaguucucccgccccucccccaucggcuaccucggccuccucucccagcgcacccgcgacaucuacaucucccgccgccuccucggcaccuucaccuggacccucuccgacuccgagggcaacgagacccccggcggcuacugccucacccgcuggaugcucaucgaggccgagcucaagugcuucggcaacaccgccgucgccaagugcaacgagaagcacgacgaggaguucugcgacaugcuccgccucuucgacuucaacaagcaggccauccgccgccucaagaccgaggcccagauguccauccagcucaucaacaaggccgucaacgcccucaucaacgaccagcucaucaugaagaaccaccuccgcgacaucaugggcauccccuacugcaacuacucccgcuacugguaccucaaccacaccuccaccggcaagaccucccucccccgcugcuggcucaucuccaacggcuccuaccucaacgagaccaaguucuccgacgacaucgagcagcaggccgacaacaugaucaccgagaugcuccagaaggaguacaucgaccgccagggcaagaccccccucggccucgucgaccucuucgucuucuccaccuccuucuaccucaucuccaucuuccuccaccucgucaagauccccacccaccgccacaucgucggcaagcccugccccaagccccaccgccucaaccacaugggcaucugcuccugcggccucuacaagcagcccggcguccccguccgcuggaagcgcugaggacuagucccuguucccagagcccacuuuuuuuucuuuuuuugaaauaaaauagccugucuuucagaucuaaaaaaaaaaaaaaaaaaaaaaaaaaaaaaaaaaaaaaaaaaaaaaaaaaaaaaaaaaaaaaaaugcaucccccccccccccccccccccccccccccccaaaggcucuuuucagagccaccagaauu

SEQ ID NO: 2611 - RNA, 1771 nt, Artificial Sequence
  mRNA product Design a-2 comprising derived and/or modified sequence from LASV(AV;Clade V)__CCA30314__GPC (opt2)
gggagaguccgcucagccagguugcagaagcggcuuagcguguguccuaaucuucucucugcguguagguaggccugugccgcaaacaagcuuaccaugggccagaucgucaccuucuuccaggaggucccccacgucaucgaggaggucaugaacaucguccucaucgcccucuccauccucgccguccucaagggccucuacaacaucgccaccugcggccucaucggccucaucaccuuccuccuccucugcggccgcuccugcuccuccaaccucuacaagggcgucuacgagcuccagucccucgaccucaacauggagacccucaacaugaccaugccccucuccugcaccaagaacaacucccaccacuacauccgcgucggcaacgacaccggccucgagcucacccucaccaacaccuccauccucaaccacaaguucugcaaccucuccgacgcccacaagaaggaccucuacgaccacgcccucauguccaucaucuccaccuuccaccucuccauccccaacuucaaccaguacgaggccauguccugcgacuucaacggcggcaagaucuccguccaguacaaccucucccacuccuacgccaucgacgccgccaaccacugcggcaccgucgccaacggcauccuccagaccuucaugcgcauggccuggggcggcuccuacaucgcccucgacuccggccgcggcaacugggacugcaucaugaccuccuaccaguaccucaucauccagaacaccaccugggagaaccacugccaguucucccgccccucccccaucggcuaccucggccuccucucccagcgcacccgcgacaucuacaucucccgccgccuccucggcaccuucaccuggacccucuccgacuccgagggcaacgccacccccggcggcuacugccucacccgcuggaugcucaucgaggccgagcucaagugcuucggcaacaccgccgucgccaagugcaacgagaagcacgacgaggaguucugcgacaugcuccgccucuucgacuucaacaagcaggccaucucccgccucaaguccgaggcccagauguccauccagcucaucaacaaggccgucaacgcccucaucaacgaccagcucaucaugaagaaccaccuccgcgacaucaugggcauccccuacugcaacuacuccaaguacugguaccucaaccacaccaucaccggcaagaccucccuccccaagugcuggcucgucuccaacggcuccuaccucaacgagacccacuucuccgacgacaucgagcagcaggccgacaacaugaucaccgagaugcuccagaaggaguacauggagcgccagggcaagaccccccucggccucgucgaccucuucgucuucuccaccuccuucuaccucaucuccaucuuccuccgccucgucaagauccccacccaccgccacaucgucggcaagcccugccccaagccccaccgccucaaccacaugggcaucugcuccugcggccucuacaagcagcccggcguccccguccgcuggaagcgcugaggacuagucccuguucccagagcccacuuuuuuuucuuuuuuugaaauaaaauagccugucuuucagaucuaaaaaaaaaaaaaaaaaaaaaaaaaaaaaaaaaaaaaaaaaaaaaaaaaaaaaaaaaaaaaaaaugcaucccccccccccccccccccccccccccccccaaaggcucuuuucagagccaccagaauu

SEQ ID NO: 2612 - RNA, 1768 nt, Artificial Sequence
  mRNA product Design a-2 comprising derived and/or modified sequence from LASV(Togo/2016/7082;Clade VI)__AMR44577__GPC (opt2)
gggagaguccgcucagccagguugcagaagcggcuuagcguguguccuaaucuucucucugcguguagguaggccugugccgcaaacaagcuuaccaugggccagaucaucaccuucuuccaggaggucccccacgucaucgaggaggucaugaacaucguccucaucgcccucucccuccucgccauccucaagggcgucuacaacgucgccaccugcggcaucaucggccucgucaccuuccucuuccucugcggccgcuccugcucccucaucuacaagggcuccuacgagcuccagacccucgagcucaacauggagacccucaacaugaccaugccccucuccugcaccaagaacuccucccaccacuacauccgcgucggcaacgagaccggccucgagcucacccucaccaacaccuccaucaucaaccacaaguucugcaaccucuccgacgcccacaagcgcaaccucuacgaccacgcccucauguccauccucuccaccuuccaccucuccauccccaacuucaaccaguacgaggccauguccugcgacuucaacggcggcaagaucuccguccaguacaaccucucccacgccuacgccgucgacgccgccgagcacugcggcaccgucgccaacggcguccuccagaccuucaugcgcauggccuggggcggcuccuacaucgcccucgacuccggccgcggcaacugggacugcaucaugaccuccuaccaguaccucaucauccagaacaccaccugggaggaccacugccaguucucccgccccucccccaucggcuaccucggccuccucucccagcgcacccgcgacaucuacaucucccgccgccuccucggcaccuucaccuggacccucuccgacuccgagggcaacgagacccccggcggcuacugccucacccgcuggaugcucaucgaggccgagcucaagugcuucggcaacaccgccgucgccaagugcaacgagaagcacgacgaggaguucugcgacaugcuccgccucuucgacuucaacaagcaggccauccagcgccucaaguccgaggcccagauguccauccagcucaucaacaaggccgucaacgcccucaucaacgaccagcucaucaugaagaaccaccuccgcgacaugaugggcauccccuacugcaacuacuccaaguacugguaccucaaccacaccuccuccggccgcaccucccuccccaagugcuggcucgucuccaacggcuccuaccucaacgagacccacuucuccgacgacaucgagcagcaggccgacaacaugaucaccgagaugcuccagaaggaguacaucgaccgccagggcaagaccccccucggccucgucgaccucuucgucuucuccaccuccuucuaccucaucuccaucuuccuccaccucaucaagauccccacccaccgccacaucgucggcaagcccugccccaagccccaccgccucaaccacaugggcaucugcuccugcggccucuacaagcagcccggcguccccacccgcuggaagcgcugaggacuagucccuguucccagagcccacuuuuuuuucuuuuuuugaaauaaaauagccugucuuucagaucuaaaaaaaaaaaaaaaaaaaaaaaaaaaaaaaaaaaaaaaaaaaaaaaaaaaaaaaaaaaaaaaaugcaucccccccccccccccccccccccccccccccaaaggcucuuuucagagccaccagaauu

SEQ ID NO: 2613 - RNA, 1768 nt, Artificial Sequence
  mRNA product Design a-2 comprising derived and/or modified sequence from LASV(KAK-428;Clade n.d. (VII))__ANH09740__GPC (opt2)
gggagaguccgcucagccagguugcagaagcggcuuagcguguguccuaaucuucucucugcguguagguaggccugugccgcaaacaagcuuaccaugggccagaucgucaccuucuuccaggaggucccccacgucaucgaggaggucaugaacaucguccucaucgcccucucccuccucgccauccucaagggccucuacaacuucgccaccugcggcgucaucggccucaucaccuuccuccuccucugcggccgcuccugcuccgccaccuacaagggccaguacgagcuccagacccucgagcucaacauggagucccucaacaugaccaugccccucuccugcaccaagaacaacucccaccacuacauccgcgccggcaacaacaccggccucgagcucacccucaccaacaccuccaucaucucccacaaguucugcaaccucuccgacgcccacaagaagaaccucuacgaccacacccucauguccaucaucaccaccuuccaccucuccauccccaacuucaaccaguacgaggccauguccugcgacuucaacggcggcaagaucuccauccaguacaaccucucccacuccuacgccggcgacgccgcccagcacugcggcaccgucgccaacggcguccuccagaccuucaugcgcauggccuggggcggcuccuaccucgcccucgacuccggccgccgcggcugggacugcaucaucuccuccuaccaguaccucaucauccagaacaccaccugggacgaccacugccaguucucccgccccucccccaucggcuaccucggcuucgucucccagaagacccgcgacaucuacaucucccgccgccuccucggcaccuucaccuggacccucuccgacuccgagggccacgacaugcccggcggcuacugccucacccgcuggaugcucaucgaggccgaccucaagugcuucggcaacaccgccgucgccaagugcaacgagaagcacgacgaggaguucugcgacauguggcgccucuucgacuucaacaagcaggccauccagcgccucaaggccgaggcccagaugaacauccagcucaucaacaaggccgucaacgcccucaucaacgaccagcucaugaugaagaaccaccuccgcgacaucaugggcauccccuacugcaacuacuccaaguucugguaccucaacaacaccaccaccggccgcaccucccucccccgcugcuggcucaucuccaacggcuccuaccucaacgagacccacuucuccgacgacaucgagcagcaggccgacaacaugaucaccgagaugcuccagaaggaguacauggaccgccagggcaagaccccccucggccucgucgaccucuucgucuucuccaccuccuucuaccucaucaccaucuuccuccaccucgucaagauccccacccaccgccacaucgucggcaagcccugccccaagccccaccgccucaaccacaugggcaucugcuccugcggccucuacaagcagcccggcguccccguccgcuggaagcgcugaggacuagucccuguucccagagcccacuuuuuuuucuuuuuuugaaauaaaauagccugucuuucagaucuaaaaaaaaaaaaaaaaaaaaaaaaaaaaaaaaaaaaaaaaaaaaaaaaaaaaaaaaaaaaaaaaugcaucccccccccccccccccccccccccccccccaaaggcucuuuucagagccaccagaauu

SEQ ID NO: 2614 - RNA, 1768 nt, Artificial Sequence; identical to SEQ ID NO: 2608
  mRNA product Design a-2 comprising derived and/or modified sequence from LASV(Pinneo-NIG-1969;Clade I)__AIT17836__GPC (opt2)

SEQ ID NO: 2615 - RNA, 1768 nt, Artificial Sequence
  mRNA product Design a-2 comprising derived and/or modified sequence from LASV(ISTH0009-NIG-2011;Clade II)__AIT17404__GPC (opt2)
gggagaguccgcucagccagguugcagaagcggcuuagcguguguccuaaucuucucucugcguguagguaggccugugccgcaaacaagcuuaccaugggccagaucaucaccuucuuccaggaggucccccacgucaucgaggaggucaugaacaucguccucaucgcccucucccuccucgccauccucaagggcaucuacaacgucgccaccugcggccucuucggccucgucuccuuccuccuccucugcggccgcuccugcuccaccaccuacaagggcgucuacgagcuccagacccucgagcucgacauggccucccucaacaugaccaugccccucuccugcaccaagaacaacucccaccacuacaucauggucggcaacgagaccggccucgagcucacccucaccaacaccuccaucaucaaccacaaguucugcaaccucuccgacgcccacaagaagaaccucuacgaccacgcccucauguccaucaucuccaccuuccaccucuccauccccaacuucaaccaguacgaggccauguccugcgacuucaacggcggcaagaucuccguccaguacaaccucucccacgccuacgccgucgacgccgccaaccacugcggcaccaucgccaacggcguccuccagaccuucaugcgcauggccuggggcggcuccuacaucgcccucgacuccggcaagggcuccugggacugcaucaugaccuccuaccaguaccucaucauccagaacaccaccugggaggaccacugccaguucucccgccccucccccaucggcuaccucggccuccucucccagcgcacccgcgacaucuacaucucccgccgccuccucggcaccuucaccuggacccucuccgacuccgagggcaacgagacccccggcggcuacugccucacccgcuggaugcucaucgaggccgagcucaagugcuucggcaacaccgccgucgccaagugcaacgagaagcacgacgaggaguucugcgacaugcuccgccucuucgacuucaacaagcaggccauccgccgccucaagaccgaggcccagauguccauccagcucaucaacaaggccgucaacgcccucaucaacgaccagcucaucaugaagaaccaccuccgcgacaucaugggcauccccuacugcaacuacuccaaguacugguaccucaaccacaccgucaccggcaagaccucccucccccgcugcuggcucgucuccaacggcuccuaccucaacgagacccacuucuccgacgacaucgagcagcaggccgacaacaugaucaccgagcuccuccagaaggaguacauggaccgccagggcaagaccccccucggccucgucgaccucuucgucuucuccaccuccuucuaccucaucuccaucuuccuccaccucaucaagauccccacccaccgccacaucaccggcaagcccugccccaagccccaccgccucaaccacaugggcaucugcuccugcggccucuacaagcaccccggcguccccgucaaguggaagcgcugaggacuagucccuguucccagagcccacuuuuuuuucuuuuuuugaaauaaaauagccugucuuucagaucuaaaaaaaaaaaaaaaaaaaaaaaaaaaaaaaaaaaaaaaaaaaaaaaaaaaaaaaaaaaaaaaaugcaucccccccccccccccccccccccccccccccaaaggcucuuuucagagccaccagaauu

SEQ ID NO: 2616 - RNA, 1768 nt, Artificial Sequence
  mRNA product Design a-2 comprising derived and/or modified sequence from LASV(ISTH2010-NIG-2012;Clade II)__AIT17482__GPC (opt2)
gggagaguccgcucagccagguugcagaagcggcuuagcguguguccuaaucuucucucugcguguagguaggccugugccgcaaacaagcuuaccaugggccagaucaucaccuucuuccaggaggucccccacgucaucgaggaggucaugaacaucguccucaucgcccucucccuccucgccauccucaagggcaucuacaacgucgccaccugcggccucuucggccucgucuccuuccuccuccucugcggccgcuccugcuccaccaccuacaagggcgucuacgagcuccagacccucgagcucgacauggccucccucaacaugaccaugccccucuccugcaccaagaacaacucccaccacuacaucauggucggcaacgagaccggccucgagcucacccucaccaacaccuccaucaucaaccacaaguucugcaaccucuccgacgcccacaagaagaaccucuacgaccacgcccucauguccaucaucuccaccuuccaccucuccauccccaacuucaaccaguacgaggccauguccugcgacuucaacggcggcaagaucuccguccaguacaaccucucccacgccuacgccgucgacgccgccaaccacugcggcaccaucgccaacggcguccuccagaccuucaugcgcauggccuggggcggcuccuacaucgcccucgacuccggcaagggcuccugggacugcaucaugaccuccuaccaguaccucaucauccagaacaucaccugggaggaccacugccaguucucccgccccucccccaucggcuaccucggccuccucucccagcgcacccgcgacaucuacaucucccgccgccuccucggcaccuucaccuggacccucuccgacuccgagggcaacgagacccccggcggcuacugccucacccgcuggaugcucaucgaggccgagcucaagugcuucggcaacaccgccgucgccaagugcaacgagaagcacgacgaggaguucugcgacaugcuccgccucuucgacuucaacaagcaggccauccgccgccucaagaccgaggcccagauguccauccagcucaucaacaaggccgucaacgcccucaucaacgaccagcucaucaugaagaaccaccuccgcgacaucaugggcauccccuacugcaacuacuccaaguacugguaccucaaccacaccgucaccggcaagaccucccucccccgcugcuggcucgucuccaacggcuccuaccucaacgagacccacuucuccgacgacaucgagcagcaggccgacaacaugaucaccgagcuccuccagaaggaguacaucgaccgccagggcaagaccccccucggccucgucgaccucuucgucuucuccaccuccuucuaccucaucuccaucuuccuccaccucgucaagauccccacccaccgccacgucgucggcaagcccugccccaagccccaccgccucaaccacaugggcaucugcuccugcggccucuacaagcaccccggcguccccgucaaguggaagcgcugaggacuagucccuguucccagagcccacuuuuuuuucuuuuuuugaaauaaaauagccugucuuucagaucuaaaaaaaaaaaaaaaaaaaaaaaaaaaaaaaaaaaaaaaaaaaaaaaaaaaaaaaaaaaaaaaaugcaucccccccccccccccccccccccccccccccaaaggcucuuuucagagccaccagaauu

SEQ ID NO: 2617 - RNA, 1768 nt, Artificial Sequence
  mRNA product Design a-2 comprising derived and/or modified sequence from LASV(Lassa virus/H.sapiens-wt/NGA/2015/ISTH_0543;Clade II)__AVO03639__GPC (opt2)
gggagaguccgcucagccagguugcagaagcggcuuagcguguguccuaaucuucucucugcguguagguaggccugugccgcaaacaagcuuaccaugggccagaucaucaccuucuuccaggaggucccccacgucaucgaggaggucaugaacaucguccucaucgcccucucccuccucgccauccucaagggcaucuacaacgucgccaccugcggccucuucggccucgucuccuuccuccuccucugcggccgcuccugcuccaccaccuacaagggcgucuacgagcuccagacccucgagcucgacauggccaaccucaacaugaccaugccccucuccugcaccaagaacaacucccaccacuacaucauggucggcaacgagaccggccucgagcucacccucaccaacaccuccaucaucaaccacaaguucugcaaccucuccgacgcccacaagaagaaccucuacgaccacgcccucauguccaucaucuccaccuuccaccucuccauccccaacuucaaccaguacgaggccauguccugcgacuucaacggcggcaagaucuccguccaguacaaccucucccacaccuacgccgucgacgccgccaaccacugcggcaccaucgccaacggcguccuccagaccuucaugcgcauggccuggggcggcuccuacaucgcccucgacuccggcaagggcuccugggacugcaucaugaccuccuaccaguaccucgucauccagaacaccaccugggaggaccacugccaguucucccgccccucccccaucggcuaccucggccuccucucccagcgcacccgcgacaucuacaucucccgccgccuccucggcaccuucaccuggacccucuccgacuccgagggcaacgagacccccggcggcuacugccucacccgcuggaugcucaucgaggccgagcucaagugcuucggcaacaccgccgucgccaagugcaacgagaagcacgacgaggaguucugcgacaugcuccgccucuucgacuucaacaagcaggccauccgccgccucaagaccgaggcccagauguccauccagcucaucaacaaggccgucaacgcccucaucaacgaccagcucaucaugaagaaccaccuccgcgacaucaugggcauccccuacugcaacuacuccaaguacugguaccucaaccacaccgucaccggcaagaccucccucccccgcugcuggcucgucuccaacggcuccuaccucaacgagacccacuucuccgacgacaucgagcagcaggccgacaacaugaucaccgagcuccuccagaaggaguacaucgaccgccagggcaagaccccccucggccucgucgaccucuucgucuucuccaccuccuucuaccucaucuccaucuuccuccaccucgucaagauccccacccaccgccacaucaccggcaagcccugccccaagccccaccgccucaaccacaugggcaucugcuccugcggccucuacaagcaccccggcguccccgucaaguggaagcgcugaggacuagucccuguucccagagcccacuuuuuuuucuuuuuuugaaauaaaauagccugucuuucagaucuaaaaaaaaaaaaaaaaaaaaaaaaaaaaaaaaaaaaaaaaaaaaaaaaaaaaaaaaaaaaaaaaugcaucccccccccccccccccccccccccccccccaaaggcucuuuucagagccaccagaauu

SEQ ID NO: 2618 - RNA, 1768 nt, Artificial Sequence
  mRNA product Design a-2 comprising derived and/or modified sequence from LASV(Lassa virus/H.sapiens-wt/NGA/2016/ISTH_0009;Clade II)__AVO03571__GPC (opt2)
gggagaguccgcucagccagguugcagaagcggcuuagcguguguccuaaucuucucucugcguguagguaggccugugccgcaaacaagcuuaccaugggccagaucaucaccuucuuccaggaggucccccacgucaucgaggaggucaugaacaucguccucaucgcccucucccuccucgccauccucaagggcaucuacaacgucgccaccugcggccuccucggccucgucuccuuccuccuccucugcggccgcuccugcuccaccaccuacaagggcgucuacgagcuccagacccucgagcucgacauggccucccucaacaugaccaugccccucuccugcaccaagaacaacucccaccacuacaucauggucggcaacgagaccggccucgagcucacccucaccaacaccuccaucaucaaccacaaguucugcaaccucuccgacgcccacaagaagaaccucuacgaccacgcccucauguccaucaucuccaccuuccaccucuccauccccaacuucaaccaguacgaggccauguccugcgacuucaacggcggccgcaucuccguccaguacaaccucucccacuccuacgccgucgacgccgccaaccacugcggcaccaucgccaacggcguccuccagaccuucaugcgcauggccuggggcggcuccuacaucgcccucgacuccggcaagggcuccugggacugcaucaugaccuccuaccaguaccucaucauccagaacaccaccugggaggaccacugccaguucucccgccccucccccaucggcuaccucggccuccucucccagcgcacccgcgacaucuacaucucccgccgccuccucggcaccuucaccuggacccucuccgacuccgagggcaacgagacccccggcggcuacugccucacccgcuggaugcucaucgaggccgagcucaagugcuucggcaacaccgccgucgccaagugcaacgagaagcacgacgaggaguucugcgacaugcuccgccucuucgacuucaacaagcaggccauccgccgccucaagaccgaggcccagauguccauccagcucaucaacaaggccgucaacgcccucaucaacgaccagcucaucaugaagaaccaccuccgcgacaucaugggcauccccuacugcaacuacuccaaguacugguaccucaaccacaccgucaccggcaagaccucccucccccgcugcuggcucgucuccaacggcuccuaccucaacgagacccacuucuccgacgacaucgagcagcaggccgacaacaugaucaccgagcuccuccagaaggaguacaucgaccgccagggcaagaccccccucggccucgucgaccucuucgucuucuccaccuccuucuaccucaucuccaucuuccuccaccucgucaagauccccacccaccgccacaucaccggcaagcccugccccaagccccaccgccucaaccacaugggcaucugcuccugcggccucuacaaccaccccggcguccccgucaaguggaagcgcugaggacuagucccuguucccagagcccacuuuuuuuucuuuuuuugaaauaaaauagccugucuuucagaucuaaaaaaaaaaaaaaaaaaaaaaaaaaaaaaaaaaaaaaaaaaaaaaaaaaaaaaaaaaaaaaaaugcaucccccccccccccccccccccccccccccccaaaggcucuuuucagagccaccagaauu

SEQ ID NO: 2619 - RNA, 1768 nt, Artificial Sequence
  mRNA product Design a-2 comprising derived and/or modified sequence from LASV(Lassa virus/H.sapiens-wt/NGA/2016/ISTH_0017;Clade II)__AVO03567__GPC (opt2)
gggagaguccgcucagccagguugcagaagcggcuuagcguguguccuaaucuucucucugcguguagguaggccugugccgcaaacaagcuuaccaugggccagaucaucaccuucuuccaggaggucccccacgucaucgaggaggucaugaacaucguccucaucgcccucucccuccucgccauccucaagggcaucuacaacgucgccaccugcggccucuucggccucgucuccuuccuccuccucugcggccgcuccugcuccaccaccuacaagggcgucuacgagcuccagacccucgagcucgacauggccucccucaacaugaccaugccccucuccugcaccaagaacaacucccaccacuacaucauggucggcaacgagaccggccucgagcucacccucaccaacaccuccaucaucaaccacaaguucugcaaccucuccgacgcccacaagaagaaccucuacgaccacgcccucauguccaucaucuccaccuuccaccucuccauccccaacuucaaccaguacgaggccauguccugcgacuucaacggcggcaagaucuccguccaguacaaccucucccacaccuacgccaucgacgccgccaaccacugcggcaccaucgccaacggcguccuccagaccuucaugcgcauggccuggggcggcuccuacaucgcccucgacuccggcaagggcuccugggacugcaucaugaccuccuaccaguaccucaucauccagaacaccaccugggaggaccacugccaguucucccgccccucccccaucggcuaccucggccuccucucccagcgcacccgcgacaucuacaucucccgccgccuccucggcaccuucaccuggacccucuccgacuccgagggcaacgagacccccggcggcuacugccucacccgcuggaugcucaucgaggccgagcucaagugcuucggcaacaccgccgucgccaagugcaacgagaagcacgacgaggaguucugcgacaugcuccgccucuucgacuucaacaagcaggccauccgccgccucaagaccgaggcccagauguccauccagcucaucaacaaggccgucaacgcccucaucaacgaccagcucaucaugaagaaccaccuccgcgacaucaugggcauccccuacugcaacuacuccaaguacugguaccucaaccacaccgucaccggcaagaccucccucccccgcugcuggcucgucuccaacggcuccuaccucaacgagacccacuucuccgacgacaucgagcagcaggccgacaacaugaucaccgagcuccuccagaaggaguacauggaccgccagggcaagaccccccucggccucgucgaccucuucgucuucuccaccuccuucuaccucaucuccaucuuccuccaccucguccgcauccccacccaccgccacgucaucggcaagcccugccccaagccccaccgccucaaccacaugggcaucugcuccugcggccucuacaagcaccccggcguccccgucaaguggaagcgcugaggacuagucccuguucccagagcccacuuuuuuuucuuuuuuugaaauaaaauagccugucuuucagaucuaaaaaaaaaaaaaaaaaaaaaaaaaaaaaaaaaaaaaaaaaaaaaaaaaaaaaaaaaaaaaaaaugcaucccccccccccccccccccccccccccccccaaaggcucuuuucagagccaccagaauu

SEQ ID NO: 2620 - RNA, 1768 nt, Artificial Sequence
  mRNA product Design a-2 comprising derived and/or modified sequence from LASV(Lassa virus/H.sapiens-wt/NGA/2018/ISTH_0959;Clade II)__AVV65099__GPC (opt2)
gggagaguccgcucagccagguugcagaagcggcuuagcguguguccuaaucuucucucugcguguagguaggccugugccgcaaacaagcuuaccaugggccagaucaucaccuucuuccaggaggucccccacgucaucgaggaggucaugaacaucguccucaucgcccucucccuccucgccauccucaagggcaucuacaacgucgucaccugcggccucuucggccucgucuccuuccuccuccucugcggccgcuccugcuccaccaccuacaagggcgucuacgagcuccagacccucgagcucgacauggccucccucaacaugaccaugccccucuccugcaccaagaacaacucccaccacuacaucauggucggcaacgagaccggccucgagcucacccucaccaacaccuccaucaucaaccacaaguucugcaaccucuccgacgcccacaagaagaaccucuacgaccacgcccucauguccaucaucuccaccuuccaccucuccauccccaacuucaaccaguacgaggccauguccugcgacuucaacggcggcaagaucuccguccaguacaaccucucccacgccuacgccaucgacgccgccaaccacugcggcaccaucgccaacggcguccuccagaccuucaugcgcauggccuggggcggcuccuacaucgcccucgacuccggcaagggcuccugggacugcaucaugaccuccuaccaguaccucaucauccagaacaccaccugggaggaccacugccaguucucccgccccucccccaucggcuaccucggccuccucucccagcgcacccgcgacaucuacaucucccgccgccuccucggcaccuucaccuggacccucuccgacuccgagggcaacgagacccccggcggcuacugccucacccgcuggaugcucaucgaggccgagcucaagugcuucggcaacaccgccgucgccaagugcaacgagaagcacgacgaggaguucugcgacaugcuccgccucuucgacuucaacaagcaggccauccgccgccucaagaccgaggcccagauguccauccagcucaucaacaaggccgucaacgcccucaucaacgaccagcucaucaugaagaaccaccuccgcgacaucaugggcauccccuacugcaacuacuccaaguacugguaccucaaccacaccgucaccggcaagaccucccucccccgcugcuggcucgucuccaacggcuccuaccucaacgagacccacuucuccgacgacaucgagcagcaggccgacaacaugaucaccgagcuccuccagaaggaguacaucgaccgccagggcaagaccccccucggccucgucgaccucuucgucuucuccaccuccuucuaccucaucuccaucuuccuccaccucgucaagauccccacccaccgccacgucaucggcaagcccugccccaagccccaccgccucaaccacaugggcaucugcuccugcggccucuacaagcaccccggcguccccgucaaguggaagcgcugaggacuagucccuguucccagagcccacuuuuuuuucuuuuuuugaaauaaaauagccugucuuucagaucuaaaaaaaaaaaaaaaaaaaaaaaaaaaaaaaaaaaaaaaaaaaaaaaaaaaaaaaaaaaaaaaaugcaucccccccccccccccccccccccccccccccaaaggcucuuuucagagccaccagaauu

SEQ ID NO: 2621 - RNA, 1768 nt, Artificial Sequence
  mRNA product Design a-2 comprising derived and/or modified sequence from LASV(LASV003-NIG-2008;Clade II)__AIT17580__GPC (opt2)
gggagaguccgcucagccagguugcagaagcggcuuagcguguguccuaaucuucucucugcguguagguaggccugugccgcaaacaagcuuaccaugggccagaucaucaccuucuuccaggaggucccccacgucaucgaggaggucaugaacaucguccucaucgcccucucccuccucgccauccucaagggcaucuacaacgucgccaccugcggccucuucggccucgucuccuuccuccuccucugcggccgcuccugcuccaccaccuacaagggcgucuacgagcuccagacccucgagcucgacauggccucccucaacaugaccaugccccucuccugcaccaagaacaacucccaccacuacaucauggucggcaacgagaccggccucgagcucacccucaccaacaccuccaucaucaaccacaaguucugcaaccucuccgacgcccacaagaagaaccucuacgaccacgcccucauguccaucaucuccaccuuccaccucuccauccccaacuucaaccaguacgaggccauguccugcgacuucaacggcggcaagaucuccguccaguacaaccucucccacaccuacgccgucgacgccgccaaccacugcggcaccaucgccaacggcguccuccagaccuucaugcgcauggccuggggcggcuccuacaucgcccucgacuccggcaagggcuccugggacugcaucaugaccuccuaccaguaccucaucauccagaacaccaccugggaggaccacugccaguucucccgccccucccccaucggcuaccucggccuccucucccagcgcacccgcgacaucuacaucucccgccgccuccucggcaccuucaccuggacccucuccgacuccgaguccaacgagacccccggcggcuacugccucacccgcuggaugcucaucgaggccgagcucaagugcuucggcaacaccgccgucgccaagugcaacgagaagcacgacgaggaguucugcgacaugcuccgccucuucgacuucaacaagcaggccauccgccgccucaaggccgaggcccagauguccauccagcucaucaacaaggccgucaacgcccucaucaacgaccagcucaucaugaagaaccaccuccgcgacaucaugggcauccccuacugcaacuacuccaaguacugguaccucaaccacaccgucaccggccgcaccucccucccccgcugcuggcucgucuccaacggcuccuaccucaacgagacccacuucuccgacgacaucgagcagcaggccgacaacaugaucaccgagcuccuccagaaggaguacauggaccgccagggcaagaccccccucggccucgucgaccucuucgucuucuccaccuccuucuaccucaucuccaucuuccuccaccucgucaagauccccacccaccgccacgucaucggcaagcccugccccaagccccaccgccucaaccacaugggcaucugcuccugcggccucuacaagcaccccggcguccccgucaaguggaagcgcugaggacuagucccuguucccagagcccacuuuuuuuucuuuuuuugaaauaaaauagccugucuuucagaucuaaaaaaaaaaaaaaaaaaaaaaaaaaaaaaaaaaaaaaaaaaaaaaaaaaaaaaaaaaaaaaaaugcaucccccccccccccccccccccccccccccccaaaggcucuuuucagagccaccagaauu

SEQ ID NO: 2622 - RNA, 1768 nt, Artificial Sequence
  mRNA product Design a-2 comprising derived and/or modified sequence from LASV(LASV035-NIG-2009;Clade II)__AIT17588__GPC (opt2)
gggagaguccgcucagccagguugcagaagcggcuuagcguguguccuaaucuucucucugcguguagguaggccugugccgcaaacaagcuuaccaugggccagaucaucaccuucuuccaggaggucccccacgucaucgaggaggucaugaacaucguccucaucgcccucucccuccucgccauccucaagggcaucuacaacgucgccaccugcggccucuucggccucgucuccuuccuccuccucugcggccgcuccugcuccaccaccuacaagggcgucuacgagcuccagacccucgagcucgacauggccucccucaacaugaccaugccccucuccugcaccaagaacaacucccaccacuacaucauggucggcaacgagaccggccucgagcucacccucaccaacaccuccaucaucaaccacaaguucugcaaccucuccgacgcccacaagaagaaccucuacgaccacgcccucauguccaucaucuccaccuuccaccucuccauccccaacuucaaccaguacgaggccauguccugcgacuucaacggcggcaagaucuccguccaguacaaccucucccacgccuacgccgucgacgccgccaaccacugcggcaccaucgccaacggcguccuccagaccuucaugcgcauggccuggggcggcuccuacaucgcccucgacuccggcaagggcuccugggacugcaucaugaccuccuaccaguaccucaucauccagaacaccaccugggaggaccacugccaguucucccgccccucccccaucggcuaccucggccuccucucccagcgcacccgcgacaucuacaucucccgccgccuccucggcaccuucaccuggacccucuccgacuccgagggcaacgagacccccggcggcuacugccucacccgcuggaugcucaucgaggccgagcucaagugcuucggcaacaccgccgucgccaagugcaacgagaagcacgacgaggaguucugcgacaugcuccgccucuucgacuucaacaagcaggccauccgccgccucaaggccgaggcccagauguccauccagcucaucaacaaggccgucaacgcccucaucaacgaccagcucaucaugaagaaccaccuccgcgacaucaugggcauccccuacugcaacuacuccaaguacugguaccucaaccacaccgucaccggcaagaccucccucccccgcugcuggcucgucuccaacggcuccuaccucaacgagacccacuucuccgacgacaucgagcagcaggccgacaacaugaucaccgagcuccuccagaaggaguacaucgaccgccagggcaagaccccccucggccucgucgaccucuucgucuucuccaccuccuucuaccucaucuccaucuuccuccaccucgucaagauccccacccaccgccacgucaucggcaagcccugccccaagccccaccgccucaaccacaugggcaucugcuccugcggccucuacaagcaccccggcguccccgucaaguggaagcgcugaggacuagucccuguucccagagcccacuuuuuuuucuuuuuuugaaauaaaauagccugucuuucagaucuaaaaaaaaaaaaaaaaaaaaaaaaaaaaaaaaaaaaaaaaaaaaaaaaaaaaaaaaaaaaaaaaugcaucccccccccccccccccccccccccccccccaaaggcucuuuucagagccaccagaauu

SEQ ID NO: 2623 - RNA, 1768 nt, Artificial Sequence
  mRNA product Design a-2 comprising derived and/or modified sequence from LASV(LASV1000-NIG-2009;Clade II)__AIT17782__GPC (opt2)
gggagaguccgcucagccagguugcagaagcggcuuagcguguguccuaaucuucucucugcguguagguaggccugugccgcaaacaagcuuaccaugggccagaucaucaccuucuuccaggaggucccccacgucaucgaggaggucaugaacaucguccucaucgcccucucccuccucgccauccucaagggcaucuacaacgucgccaccugcggccucuucggccucgucuccuuccuccuccucugcggccgcuccugcuccaccaccuacaagggcgucuacgagcuccagacccucgagcucgacauggccucccucaacaugaccaugccccucuccugcaccaagaacaacucccaccacuacaucauggucggcaacgagaccggccucgagcucacccucaccaacaccuccaucaucaaccacaaguucugcaaccucuccgacgcccacaagaagaaccucuacgaccacgcccucauguccaucaucuccaccuuccaccucuccauccccaacuucaaccaguacgaggccauguccugcgacuucaacggcggcaagaucuccguccaguacaaccucucccacaccuacgccgucgacgccgccaaccacugcggcaccaucgccaacggcguccuccagaccuucaugcgcauggccuggggcggcuccuacaucgcccucgacuccggcaagggcuccugggacugcaucaugaccuccuaccaguaccucaucauccagaacaccaccugggaggaccacugccaguucucccgccccucccccaucggcuaccucggccuccucucccagcgcacccgcgacaucuacaucucccgccgccuccucggcaccuucaccuggacccucuccgacuccgagggcaacgagacccccggcggcuacugccucacccgcuggaugcucaucgaggccgagcucaagugcuucggcaacaccgccgucgccaagugcaacgagaagcacgacgaggaguucugcgacaugcuccgccucuucgacuucaacaagcaggccaucaagcgccucaagaccgaggcccagauguccauccagcucaucaacaaggccgucaacgcccucaucaacgaccagcucaucaugaagaaccaccuccgcgacaucaugggcauccccuacugcaacuacuccaaguacugguaccucaaccacaccgucaccggcaagaccucccucccccgcugcuggcucgucuccaacggcuccuaccucaacgagacccacuucuccgacgacaucgagcagcaggccgacaacaugaucaccgagcuccuccagaaggaguacaucgaccgccagggcaagaccccccucggccucgucgaccucuucgucuucuccaccuccuucuaccucaucuccaucuuccuccaccucgucaagauccccacccaccgccacgucgucggcaagcccugccccaagccccaccgccucaaccacaugggcaucugcuccugcggccucuacaagcaccccggcguccccgucaaguggaagcgcugaggacuagucccuguucccagagcccacuuuuuuuucuuuuuuugaaauaaaauagccugucuuucagaucuaaaaaaaaaaaaaaaaaaaaaaaaaaaaaaaaaaaaaaaaaaaaaaaaaaaaaaaaaaaaaaaaugcaucccccccccccccccccccccccccccccccaaaggcucuuuucagagccaccagaauu

SEQ ID NO: 2624 - RNA, 1768 nt, Artificial Sequence
  mRNA product Design a-2 comprising derived and/or modified sequence from LASV(LASV221-NIG-2010;Clade II)__AIT17624__GPC (opt2)
gggagaguccgcucagccagguugcagaagcggcuuagcguguguccuaaucuucucucugcguguagguaggccugugccgcaaacaagcuuaccaugggccagaucaucaccuucuuccaggaggucccccacgucaucgaggaggucaugaacaucguccucaucgcccucucccuccucgccauccucaagggcaucuacaacgucgccaccugcggccucuucggccucgucuccuuccuccuccucugcggccgcuccugcuccaccaccuacaagggcgucuacgagcuccagacccucgagcucgacauggccucccucaacaugaccaugccccucuccugcaccaagaacaacucccaccacuacaucauggucggcaacgagaccggccucgagcucacccucaccaacaccuccaucaucaaccacaaguucugcaaccucuccgacgcccacaagaagaaccucuacgaccacgcccucauguccaucaucuccaccuuccaccucuccauccccaacuucaaccaguacgaggccauguccugcgacuucaacggcggcaagaucuccguccaguacaaccucucccacaccuacgccaucgacgccgccaaccacugcggcaccaucgccaacggcguccuccagaccuucaugcgcauggccuggggcggcuccuacaucgcccucgacuccggcaagggcuccugggacugcaucaugaccuccuaccaguaccucaucauccagaacaccaccugggaggaccacugccaguucucccgccccucccccaucggcuaccucggccuccucucccagcgcacccgcgacaucuacaucucccgccgccuccucggcaccuucaccuggacccucuccgacuccgagggcaacgagacccccggcggcuacugccucacccgcuggaugcucaucgaggccgagcucaagugcuucggcaacaccgccgucgccaagugcaacgagaagcacgacgaggaguucugcgacaugcuccgccucuucgacuucaacaagcaggccauccgccgccucaagaccgaggcccagauguccauccagcucaucaacaaggccgucaacgcccucaucaacgaccagcucaucaugaagaaccaccuccgcgacaucaugggcauccccuacugcaacuacuccaaguacugguaccucaaccacaccgucaccggcaagaccucccucccccgcugcuggcucgucuccaacggcuccuaccucaacgagacccacuucuccgacgacaucgagcagcaggccgacaacaugaucaccgagaugcuccagaaggaguacauggaccgccagggcaagaccccccucggccucgucgaccucuucgucuucuccaccuccuucuaccucaucuccaucuuccuccaccucgucaagauccccacccaccgccacgucaucggcaagcccugccccaagccccaccgccucaaccacaugggcaucugcuccugcggccucuacaagcaccccggcguccccgucaaguggaagcgcugaggacuagucccuguucccagagcccacuuuuuuuucuuuuuuugaaauaaaauagccugucuuucagaucuaaaaaaaaaaaaaaaaaaaaaaaaaaaaaaaaaaaaaaaaaaaaaaaaaaaaaaaaaaaaaaaaugcaucccccccccccccccccccccccccccccccaaaggcucuuuucagagccaccagaauu

SEQ ID NO: 2625 - RNA, 1768 nt, Artificial Sequence
  mRNA product Design a-2 comprising derived and/or modified sequence from LASV(LASV237-NIG-2010;Clade II)__AIT17638__GPC (opt2)
gggagaguccgcucagccagguugcagaagcggcuuagcguguguccuaaucuucucucugcguguagguaggccugugccgcaaacaagcuuaccaugggccagaucaucaccuucuuccaggaggucccccacgucaucgaggaggucaugaacaucguccucaucgcccucucccuccucgccauccucaagggcaucuacaacgucgccaccugcggccucuucggccucgucuccuuccuccuccucugcggccgcuccugcuccaccaccuacaagggcgucuacgagcuccagacccucgagcucgacauggccucccucaacaugaccaugccccucuccugcaccaagaacaacucccaccacuacaucauggucggcaacgagaccggccucgagcucacccucaccaacaccuccaucaucaaccacaaguucugcaaccucuccgacgcccacaagaaggaccucuacgaccacgcccucauguccaucaucuccaccuuccaccucuccauccccaacuucaaccaguacgaggccauguccugcgacuucaacggcggcaagaucuccguccaguacaaccucucccacaccuacgccgucgacgccgccaaccacugcggcaccaucgccaacggcguccuccagaccuucaugcgcauggccuggggcggcuccuacaucgcccucgacuccggcaagggcuccugggacugcaucaugaccuccuaccaguaccucaucauccagaacaccaccugggaggaccacugccaguucucccgccccucccccaucggcuaccucggccuccucucccagcgcacccgcgacaucuacaucucccgccgccuccucggcaccuucaccuggacccucuccgacuccgagggcaacgagacccccggcggcuacugccucacccgcuggaugcucaucgaggccgagcucaagugcuucggcaacaccgccgucgccaagugcaacgagaagcacgacgaggaguucugcgacaugcuccgccucuucgacuucaacaagcaggccauccgccgccucaagaccgaggcccagauguccauccagcucaucaacaaggccgucaacgcccucaucaacgaccagcucaucaugaagaaccaccuccgcgacaucaugggcauccccuacugcaacuacuccaaguacugguaccucaaccacaccgucaccggcaagaccucccucccccgcugcuggcucgucuccaacggcuccuaccucaacgagacccacuucuccgacgacaucgagcagcaggccgacaacaugaucaccgagcuccuccagaaggaguacauggaccgccagggcaagaccccccucggccucgucgaccucuucgucuucuccaccuccuucuaccucaucuccaucuuccuccaccucaucaagauccccacccaccgccacaucaccggcaagcccugccccaagccccaccgccucaaccacaugggcaucugcuccugcggccucuacaagcaccccggcguccccgucaaguggaagcgcugaggacuagucccuguucccagagcccacuuuuuuuucuuuuuuugaaauaaaauagccugucuuucagaucuaaaaaaaaaaaaaaaaaaaaaaaaaaaaaaaaaaaaaaaaaaaaaaaaaaaaaaaaaaaaaaaaugcaucccccccccccccccccccccccccccccccaaaggcucuuuucagagccaccagaauu

SEQ ID NO: 2626 - RNA, 1768 nt, Artificial Sequence
  mRNA product Design a-2 comprising derived and/or modified sequence from LASV(LASV253-NIG-2011;Clade II)__AIT17670__GPC (opt2)
gggagaguccgcucagccagguugcagaagcggcuuagcguguguccuaaucuucucucugcguguagguaggccugugccgcaaacaagcuuaccaugggccagaucaucaccuucuuccaggaggucccccacgucaucgaggaggucaugaacaucguccucaucgcccucucccuccucgccauccucaagggcaucuacaacgucgccaccugcggccucuucggccucgucuccuuccuccuccucugcggccgcuccugcuccaccaccuacaagggcgucuacgagcuccagacccucgagcucgacauggccucccucaacaugaccaugccccucuccugcaccaagaacaacucccaccacuacaucauggucggcaacgagaccggccucgagcucacccucaccaacaccuccaucaucaaccacaaguucugcaaccucuccgacgcccacaagaagaaccucuacgaccacgcccucauguccaucaucuccaccuuccaccucuccauccccaacuucaaccaguacgaggccauguccugcgacuucaacggcggcaagaucuccguccaguacaaccucucccacaccuacgccgucgacgccgccaaccacugcggcaccaucgccaacggcguccuccagaccuucaugcgcauggccuggggcggcuccuacaucgcccucgacuccggcaagggcuccugggacugcaucaugaccuccuaccaguaccucaucauccagaacaccaccugggaggaccacugccaguucucccgccccucccccaucggcuaccucggccuccucucccagcgcacccgcgacaucuacaucucccgccgccuccucggcaccuucaccuggacccucuccgacuccgagggcaacgagacccccggcggcuacugccucacccgcuggaugcucaucgaggccgagcucaagugcuucggcaacaccgccgucgccaagugcaacgagaagcacgacgaggaguucugcgacaugcuccgccucuucgacuucaacaagcaggccauccgccgccucaaggccgaggcccagauguccauccagcucaucaacaaggccgucaacgcccucaucaacgaccagcucaucaugaagaaccaccuccgcgacaucaugggcauccccuacugcaacuacuccaaguacugguaccucaaccacaccgucaccggccgcaccucccucccccgcugcuggcucgucuccaacggcuccuaccucaacgagacccacuucuccgacgacaucgagcagcaggccgacaacaugaucaccgagcuccuccagaaggaguacaucgaccgccagggcaagaccccccucggccucgucgaccucuucgucuucuccaccuccuucuaccucaucuccaucuuccuccaccucgucaagauccccacccaccgccacaucaucggcaagcccugccccaagccccaccgccucaaccacaugggcaucugcuccugcggccucuacaagcaccccggcguccccgucaaguggaagcgcugaggacuagucccuguucccagagcccacuuuuuuuucuuuuuuugaaauaaaauagccugucuuucagaucuaaaaaaaaaaaaaaaaaaaaaaaaaaaaaaaaaaaaaaaaaaaaaaaaaaaaaaaaaaaaaaaaugcaucccccccccccccccccccccccccccccccaaaggcucuuuucagagccaccagaauu

SEQ ID NO: 2627 - RNA, 1768 nt, Artificial Sequence
  mRNA product Design a-2 comprising derived and/or modified sequence from LASV(LASV254-NIG-2011;Clade II)__AIT17674__GPC (opt2)
gggagaguccgcucagccagguugcagaagcggcuuagcguguguccuaaucuucucucugcguguagguaggccugugccgcaaacaagcuuaccaugggccagaucaucaccuucuuccaggaggucccccacgucaucgaggaggucaugaacaucguccucaucgcccucucccuccucgccauccucaagggcaucuacaacgucgccaccugcggccucuucggccucgucuccuuccuccuccucugcggccgcuccugcuccaccaccuacaagggcgucuacgagcuccagacccucgagcucgacaugaccaaccucaacaugaccaugccccucuccugcaccaagaacaacucccaccacuacaucauggucggcaacgagaccggccucgagcucacccucaccaacaccuccaucaucaaccacaaguucugcaaccucuccgacgcccacaagaagaaccucuacaaccacgcccucauguccaucaucuccaccuuccaccucuccauccccaacuucaaccaguacgaggccauguccugcgacuucaacggcggcaagaucuccguccaguacaaccucucccacuccuacgccgucgacgccgccaaccacugcggcaccaucgccaacggcguccuccagaccuucaugcgcauggccuggggcggcuccuacaucgcccucgacuccggcaagggcaacugggacugcaucaugaccuccuaccaguaccucaucauccagaacaccaccugggaggaccacugccaguucucccgccccucccccaucggcuaccucggccuccucucccagcgcacccgcgacaucuacaucucccgccgccuccucggcaccuucaccuggacccucuccgacuccgagggcaacgagacccccggcggcuacugccucacccgcuggaugcucaucgaggccgagcucaagugcuucggcaacaccgccgucgccaagugcaacgagaagcacgacgaggaguucugcgacaugcuccgccucuucgacuucaacaagcaggccauccgccgccucaagaccgaggcccaggccaacauccagcucaucaacaaggccgucaacgcccucaucaacgaccagcucaucaugaagaaccaccuccgcgacaucaugggcauccccuacugcaacuacuccaaguacugguaccucaaccacaccgucaccggcaagaccucccucccccgcugcuggcucgucuccaacggcuccuaccucaacgagacccacuucuccgacgacaucgagcagcaggccgacaacaugaucaccgagcuccuccagaaggaguacauggaccgccagggcaagaccccccucggccucgucgaccucuucgucuucuccaccuccuucuaccucaucuccaucuuccuccaccucgucaagauccccacccaccgccacgucaucggcaagcccugccccaagccccaccgccucaaccacaugggcaucugcuccugcggccucuacaagcaccccggcguccccgucaaguggaagcgcugaggacuagucccuguucccagagcccacuuuuuuuucuuuuuuugaaauaaaauagccugucuuucagaucuaaaaaaaaaaaaaaaaaaaaaaaaaaaaaaaaaaaaaaaaaaaaaaaaaaaaaaaaaaaaaaaaugcaucccccccccccccccccccccccccccccccaaaggcucuuuucagagccaccagaauu

SEQ ID NO: 2628 - RNA, 1768 nt, Artificial Sequence
  mRNA product Design a-2 comprising derived and/or modified sequence from LASV(Nig08-A19;Clade III)__ADU56618__GPC (opt2)
gggagaguccgcucagccagguugcagaagcggcuuagcguguguccuaaucuucucucugcguguagguaggccugugccgcaaacaagcuuaccaugggccagaucgucaccuucuuccaggaggucccccacgucaucgaggaggucaugaacaucguccucaucgcccucuccauccucgccauccucaagggccucuacaacaucgccaccugcggccucaucggccucgucaccuuccuccuccucuccggccgcuccugcuccaugaccuacaagggcgucuacgagcuccagacccucgagcucaacaugaacacccucaacaugaccaugccccucuccugcaccaagaacaacucccaccacuacaucauggucggcaacgagaccggccucgagcucacccucaccaacaccucccuccuccaccacaaguucugcaaccucuccgacgcccacaagaagaaccucuacgaccacacccucauguccaucaucuccaccuuccaccucuccauccccaacuucaaccaguacgaggccauguccugcgacuucaacggcggcaagaucaccguccaguacaaccucucccacuccuacgccaucgacgccgccaaccacugcggcaccgucgccaacggcguccuccagaccuucaugcgcauggccuggggcggcuccuacaucgcccucgacuccggccgcggcaagugggacugcaucaugaccuccuaccaguaccucaucauccagaacaccaccugggaggaccacugccaguucucccgccccucccccaucggcuaccucggccuccucucccagcgcacccgcgacaucuacaucucccgccgccuccucggcaccuucaccuggacccucuccgacuccgagggcaacgagacccccggcggcuacugccucacccgcuggaugcucaucgaggccgagcucaagugcuucggcaacaccgccgucgccaagugcaacgagaagcacgacgaggaguucugcgacaugcuccgccucuucgacuucaacaagcaggccauccgccgccucaaggccgaggcccagauguccauccagcucaucaacaaggccgucaacgcccucaucaacgaccagcucaucaugaagaaccaccuccgcgacaucaugggcauccccuacugcaacuacuccaaguacugguaccucaaccacaccuccaccggccgcaccucccucccccgcugcuggcucgucuccaacggcuccuaccucaacgagacccacuucuccgacgacaucgagcagcaggccgacaacaugaucaccgagaugcuccagaaggaguaccucgaccgccagggcaagaccccccucggccucgucgaccucuucgucuucuccaccuccuucuaccucaucuccaucuuccuccaccucgucaagauccccacccaccgccacaucgucggcaagcccugccccaagccccaccgccucaaccacaugggcaucugcuccugcggccucuacaagcagcccggcguccccguccgcuggaagcgcugaggacuagucccuguucccagagcccacuuuuuuuucuuuuuuugaaauaaaauagccugucuuucagaucuaaaaaaaaaaaaaaaaaaaaaaaaaaaaaaaaaaaaaaaaaaaaaaaaaaaaaaaaaaaaaaaaugcaucccccccccccccccccccccccccccccccaaaggcucuuuucagagccaccagaauu

SEQ ID NO: 2629 - RNA, 1771 nt, Artificial Sequence
  mRNA product Design a-2 comprising derived and/or modified sequence from LASV(G1180-SLE-2010;Clade IV)__AIT17168__GPC (opt2)
gggagaguccgcucagccagguugcagaagcggcuuagcguguguccuaaucuucucucugcguguagguaggccugugccgcaaacaagcuuaccaugggccagaucgucaccuucuuccaggaggucccccacgucaucgaggaggucaugaacaucguccucaucgcccucuccauccucgccguccucaagggccucuacaacuucgccaccugcggccucgucggccuccucaccuuccuccuccucugcggccgcuccugcaccgccucccgcuacaagggcgucuacgagcuccagacccucgagcucaacauggagacccucaacaugaccaugccccucuccugcaccaagaacaacucccaccacuacaucauggucggcaacgagaccggccucgagcucacccucaccaacaccuccaucaucaaccacaaguucugcaaccucuccgacgcccacaagaagaaccucuacgaccacgcccucauguccaucaucuccaccuuccaccucuccauccccaacuucaaccaguacgaggccauguccugcgacuucaacggcggcaagaucuccguccaguacaaccucucccacuccuacgccggcgacgccgccaaccacugcggcaccgucgccaacggcguccuccagaccuucaugcgcauggccuggggcggcuccuacaucgcccucgacuccggccacggcuccugggacugcaucaugaccuccuaccaguaccucaucauccagaacaccaccugggaggaccacugccaguucucccgccccucccccaucggcuaccucggccuccucucccagcgcacccgcgacaucuacaucucccgccgccuccucggcaccuucaccuggacccucuccgacuccgagggcaaggacacccccggcggcuacugccucacccgcuggaugcucaucgaggccgagcucaagugcuucggcaacaccgccgucgccaagugcaacgagaagcacgacgaggaguucugcgacaugcuccgccucuucgacuucaacaagcaggccauccagcgccucaaggccgaggcccagauguccauccagcucaucaacaaggccgucaacgcccucaucaacgaccagcucaucaugaagaaccaccuccgcgacaucaugggcauccccuacugcaacuacuccaaguacugguaccucaaccacaccaccaccggcaagaccucccuccccaagugcuggcucgucuccaacggcuccuaccucaacgagacccacuucuccgacgacaucgagcagcaggccgacaacaugaucaccgagaugcuccagaaggaguacauggagcgccagggcaagaccccccucggccucgucgaccucuucgucuucuccaccuccuucuaccucaucuccaucuuccuccaccucgucaagauccccacccaccgccacaucgucggcaaguccugccccaagccccaccgccucaaccacaugggcaucugcuccugcggccucuacaagcagcccggcguccccgucaaguggaagcgcugaggacuagucccuguucccagagcccacuuuuuuuucuuuuuuugaaauaaaauagccugucuuucagaucuaaaaaaaaaaaaaaaaaaaaaaaaaaaaaaaaaaaaaaaaaaaaaaaaaaaaaaaaaaaaaaaaugcaucccccccccccccccccccccccccccccccaaaggcucuuuucagagccaccagaauu

SEQ ID NO: 2630 - RNA, 1771 nt, Artificial Sequence
  mRNA product Design a-2 comprising derived and/or modified sequence from LASV(G1442-SLE-2011;Clade IV)__AIT17180__GPC (opt2)
gggagaguccgcucagccagguugcagaagcggcuuagcguguguccuaaucuucucucugcguguagguaggccugugccgcaaacaagcuuaccaugggccagaucgucaccuucuuccaggaggucccccacgucaucgaggaggucaugaacaucguccucaucgcccucuccauccucgccguccucaagggccucuacaacgucgccaccugcggccucaucggccucgucaccuuccuccuccucugcggccgcuccugcaccaccacccucuacaagggcgucuacgagcuccagacccucgagcucaacauggagacccucaacaugaccaugccccucuccugcaccaagaacaacucccaccacuacauccgcgucggcaacgagaccggccucgagcucacccucaccaacaccuccaucaucaaccacaaguucugcaaccucuccgacgcccacaagaagaaccucuacgaccacgcccucauguccaucaucuccaccuuccaccucuccauccccaacuucaaccaguacgaggccauguccugcgacuucaacggcggcaagaucuccguccaguacaaccucucccacuccuacgccggcgacgccgccaaccacugcggcaccgucgccaacggcguccuccagaccuucaugcgcauggccuggggcggcuccuacaucgcccucgacuccggccgcggcaacugggacugcaucaugaccuccuaccaguaccucaucauccagaacaccaccugggacgaccacugccaguucucccgccccucccccaucggcuaccucggccuccucucccagcgcacccgcgacgucuacaucucccgccgccuccucggcaccuucaccuggacccucuccgacuccgagggcaaggacacccccggcggcuacugccucacccgcuggaugcucaucgaggccgagcucaagugcuucggcaacaccgccgucgccaagugcaacgagaagcacgacgaggaguucugcgacaugcuccgccucuucgacuucaacaagcaggccauccagcgccucaaggccgaggcccagauguccauccagcucaucaacaaggccgucaacgcccucaucaacgaccagcucaucaugaagaaccaccuccgcgacaucaugggcauccccuacugcaacuacuccaaguacugguaccucaacaacaccgccaccggcaagaccucccuccccaagugcuggcucaucuccaacggcuccuaccucaacgagacccacuucuccgacgacaucgagcaggaggccgacaacaugaucaccgagaugcuccagaaggaguacauggagcgccagggcaagaccccccucggccucgucgaccucuucgucuucuccaccuccuucuaccucaucuccaucuuccuccaccucgucaagauccccacccaccgccacaucgucggcaaguccugccccaagccccaccgccucaaccacaugggcaucugcuccugcggccucuacaagcagcccggcguccccguccgcuggaagcgcugaggacuagucccuguucccagagcccacuuuuuuuucuuuuuuugaaauaaaauagccugucuuucagaucuaaaaaaaaaaaaaaaaaaaaaaaaaaaaaaaaaaaaaaaaaaaaaaaaaaaaaaaaaaaaaaaaugcaucccccccccccccccccccccccccccccccaaaggcucuuuucagagccaccagaauu

SEQ ID NO: 2631 - RNA, 1771 nt, Artificial Sequence
  mRNA product Design a-2 comprising derived and/or modified sequence from LASV(G3010-SLE-2013;Clade IV)__AIT17344__GPC (opt2)
gggagaguccgcucagccagguugcagaagcggcuuagcguguguccuaaucuucucucugcguguagguaggccugugccgcaaacaagcuuaccaugggccagaucgucaccuucuuccaggaggucccccacgucaucgaggaggucaugaacaucguccucaucgcccucuccauccucgccguccucaagggccucuacaacuucgccaccugcggccucgucggccucgucaccuuccuccuccucugcggccgcuccugcaccaccucccucuacaagggcgucuacgagcuccagacccucgagcucaacauggagacccucaacaugaccaugccccucuccugcaccaagaacaacucccaccacuacaucauggucggcaacgagaccggccucgagcucacccucaccaacaccuccaucaucaaccacaaguucugcaaccucuccgacgcccacaagaagaaccucuacaaccacgcccucauguccaucaucuccaccuuccaccucuccauccccaacuucaaccaguacgaggccauguccugcgacuucaacggcggcaagaucuccguccaguacaaccucucccacuccuacgccggcgacgccgccucccacugcggcaccgucgccaacggcguccuccagaccuucaugcgcauggccuggggcggcuccuacaucgcccucgacuccggcuacggcaagugggacugcaucaugaccuccuaccaguaccucaucauccagaacaccaccugggaggaccacugccaguucucccgccccucccccaucggcuaccucggccuccucucccagcgcacccgcgacaucuacaucucccgccgccuccucggcaccuucaccuggacccucuccgacuccgagggcaaggacacccccggcggcuacugccucacccgcuggaugcucaucgaggccgagcucaagugcuucggcaacaccgccgucgccaagugcaacgagaagcacgacgaggaguucugcgacaugcuccgccucuucgacuucaacaagcaggccauccagcgccucaagaccgaggcccagauguccauccagcucaucaacaaggccgucaacgcccucaucaacgaccagcucaucaugaagaaccaccuccgcgacaucaugggcauccccuacugcaacuacuccaaguacugguaccucaaccacaccaccaccggcaagaccucccuccccaagugcuggcucgucuccaacggcuccuaccucaacgagacccacuucuccgacgacaucgagcagcaggccgacaacaugaucaccgagaugcuccagaaggaguacauggagcgccagggcaagaccccccucggccucgucgaccucuucgucuucuccaccuccuucuaccucaucuccaucuuccuccaccucgucaagauccccacccaccgccacaucgucggcaaguccugccccaagccccaccgccucaaccacaugggcaucugcuccugcggccucuacaagcagcccggcguccccguccgcuggaagcgcugaggacuagucccuguucccagagcccacuuuuuuuucuuuuuuugaaauaaaauagccugucuuucagaucuaaaaaaaaaaaaaaaaaaaaaaaaaaaaaaaaaaaaaaaaaaaaaaaaaaaaaaaaaaaaaaaaugcaucccccccccccccccccccccccccccccccaaaggcucuuuucagagccaccagaauu

SEQ ID NO: 2632 - RNA, 1771 nt, Artificial Sequence
  mRNA product Design a-2 comprising derived and/or modified sequence from LASV(G502-SLE-2009;Clade IV)__AIT17126__GPC (opt2)
gggagaguccgcucagccagguugcagaagcggcuuagcguguguccuaaucuucucucugcguguagguaggccugugccgcaaacaagcuuaccaugggccagaucgucaccuucuuccaggaggucccccacgucaucgaggaggucaugaacaucguccucaucgcccucuccauccucgccguccucaagggccucuacaacuucgccaccugcggccucgucggccuccucaccuuccuccuccucugcggccgcuccugcaccaccggccucuacaagggcgucuacgagcuccagacccucgagcucaacauggagacccucaacaugaccaugccccucuccugcaccaagaacaacucccaccacuacaucauggucggcaacgagaccggccucgagcucacccucaccaacaccuccaucaucaaccacaaguucugcaaccucuccgacgcccacaagaagaaccucuacgaccacgcccucauguccaucaucuccaccuuccaccucuccauccccaacuucaaccaguacgaggccauguccugcgacuucaacggcggcaagaucuccguccaguacaaccucucccacuccuacgccggcgacgccgccgaccacugcggcaccgucgccaacggcguccuccagaccuucaugcgcauggccuggggcggcuccuacaucgcccucgacuccggccgcggccgcugggacugcaucaugaccuccuaccaguaccucaucauccagaacaccaccugggaggaccacugccaguucucccgccccucccccaucggcuaccucggccuccucucccagcgcacccgcgacaucuacaucucccgccgccuccucggcaccuucaccuggacccucuccgacuccgagggcaaggacacccccggcggcuacugccucacccgcuggaugcucaucgaggccgagcucaagugcuucggcaacaccgccgucgccaagugcaacgagaagcacgacgaggaguucugcgacaugcuccgccucuucgacuucaacaagcaggccauccagcgccucaaggccgaggcccagauguccauccagcucaucaacaaggccgucaacgcccucaucaacgaccagcucgucaugaagaaccaccuccgcgacaucaugggcauccccuacugcaacuacucccgcuacugguaccucaaccacaccaccaccggccgcaccucccuccccaagugcuggcucgucuccaacggcuccuaccucaacgagacccacuucuccgacgacaucgagcagcaggccgacaacaugaucaccgagaugcuccagaaggaguacauggagcgccagggcaagaccccccucggccucgucgaccucuucgucuucuccaccuccuucuaccucaucuccaucuuccuccaccucgucaagauccccacccaccgccacaucgucggcaaguccugccccaagccccaccgccucaaccacaugggcaucugcuccugcggccucuacaagcagcccggcguccccgucaaguggaagcgcugaggacuagucccuguucccagagcccacuuuuuuuucuuuuuuugaaauaaaauagccugucuuucagaucuaaaaaaaaaaaaaaaaaaaaaaaaaaaaaaaaaaaaaaaaaaaaaaaaaaaaaaaaaaaaaaaaugcaucccccccccccccccccccccccccccccccaaaggcucuuuucagagccaccagaauu

SEQ ID NO: 2633 - RNA, 1771 nt, Artificial Sequence
  mRNA product Design a-2 comprising derived and/or modified sequence from LASV(G733-SLE-2010;Clade IV)__AIT17154__GPC (opt2)
gggagaguccgcucagccagguugcagaagcggcuuagcguguguccuaaucuucucucugcguguagguaggccugugccgcaaacaagcuuaccaugggccagaucgucaccuucuuccaggaggucccccacgucaucgaggaggucaugaacaucguccucaucgcccucuccauccucgccguccucaagggccucuacaacuucgccaccugcggcaucgucggccucgucuccuuccuccuccucugcggccgcuccugcaccaccucccucuacaagggcgucuacgagcuccagacccucgagcucaacauggagacccucaacaugaccaugccccucuccugcaccaagaacaacucccaccacuacaucauggucggcaacgagaccggccucgagcucacccucaccaacaccuccaucaucaaccacaaguucugcaaccucuccgacgcccacaagaagaaccucuacgaccacgcccucauguccaucaucuccaccuuccaccucuccauccccaacuucaaccaguacgaggccauguccugcgacuucaacggcggcaagaucuccguccaguacaaccucucccacuccuacgccggcgacgccgccaaccacugcggcaccaucgccaacggcguccuccagaccuucaugcgcauggccuggggcggcuccuacaucgcccucgacuccggccgcgaccgcugggacugcaucaugaccuccuaccaguaccucaucauccagaacaccaccugggaggaccacugccaguucucccgccccucccccaucggcuaccucggccuccucucccagcgcacccgcgacaucuacaucucccgccgccuccucggcaccuucaccuggacccucuccgacuccgagggcaaggacacccccggcggcuacugccucacccgcuggaugcucaucgaggccgagcucaagugcuucggcaacaccgccgucgccaagugcaacgagaagcacgacgaggaguucugcgacaugcuccgccucuucgacuucaacaagcaggccauccagcgccucaaggccgaggcccagauguccauccagcucaucaacaaggccgucaacgcccucaucaacgaccagcucaucaugaagaaccaccuccgcgacaucaugggcauccccuacugcaacuacuccaaguacugguaccucaaccacaccaccaccggcaagaccucccuccccaagugcuggcucgucuccaacggcuccuaccucaacgagacccacuucuccgacgacaucgagcagcaggccgacaacaugaucaccgagaugcuccagaaggaguacauggagcgccagggcaagaccccccucggccucgucgaccucuucgucuucuccaccuccuucuaccucaucuccaucuuccuccaccucgucaagauccccacccaccgccacgucgucggcaaguccugccccaagccccaccgccucaaccacaugggcaucugcuccugcggccucuacggccagcccggcguccccgucaaguggaagcgcugaggacuagucccuguucccagagcccacuuuuuuuucuuuuuuugaaauaaaauagccugucuuucagaucuaaaaaaaaaaaaaaaaaaaaaaaaaaaaaaaaaaaaaaaaaaaaaaaaaaaaaaaaaaaaaaaaugcaucccccccccccccccccccccccccccccccaaaggcucuuuucagagccaccagaauu

SEQ ID NO: 2634 - RNA, 1771 nt, Artificial Sequence
  mRNA product Design a-2 comprising derived and/or modified sequence from MOPV/LASV reassortant(IGS-1;Clade IV)__AFY05576__GPC (opt2)
gggagaguccgcucagccagguugcagaagcggcuuagcguguguccuaaucuucucucugcguguagguaggccugugccgcaaacaagcuuaccaugggccagaucgucaccuucuuccaggaggucccccacgucaucgaggaggucaugaacaucguccucaucgcccucuccguccucgccguccucaagggccucuacaacuucgccaccugcggccucgucggccucgucaccuuccuccuccucugcggccgcuccugcaccaccucccucuacaagggcgucuacgagcuccagacccucgagcucaacauggagacccucaacaugaccaugccccucuccugcaccaagaacaacucccaccacuacaucauggucggcaacgagaccggccucgagcucacccucaccaacaccuccaucaucaaccacaaguucugcaaccucuccgacgcccacaagaagaaccucuacgaccacgcccucauguccaucaucuccaccuuccaccucuccauccccaacuucaaccaguacgaggccauguccugcgacuucaacggcggcaagaucuccguccaguacaaccucucccacuccuacgccggcgacgccgccaaccacugcggcaccgucgccaacggcguccuccagaccuucaugcgcauggccuggggcggcuccuacaucgcccucgacuccggccgcggcaacugggacugcaucaugaccuccuaccaguaccucaucauccagaacaccaccugggaggaccacugccaguucucccgccccucccccaucggcuaccucggccuccucucccagcgcacccgcgacaucuacaucucccgccgccuccucggcaccuucaccuggacccucuccgacuccgagggcgaggacacccccggcggcuacugccucacccgcuggaugcucaucgaggccgagcucaagugcuucggcaacaccgccgucgccaagugcaacgagaagcacgacgaggaguucugcgacaugcuccgccucuucgacuucaacaagcaggccauccagcgccucaaggccgaggcccagauguccauccagcucaucaacaaggccgucaacgcccucaucaacgaccagcucaucaugaagaaccaccuccgcgacaucaugggcauccccuacugcaacuacuccaaguacugguaccucaaccacaccaccaccggccgcaccucccuccccaagugcuggcucgucuccaacggcuccuaccucaacgagacccacuucuccgacgacaucgagcagcaggccgacaacaugaucaccgagaugcuccagaaggaguacauggagcgccagggcaagaccccccucggccucgucgaccucuucgucuucuccaccuccuucuaccucaucuccaucuuccuccaccucgucaagauccccacccaccgccacaucgucggcaaguccugccccaagccccaccgccucaaccacaugggcaucugcuccugcggccucuacaagcagcccggcguccccgucaaguggaagcgcugaggacuagucccuguucccagagcccacuuuuuuuucuuuuuuugaaauaaaauagccugucuuucagaucuaaaaaaaaaaaaaaaaaaaaaaaaaaaaaaaaaaaaaaaaaaaaaaaaaaaaaaaaaaaaaaaaugcaucccccccccccccccccccccccccccccccaaaggcucuuuucagagccaccagaauu

SEQ ID NO: 2635 - RNA, 1771 nt, Artificial Sequence
  mRNA product Design a-2 comprising derived and/or modified sequence from LASV(LM765-SLE-2012;Clade IV)__AIT17814__GPC (opt2)
gggagaguccgcucagccagguugcagaagcggcuuagcguguguccuaaucuucucucugcguguagguaggccugugccgcaaacaagcuuaccaugggccagaucgucaccuucuuccaggaggucccccacgucaucgaggaggucaugaacaucguccucaucgcccucuccauccucgccguccucaagggccucuacaacuucgccaccugcggccucgucggccucgucaccuuccuccuccucugcggccgcuccugcaccaccucccucuacaagggcgucuacgagcuccagacccucgagcucaacauggagacccucaacaugaccaugccccucuccugcaccaagaacaacucccaccacuacaucauggucggcaacgagaccggccucgagcucacccucaccaacaccuccaucaucgaccacaaguucugcaaccucuccgacgcccaccgcaagaaccucuacgaccacgcccucauguccaucaucuccaccuuccaccucuccauccccaacuucaaccaguacgaggccauguccugcgacuucaacggcggcaagaucuccguccaguacaaccucucccacuccuacgccaaggacgccgccgaccacugcggcaccgucgccaacggcguccuccagaccuucaugcgcauggccuggggcggcuccuacaucgcccucgacuccggccgcggccgcugggacugcaucaugaccuccuaccaguaccucaucauccagaacaccaccugggaggaccacugccaguucucccgccccucccccaucggcuaccucggccuccucucccagcgcacccgcgacaucuacaucucccgccgccuccucggcaccuucaccuggacccucuccgacuccgagggcaaggacacccccggcggcuacugccucacccgcuggaugcucaucgaggccgagcucaagugcuucggcaacaccgccgucgccaagugcaacgagaagcacgacgaggaguucugcgacaugcuccgccucuucgacuucaacaagcaggccauccagcgccucaaggccgaggcccagauguccauccagcucaucaacaaggccgucaacgcccucaucaacgaccagcucaucaugaagaaccaccuccgcgacaucaugggcauccccuacugcaacuacuccaaguacugguaccucaaccacaccaccaccggcaagaccucccuccccaagugcuggcucgucuccaacggcuccuaccucaacgagacccacuucuccgacgacaucgagcagcaggccgacaacaugaucaccgagaugcuccagaaggaguacauggagcgccagggcaagaccccccucggccucgucgaccucuucgucuucuccaccuccuucuaccucaucuccaucuuccuccaccucgucaagauccccacccaccgccacaucgucggcaagcccugccccaagccccaccgccucaaccacaugggcaucugcuccugcggccucuacaagcagcccggcguccccgucaaguggaagcgcugaggacuagucccuguucccagagcccacuuuuuuuucuuuuuuugaaauaaaauagccugucuuucagaucuaaaaaaaaaaaaaaaaaaaaaaaaaaaaaaaaaaaaaaaaaaaaaaaaaaaaaaaaaaaaaaaaugcaucccccccccccccccccccccccccccccccaaaggcucuuuucagagccaccagaauu

SEQ ID NO: 2636 - RNA, 1771 nt, Artificial Sequence
  mRNA product Design a-2 comprising derived and/or modified sequence from LASV(LM776-SLE-2012;Clade IV)__AIT17824__GPC (opt2)
gggagaguccgcucagccagguugcagaagcggcuuagcguguguccuaaucuucucucugcguguagguaggccugugccgcaaacaagcuuaccaugggccagaucgucaccuucuuccaggaggucccccacgucaucgaggaggucaugaacaucguccucaucgcccucuccauccucgccguccucaagggccucuacaacuucgccaccugcggccucgucggccucgucaccuuccuccuccucugcggccgcuccugcaccaccuccgucuacaagggcgucuacgagcuccagacccucgagcucaacauggagacccucaacaugaccaugccccucuccugcaccaagaacaacucccaccacuacaucauggucggcaacgagaccggccucgagcucacccucaccaacaccuccaucaucaaccacaaguucugcaaccucuccgacgcccacaagaagaaccucuacgaccacgcccucauguccaucaucuccaccuuccaccucuccauccccaacuucaaccaguacgaggccauguccugcgacuucaacggcggcaagaucuccguccaguacaaccucucccacuccuacgccggcgacgccgccaaccacugcggcaccgucgccaacggcguccuccagaccuucaugcgcauggccuggggcggcuccuacaucgcccucgacuccggccacggcaagugggacugcaucaugaccuccuaccaguaccucaucauccagaacaccaccugggaggaccacugccaguucucccgccccucccccaucggcuaccucggccuccucucccagcgcacccgcgacaucuacaucucccgccgccuccucggcaccuucaccuggacccucuccgacuccgagggcaaggacacccccggcggcuacugccucacccgcuggaugcucaucgaggccgagcucaagugcuucggcaacaccgccgucgccaagugcaacgagaagcacgacgaggaguucugcgacaugcuccgccucuucgacuucaacaagcaggccauccagcgccucaaggccgaggcccagauguccauccagcucaucaacaaggccgucaacgcccucaucaacgaccagcucaucaugaagaaccaccuccgcgacaucaugggcauccccuacugcaacuacuccaaguacugguaccucaaccacaccaccaccggcaagaccucccuccccaagugcuggcucgucuccaacggcuccuaccucaacgagacccacuucuccgacgacaucgagcagcaggccgacaacaugaucaccgagaugcuccagaaggaguacauggagcgccagggcaagaccccccucggccucgucgaccucuucgucuucuccaccuccuucuaccucaucuccaucuuccuccaccucgucaagauccccacccaccgccacaucgucggcaaguccugccccaagccccaccgccucaaccacaugggcaucugcuccugcggccucuacaagcagcccggcguccccguccgcuggaagcgcugaggacuagucccuguucccagagcccacuuuuuuuucuuuuuuugaaauaaaauagccugucuuucagaucuaaaaaaaaaaaaaaaaaaaaaaaaaaaaaaaaaaaaaaaaaaaaaaaaaaaaaaaaaaaaaaaaugcaucccccccccccccccccccccccccccccccaaaggcucuuuucagagccaccagaauu

SEQ ID NO: 2637 - RNA, 1771 nt, Artificial Sequence
  mRNA product Design a-2 comprising derived and/or modified sequence from LASV(Mad39;Clade IV)__ANH09722__GPC (opt2)
gggagaguccgcucagccagguugcagaagcggcuuagcguguguccuaaucuucucucugcguguagguaggccugugccgcaaacaagcuuaccaugggccagaucgucaccuucuuccaggaggucccccacgucaucgaggaggucaugaacaucguccucaucgcccucuccauccucgccguccucaagggccucuacaacgucgccaccugcggccucaucggccucgucaccuuccuccuccucugcggccgcuccugcaccaccacccucuacaagggcgucuacgagcuccaggcccucgagcucaacauggagacccucaacaugaccaugccccucuccugcaccaagaacaacucccaccacuacauccgcgucggcaacgagaccggccucgagcucacccucaccaacaccucccucaucaaccacaaguucugcaaccucuccgacgcccacaagaagaaccucuacgaccacgcccucauguccaucaucuccaccuuccaccucuccauccccaacuucaaccaguacgaggccauguccugcgacuucaacgacggcaagaucuccguccaguacaaccucucccacaccuacgccggcgacaccgccaaccacugcggcaccgucgccaacggcguccuccagaccuucaugcgcauggccuggggcggcuccuacaucgcccucgacuccggccgcggcggcugggacugcaucaugaccuccuaccaguaccucaucauccagaacaccaccugggaggaccacugccaguucucccgccccucccccaucggcuaccucggccuccucucccagcgcacccgcgacaucuacaucucccgccgccuccucggcaccuucaccuggacccucuccgacuccgagggcaaggacacccccggcggcuacugccucacccgcuggaugcucaucgaggccgagcucaagugcuucggcaacaccgccgucgccaagugcaacgagaagcacgacgaggaguucugcgacaugcuccgccucuucgacuucaacaagcaggccauccagcgccucaaggccgaggcccagauguccauccagcucaucaacaaggccgucaacgcccucaucaacgaccagcucaucaugaagaaccaccuccgcgacaucaugggcauccccuacugcaacuacuccaaguacugguaccucaaccacaccgucaccggcaagaccucccuccccaagugcuggcucgucuccaacggcuccuaccucaacgagacccacuucuccgacgacaucgagcagcaggccgacaacaugaucaccgagaugcuccagaaggaguacauggagcgccagggcaagaccccccucggccucgucgaccucuucgucuucuccaccuccuucuaccucaucuccaucuuccuccaccucgucaagauccccacccaccgccacgucgucggcaagcccugccccaagccccaccgccucaaccacaugggcaucugcuccugcggcuucuacaagcagcccggcguccccguccgcuggaagcgcugaggacuagucccuguucccagagcccacuuuuuuuucuuuuuuugaaauaaaauagccugucuuucagaucuaaaaaaaaaaaaaaaaaaaaaaaaaaaaaaaaaaaaaaaaaaaaaaaaaaaaaaaaaaaaaaaaugcaucccccccccccccccccccccccccccccccaaaggcucuuuucagagccaccagaauu

SEQ ID NO: 2638 - RNA, 1771 nt, Artificial Sequence
  mRNA product Design a-2 comprising derived and/or modified sequence from LASV(Z0947-SLE-2011;Clade IV)__AIT17840__GPC (opt2)
gggagaguccgcucagccagguugcagaagcggcuuagcguguguccuaaucuucucucugcguguagguaggccugugccgcaaacaagcuuaccaugggccagaucgucaccuucuuccaggaggucccccacgucaucgaggaggucaugaacaucguccucaucgcccucuccauccucgccguccucaagggccucuacaacuucgccaccugcggccucgucggccucgucaccuuccuccuccucugcggccgcuccugcaccaucucccucuacaagggcgucuacgagcuccagacccucgagcucaacauggagacccucaacaugaccaugccccucuccugcaccaagaacaacucccaccacuacaucauggucggcaacgagaccggccucgagcucacccucaccaacaccuccaucaucaaccacaaguucugcaaccucuccgacgcccacaagaagaaccucuacgaccacgcccucauguccaucaucuccaccuuccaccucuccauccccaacuucaaccaguacgaggccauguccugcgacuucaacggcggcaagaucuccguccaguacaaccucucccacuccuacgccggcgacgccgccaaccacugcggcaccgucgccaacggcguccuccagaccuucaugcgcauggccuggggcggcuccuacaucgcccucgacuccggccgcgaccgcugggacugcaucaugaccuccuaccaguaccucaucauccagaacaccaccugggaggaccacugccaguucucccgccccucccccaucggcuaccucggccuccucucccagcgcacccgcgacaucuacaucucccgccgccuccucggcaccuucaccuggacccucuccgacuccgagggcaaggacacccccggcggcuacugccucacccgcuggaugcucaucgaggccgagcucaagugcuucggcaacaccgccgucgccaagugcaacgagaagcacgacgaggaguucugcgacaugcuccgccucuucgacuucaacaagcaggccauccagcgccucaaggccgaggcccagauguccauccagcucaucaacaaggccgucaacgcccucaucaacgaccagcucaucaugaagaaccaccuccgcgacaucaugggcauccccuacugcaacuacuccaaguacugguaccucaaccacaccaccaccggcaagaccucccuccccaagugcuggcucgucuccaacggcuccuaccucaacgagacccacuucuccgacgacaucgagcagcaggccgacaacaugaucaccgagaugcuccagaaggaguacauggagcgccagggcaagaccccccucggccucgucgaccucuucgucuucuccaccuccuucuaccucaucuccaucuuccuccaccucgucaagauccccacccaccgccacaucgucggcaagcccugccccaagccccaccgccucaaccacaugggcaucugcuccugcggccucuacaagcagcccggcguccccgucaaguggaagcgcugaggacuagucccuguucccagagcccacuuuuuuuucuuuuuuugaaauaaaauagccugucuuucagaucuaaaaaaaaaaaaaaaaaaaaaaaaaaaaaaaaaaaaaaaaaaaaaaaaaaaaaaaaaaaaaaaaugcaucccccccccccccccccccccccccccccccaaaggcucuuuucagagccaccagaauu

SEQ ID NO: 2639 - RNA, 1771 nt, Artificial Sequence
  mRNA product Design a-2 comprising derived and/or modified sequence from LASV(Josiah;Clade IV)__NP_694870__GPC (opt3)
gggagaguccgcucagccagguugcagaagcggcuuagcguguguccuaaucuucucucugcguguagguaggccugugccgcaaacaagcuuaccaugggccagaucgugaccuucuuucaagaggucccccacguuauugaagaggugaugaacauaguacugaucgcccucagcgugcuugcuguccugaagggguuguacaauuucgcaacaugcggauuagugggucugguuacuuuucuacuccuguguggcagauccugcacgaccucucuuuauaaagggguguacgaacugcagacauuggagcucaacauggaaacucugaauaugaccaugccucugucauguacaaagaacaauagucaucacuauauuauggucggaaacgagaccggccucgaguuaacucugacaaauaccagcaucauuaaccauaaauucugcaaucuuuccgacgcccacaagaaaaacuuguacgaucaugcgcugaugucuaucauaucgacguuucaccuaucaaucccaaauuucaaccaguaugaagcuaugagcugugacuuuaauggugggaagauuagugugcaguacaaccucucccacucuuaugccggagaugcagccaaucauugcggcacuguagcuaacggcguucugcaaaccuucaugaggauggcauggggagggagcuacaucgcccuugacuccggucggggcaacugggauuguauuaugacaucauaccaguaucugaucauacagaauacuaccugggaggaccacugccaguuuagucgcccgagccccauuggguacuugggacuccugucucaacgaacacgugauaucuauauuuccagaagguuacugggcaccuucacguggacucucucagacagcgaagguaaggauacaccugggggauacugucuuacccgguggaugcugaucgaggcugaguugaaaugcuuuggcaacacugccguggcgaaguguaaugaaaaacaugacgaggaguucugcgauaugcuacgccuguuugacuucaacaagcaggcaauccagagacucaaagccgaagcucagaugaguauucaacugauaaauaaggccgucaacgcacuuaucaaugaucagcugauuaugaagaaccacuugagggacaucaugggcauaccauauugcaauuacucuaaauauugguaccucaaccacacaaccacggggcggaccucccugcccaaguguugguuagugagcaauggaucguaccugaacgaaacacauuucucugacgauauugagcagcaagcugacaauaugaucacugagaugcuacagaaagaauauauggagcgccaggguaagaccccucucggccugguggaucuuuuugucuucuccacaucauuuuacuugaucaguauuuuccugcaccucguuaaaaucccaacucaucgacacauugugggaaagagcugccccaaaccucauagacugaaccacauggggauauguuccugcggccuuuauaagcagccagguguaccggugaaguggaaaaggugaggacuagucccuguucccagagcccacuuuuuuuucuuuuuuugaaauaaaauagccugucuuucagaucuaaaaaaaaaaaaaaaaaaaaaaaaaaaaaaaaaaaaaaaaaaaaaaaaaaaaaaaaaaaaaaaaugcaucccccccccccccccccccccccccccccccaaaggcucuuuucagagccaccagaauu

SEQ ID NO: 2640 - RNA, 1768 nt, Artificial Sequence
  mRNA product Design a-2 comprising derived and/or modified sequence from LASV(LP;Clade I)__AAF86701__GPC (opt3)
gggagaguccgcucagccagguugcagaagcggcuuagcguguguccuaaucuucucucugcguguagguaggccugugccgcaaacaagcuuaccaugggccagaucauuaccuucuuucaagaggugccccacgucauagaagagguuaugaacaucgugcugauugcccucagccuucuggcuaucuugaagggguuauacaauauugcaacaugcggaaucauaggucugguagccuuccuauuucucuguggcaaauccugcucucugacucuuaaagggggauaugaacugcagacguuggagcucaacauggaaacccugaauaugacaaugccucugucauguacuaagaacaguagccaucacuacaucagagugggcaaugagaccggucucgaguuaacacugaccaacacuuccauuaucaaucauaaguucugcaaccuuucugacgcgcacaaaaagaauuuguaugaucaugcucugaugucgauuaucucaacauuucaccuaagcauaccaaacuucaaucaguacgaagccaugaguugugacuuuaacgggggaaagauuuccguccaguauaaucucucucacagcuacgcaggcgaugccgcugagcauugcggcaccguggcaaacgggguucugcaaacguucaugaggauggccuggggaggucgguauaucgcucuugacuccggcaaagggaauugggauuguauuaugacuucauaccaguaccugaucauccagaacaccacaugggaagaccacugccaguuuagucgcccgagccccauuggauauuugggccuccugucucaacgaacucgugauauauacaucuccagaagguuacuggguaccuucacauggacccucucagacagcgaggggaacgagacgccuggaggcuauugucuuacucgguggaugcugauugaagccgaguugaagugcuuuggcaauacagcgguggcaaaauguaacgaaaagcaugaugaggaguucugcgacaugcuacgccuguuugauuucaauaaacaggccaucagaaggcucaaggcugaagcccagaugaguauacagcugauuaacaaggcagucaaugcucuuaucaacgaccaacugaucaugaaaaaucacuugcgggauauuauggggaucccauacugcaacuauucuaaguacugguaucucaaucacaccuccagcggacgcacuucgcugcccaaauguugguuaauuucuaacgguuccuaccugaaugagacacaguucucagacgacauagaacagcaagccgauaacaugaucaccgagaugcuacagaaggaauacauugagcgacagggcaaaacgccucucgggcugguggacaucuuuaucuucaguaccagcuuuuaucuuauuuccauauucuugcaucugaucaagauuccaacacacagacauaucguaggaaaacccugcccuaagccacacaggcucaaucauaugggcguuuguucuugcggucuguacaagcacccgggggugcccacuaaauggaagcggugaggacuagucccuguucccagagcccacuuuuuuuucuuuuuuugaaauaaaauagccugucuuucagaucuaaaaaaaaaaaaaaaaaaaaaaaaaaaaaaaaaaaaaaaaaaaaaaaaaaaaaaaaaaaaaaaaugcaucccccccccccccccccccccccccccccccaaaggcucuuuucagagccaccagaauu

SEQ ID NO: 2641 - RNA, 1768 nt, Artificial Sequence
  mRNA product Design a-2 comprising derived and/or modified sequence from LASV(803213;Clade II)__AAF86703__GPC (opt3)
gggagaguccgcucagccagguugcagaagcggcuuagcguguguccuaaucuucucucugcguguagguaggccugugccgcaaacaagcuuaccaugggccagaucauuaccuucuuucaagaggugccccacgucauagaagagguuaugaacaucgugcugauugcccucagccuucuggcuaucuugaaggggauuuacaauguagcaacaugcggauuauucggucugaucuccuuucuacuccuguguggcagaucuugcucagugacuuauaaaggggucuacgaacuucagacgcuggaguugaacauggccaaucucaacaugaccaugccucugaguuguacaaagaauaacagccaucacuauauaauggugggaaaugaaacuggccuggagcucaccuuaacaaacaccuccaucauuaaucauaaauucugcaaccugucugacgcgcacaagaaaaaucuuuacgaucaugcuuugaugucgaucauuucaacuuuucaccugagcaucccaaacuucaaucaguaugaggccaugaguugugacuuuaacggugggaagauauccguucaguacaaucuaucucacagcuucgcaguggaugccgcuaaccauugcggaacaauugcaaacggcguccuccaaaccuuuaugaggauggccuggggcggguccuauaucgcucuggacucaggaaaggguaauugggauuguauuaugacgaguuaccaguaccuuaucauccagaacacuaccugggaagaccacugccaguucagccggccgucucccauuggcuaucugggguugcucucccaacgcacacgagauauauacaucucacguagacuguuaggaacuuuuaccuggacacugagcgacagugagggcaaugaagccccugguggguauugucucaccagguggaugcuuauugaggcggagcugaaaugcuucggaaacacggcaguggccaaguguaaugaaaaacaugaugaggaauuuugcgacauguugcggcuauucgauuucaacaagcaggcuaucaaacgccugaagacugaggcccagaugucuauacagcucauuaauaaggcaguaaacgcucugaucaaugaccaacuuaucaugaaaaaccaccugagagauauuaugggcaucccauacugcaauuauuccagguacugguauuugaaccacacaguuaccggcaagacuagccucccccgguguuggcuggugucgaaugggucuuacuuaaacgaaacacauuuuuccgacgacauugagcagcaggccgauaauaugauaaccgagaugcugcaaaaagaauacauggaccgccagggaaagacgccucuaggucucgucgaucuguucguguuuucaaccaguuucuaucuuaucagcaucuuuuugcaccuggugaaaauuccaacacaucgacacaucgucggcaagcccugcccuaaaccacauagacucaaccacauggggauuuguuccugcggacuguacaagcacccgggcguucccgugaaguggaaaaggugaggacuagucccuguucccagagcccacuuuuuuuucuuuuuuugaaauaaaauagccugucuuucagaucuaaaaaaaaaaaaaaaaaaaaaaaaaaaaaaaaaaaaaaaaaaaaaaaaaaaaaaaaaaaaaaaaugcaucccccccccccccccccccccccccccccccaaaggcucuuuucagagccaccagaauu

SEQ ID NO: 2642 - RNA, 1768 nt, Artificial Sequence
  mRNA product Design a-2 comprising derived and/or modified sequence from LASV(GA391;Clade III)__CAA36645__GPC (opt3)
gggagaguccgcucagccagguugcagaagcggcuuagcguguguccuaaucuucucucugcguguagguaggccugugccgcaaacaagcuuaccaugggccagaucgugaccuucuuucaagaggucccccacguuauugaagaggugaugaacauaguacugaucgcccucagcauucuugcuauccugaagggguuguacaauguggcaacaugcggauuaauuggucuggucacuuuccuacuccuguccggcagaucuuguucacuuaucuauaaagggacguacgaacugcagaccuuggagcucaacauggaaacacugaauaugacuaugccucugaguugcaccaagaacaauagccaucacuauauaagggugggaaacgagacaggccucgaguuaacccugacuaauacauccauccuuaaccauaaauuuuguaauuugucugacgcccacaagcggaaccuguacgaucauucgcuaaugucaauuaucagcaccuuccaccucaguauuccaaauuuuaaccaguaugaagcgauguccugcgacuucaauggugggaaaaucacgguucaguacaaccugucucacagcuuugcuguggaugccgcaggacauuguggcacucuugccaauggcguccugcaaaccuucaugcgcauggcuuggggaggguccuauauagcauuggacucaggucgaggcaacugggauugcauuaugacaaguuaccaguaccucaucauucagaacacuaccugggacgaucacugucaguuuagccguccgucucccaucggguaucugggauuacugucccaaagaacaagggacaucuacauuucacggcgccuccuuggcaccuucacguggacucugagcgauagugaggguaaugaaacaccugggggauauugcuugaccagauggaugcuaauagaggccgagcugaaguguuuuggcaacacugcuguggccaagugcaaugaaaaacaugacgaggaguucugugauaugcucaggcuguuugacuucaacaagcaggcgauccggcgccuuaaaacagaagcacagaugucuauucagcugaucaauaaggccguaaacgcuuugauaaaugaucaacucauuaugaaaaaccaucugcgagacaucaugggcaucccauacugcaauuauuccagauacugguauuuaaaccacaccagcacggggaagaccucgcugcccaggugcuggcuaauuucuaauggauccuaccucaacgaaacaaaguucucagacgauaucgagcagcaggccgacaauaugauuacugagaugcugcaaaaagaauacauagaucggcaggguaagaccccucuuggcuugguugaccuguuuguguucaguacuagcuuuuaucucaucuccauuuuccugcaccuugucaaaaucccaacacaccgucauaucguggggaagcccuguccuaaaccacaccgccugaaccauaugggaauuugcucuuguggcuuguacaagcagccgggugugcccgucagauggaaaaggugaggacuagucccuguucccagagcccacuuuuuuuucuuuuuuugaaauaaaauagccugucuuucagaucuaaaaaaaaaaaaaaaaaaaaaaaaaaaaaaaaaaaaaaaaaaaaaaaaaaaaaaaaaaaaaaaaugcaucccccccccccccccccccccccccccccccaaaggcucuuuucagagccaccagaauu

SEQ ID NO: 2643 - RNA, 1771 nt, Artificial Sequence
  mRNA product Design a-2 comprising derived and/or modified sequence from LASV(AV;Clade V)__CCA30314__GPC (opt3)
gggagaguccgcucagccagguugcagaagcggcuuagcguguguccuaaucuucucucugcguguagguaggccugugccgcaaacaagcuuaccaugggccagaucgugaccuucuuucaagaggucccccacguuauugaagaggugaugaacauaguacugaucgcccucagcauucuugcugugcugaagggguuguacaauaucgcaacaugcggauuaauuggucugaucacuuuccuacuccuguguggcagauccugcagcucaaaccuuuauaaaggggucuacgaacugcagaguuuggaccucaauauggagacgcugaacaugaccaugccucugagcuguacaaagaauaacucccaucacuauauaagggugggaaaugauacuggccucgaauuaacccugacaaacaccucuauccuuaaucauaaauuuugcaacuugucggacgcccacaagaaagaucuguacgaccaugcgcuaaugucaauuaucagcacuuuccaccucaguauuccaaauuuuaaccaguaugaggcuauguccugugauuucaauggugggaagaucucuguucaguacaaccugagccacuccuaugccauagacgcagccaaucauugcggaacaguggcuaacggcauucuucaaaccuuuaugcggauggcauggggcgggucauacaucgcccuggauaguggacgcgguaacugggacuguauuaugacgagcuaccaguauuugaucauccagaauacuaccugggagaaccacugccaguucucucgaccgucccccauuggcuaccucgggcuguuaucacaacguacaagagauauauauaucagcaggcggcugcucggaacuuuuaccuggacacuuagugacucugaaggcaaugcuaccccugguggguacugucugacgcgcuggauguugauugaggccgaacuaaagugcuucggaaacacugcggucgcaaaauguaaugagaagcaugaugaggaauuuugcgacaugcugagacucuucgauuuuaacaaacaggccaucuccaggcugaagucugaggcucagaugucgauacagcuuauuaauaaagccgugaacgcacugaucaaugaccaauugaucaugaagaaccaccuccgggacauuaugggcaucccauauugcaauuacucuaaguauugguaccugaaccacacaauuaccggcaaaacuuccuuacccaaguguuggcugguaucaaaugggaguuaccuaaacgaaacacauuucagcgaugacauagagcagcaggcugauaauaugaucaccgaaaugcuccaaaaagaguauauggagcgccagggaaagacgccucugggucuuguugacuuguucguguuuuccaccucuuucuaccugauuagcaucuuucuccgacuggucaaaaucccaacacacagacauauugugggcaagcccugcccuaaaccacacaggcuuaaccauauggggauauguucaugcggacuguauaagcagccgggcgugcccguccgguggaagcguugaggacuagucccuguucccagagcccacuuuuuuuucuuuuuuugaaauaaaauagccugucuuucagaucuaaaaaaaaaaaaaaaaaaaaaaaaaaaaaaaaaaaaaaaaaaaaaaaaaaaaaaaaaaaaaaaaugcaucccccccccccccccccccccccccccccccaaaggcucuuuucagagccaccagaauu

SEQ ID NO: 2644 - RNA, 1768 nt, Artificial Sequence
  mRNA product Design a-2 comprising derived and/or modified sequence from LASV(Togo/2016/7082;Clade VI)__AMR44577__GPC (opt3)
gggagaguccgcucagccagguugcagaagcggcuuagcguguguccuaaucuucucucugcguguagguaggccugugccgcaaacaagcuuaccaugggccagaucauuaccuucuuucaagaggugccccacgucauagaagagguuaugaacaucgugcugauugcccucagccuucuggcuaucuugaaggggguauacaauguggcaacaugcggaauuaucgguuuagucacuuuccuguuucuauguggcagauccugcucucucauauauaaagggucauacgaacugcagacgcuugagcugaacauggaaaccuugaauaugacaaugccucucaguuguacuaagaacagcucccaucacuauaucagggugggaaaugagaccggccuggagcugacacucaccaacacuucuauuaucaaucauaaauucugcaacuuaucggacgcccacaagcggaaucuguacgaucaugcgcuuaugucaauuuugagcacauuucaccugaguaucccaaacuucaaucaguaugaagcuauguccugugacuuuaacggugggaaaauaucuguucaguacaaucuaagccacgccuaugcaguggaugccgcugagcauugcggaaccgucgcaaacggcgugcuccaaacguucaugcgcauggccuggggcggguccuacauugcucuggacucaggacgagguaauugggauuguaucaugaccaguuaccaguaucuuauuauccagaacacuacaugggaagaccacugccaguuuagccguccgucucccaucggcuaccugggguugcucucccaaagaacuagggauauuuauauaucacggcgccuguuaggaaccuucacauggacccugagcgacagugagggcaacgagacgccugguggguacugucucacuagauggaugcuuaucgaagccgagcugaagugcuuuggaaauacagcgguagcaaaguguaacgaaaaacaugaugaggaguucugcgacauguugaggcuauuugauuucaauaagcaggccauucagcggcugaaaucugaagcucagauguccauccaacucauaaacaaggccguuaaugcacugauuaacgaccagcuuaucaugaaaaaucaucugcgcgauaugaugggcaucccauauugcaacuacagcaaguauugguacuugaaucacaccucgucuggccgaacuucccuccccaaguguuggcuggugucaaacgggaguuacuuaaaugagacacacuucagcgacgacauugaacagcaagcugauaacaugaucaccgagaugcugcagaaagaauauauugacagacagggaaagacgccucuaggucucgucgaucuguuuguguucuccaccucuuuuuaccuuauaagcaucuucuugcaccugauuaaaaucccaacacauaggcacaucgugggcaagcccugcccuaaaccacaucggcucaaucacauggggauuuguucaugcggacuguauaagcagccgggcguccccacucguuggaaacgcugaggacuagucccuguucccagagcccacuuuuuuuucuuuuuuugaaauaaaauagccugucuuucagaucuaaaaaaaaaaaaaaaaaaaaaaaaaaaaaaaaaaaaaaaaaaaaaaaaaaaaaaaaaaaaaaaaugcaucccccccccccccccccccccccccccccccaaaggcucuuuucagagccaccagaauu

SEQ ID NO: 2645 - RNA, 1768 nt, Artificial Sequence
  mRNA product Design a-2 comprising derived and/or modified sequence from LASV(KAK-428;Clade n.d. (VII))__ANH09740__GPC (opt3)
gggagaguccgcucagccagguugcagaagcggcuuagcguguguccuaaucuucucucugcguguagguaggccugugccgcaaacaagcuuaccaugggccagaucgugaccuucuuucaagaggucccccacguuauugaagaggugaugaacauaguacugaucgcccucagccuucuggcuauuuugaagggguuauacaauuucgcaacaugcggagugaucggucugauuacuuuucuacuccuguguggcagauccugcucugccacguauaaagggcaguacgaacuucagacccuggaguugaacauggaaucacucaauaugacaaugccucugaguuguacuaagaacaauagccaucacuauaucagggcgggaaacaauaccggccuggagcucacauuaaccaacacuuccauaaucucucauaaauucugcaaucugucggacgcucacaagaaaaaccuuuacgaucauacauugaugucaauuaucaccacguuucaccugagcauuccaaauuucaaccaguaugaggccaugaguugugacuuuaauggugggaagaucuccauacaauacaaccuaucucacagcuaugcaggagaugccgcucagcauugcggcacugucgcaaauggcgugcuccagaccuucaugcggauggccuggggaggguccuaccuggcucuugacucaggucgccgaggcugggauuguauuaucaguagcuaccaguaucugauuauccaaaacacaacuugggacgaucacugccaguuuucucguccgucccccaucggguacuugggauucguuucacagaagaccagagacauuuauauaagcaggcggcuccugggcacauuuaccuggacguuaagugauucugaaggucaugacaugccugggggauacugucugacucgcuggaugcucaucgaggccgaucuuaaaugcuucggcaacacagcgguggcaaaguguaaugaaaaacacgacgaggaguuuugcgauauguggagacuguucgacuucaacaagcaggccauucaaagguugaaagcugaagcccagaugaauauccagcuaauaaacaaggcagucaaugcucugauuaacgaccaacucaugaugaagaaucaucugcgggauaucaugggcaucccauauugcaacuacuccaaauuuugguaucuuaauaacaccacuacagggcgcaccagccugccccgauguugguugauuucgaauggaucuuaccucaacgagacgcacuucuccgacgauaucgaacagcaggccgacaauaugauuaccgagaugcugcagaaggaauacauggauagacaagguaaaacaccuuuaggccugguggaccuauuuguauucucaaccaguuuuuaucucauaacuaucuuccugcaccuuguuaagauuccaacacauaggcacaucguggggaaacccugcccuaagccacaucgguugaaccacaugggaaucuguagcugcggccuguacaaacagccggguguccccgugcguuggaagcgcugaggacuagucccuguucccagagcccacuuuuuuuucuuuuuuugaaauaaaauagccugucuuucagaucuaaaaaaaaaaaaaaaaaaaaaaaaaaaaaaaaaaaaaaaaaaaaaaaaaaaaaaaaaaaaaaaaugcaucccccccccccccccccccccccccccccccaaaggcucuuuucagagccaccagaauu

SEQ ID NO: 2646 - RNA, 1768 nt, Artificial Sequence; identical to SEQ ID NO: 2640
  mRNA product Design a-2 comprising derived and/or modified sequence from LASV(Pinneo-NIG-1969;Clade I)__AIT17836__GPC (opt3)

SEQ ID NO: 2647 - RNA, 1768 nt, Artificial Sequence
  mRNA product Design a-2 comprising derived and/or modified sequence from LASV(ISTH0009-NIG-2011;Clade II)__AIT17404__GPC (opt3)
gggagaguccgcucagccagguugcagaagcggcuuagcguguguccuaaucuucucucugcguguagguaggccugugccgcaaacaagcuuaccaugggccagaucauuaccuucuuucaagaggugccccacgucauagaagagguuaugaacaucgugcugauugcccucagccuucuggcuaucuugaaggggauuuacaauguagcaacaugcggauuauucggucugguguccuuucuacuccuguguggcagaucuugcucaacuacguauaaaggggucuacgaacuucagacccuggaguuggacauggccagucucaacaugacaaugccucugagcuguacuaagaauaacucccaucacuauaucauggugggaaaugaaaccggccuggagcucacauuaaccaacacuucuauaaucaaucauaaauucugcaaccugucggaugcgcacaagaaaaaucuuuacgaccaugcuuugaugucaauuaucagcacauuucaccugaguauuccaaacuucaaucaguaugaggccauguccugugauuuuaacggugggaagaucucuguucaguacaaucuaagccacgcauaugccguggacgcugcaaaccauugcggaaccauagccaauggcguccuccaaacguucaugaggauggcuuggggcggguccuacauugcccuggauucaggaaaggguaguugggacuguaucaugacuagcuaccaguaucuuauuauccagaacaccacaugggaagaucacugccaguuuucucggccgucccccaucggcuaccugggguugcucucacaacgcacucgagacauuuauauaagccguagacuguuaggaaccuucacauggacccugagugauucugagggcaacgaaacgccugguggguacugucucacuagguggaugcuuaucgaggcggagcugaaaugcuuuggaaauacagcaguggccaaguguaacgaaaaacaugacgaggaguucugcgauauguugcggcuauuugacuucaauaagcaggcuauucgcagacugaaaaccgaagcccagauguccauccagcucauaaacaaggcaguaaaugcucugauuaacgaucaacuuaucaugaagaaucaccugagggacaucaugggcauuccauauugcaacuacagcaaauauugguacuugaaucacacuguuacaggcaagaccucgcucccccgguguuggcuggugucuaacggguccuacuuaaaugaaacgcauuucucagacgauaucgagcagcaggccgacaacaugauuaccgagcugcuacaaaaagaauauauggaucgccagggaaagacaccucucggucuggucgaccuuuuuguguucaguacuagcuuuuacuugauauccaucuuccugcaccucauuaaaaucccaacccaucgacacaucacaggcaagcccugcccuaaaccacauagacugaaucacauggggauuuguucuugcggacuuuauaagcacccgggcgugcccgucaaguggaaaaggugaggacuagucccuguucccagagcccacuuuuuuuucuuuuuuugaaauaaaauagccugucuuucagaucuaaaaaaaaaaaaaaaaaaaaaaaaaaaaaaaaaaaaaaaaaaaaaaaaaaaaaaaaaaaaaaaaugcaucccccccccccccccccccccccccccccccaaaggcucuuuucagagccaccagaauu

SEQ ID NO: 2648 - RNA, 1768 nt, Artificial Sequence
  mRNA product Design a-2 comprising derived and/or modified sequence from LASV(ISTH2010-NIG-2012;Clade II)__AIT17482__GPC (opt3)
gggagaguccgcucagccagguugcagaagcggcuuagcguguguccuaaucuucucucugcguguagguaggccugugccgcaaacaagcuuaccaugggccagaucauuaccuucuuucaagaggugccccacgucauagaagagguuaugaacaucgugcugauugcccucagccuucuggcuaucuugaaggggauuuacaauguagcaacaugcggauuauucggucugguguccuuucuacuccuguguggcagaucuugcucaacuacguauaaaggggucuacgaacuucagacccuggaguuggacauggccagucucaacaugacaaugccucugagcuguacuaagaauaacucccaucacuauaucauggugggaaaugaaaccggccuggagcucacauuaaccaacacuucuauaaucaaucauaaauucugcaaccugucggaugcgcacaagaaaaaucuuuacgaccaugcuuugaugucaauuaucagcacauuucaccugaguauuccaaacuucaaucaguaugaggccauguccugugauuuuaacggugggaagaucucuguucaguacaaucuaagccacgcauaugccguggacgcugcaaaccauugcggaaccauagccaauggcguccuccaaacguucaugaggauggcuuggggcggguccuacauugcccuggauucaggaaaggguaguugggacuguaucaugacuagcuaccaguaucuuauuauccagaacaucaccugggaagaucacugccaguuuucucggccgucccccauuggcuaccugggguugcucucacaacgcacacgagacauauauaucagccguagacuguuaggaacuuucaccuggacacugagugauucugagggcaacgaaaccccugguggguacugucucacgagguggaugcuuauugaggcggagcugaaaugcuuuggaaauacugcaguggccaaguguaacgaaaaacaugacgaggaguucugcgauauguugcggcuauuugacuucaauaagcaggcuauccgcagacugaaaacagaagcccagauguccauacagcucauuaacaaggcaguaaaugcucugaucaacgaucaacuuaucaugaagaaucaccugagggacauuaugggcaucccauauugcaacuacagcaaauauugguacuugaaucacaccguuacuggcaagacaucgcucccccgguguuggcuggugucuaacggguccuacuuaaaugaaacccauuucucagacgauauugagcagcaggccgacaacaugauaacggagcugcuacaaaaagaauauaucgaucgccagggaaagaccccucucggucuggucgaccuuuuuguguucaguacuagcuuuuacuugauuuccaucuuccugcaccucgugaaaaucccaacacaucgacacgucguuggcaagcccugcccuaaaccacauagacugaaucacauggggauuuguucuugcggacuuuauaagcacccgggcgugcccguaaaguggaaaaggugaggacuagucccuguucccagagcccacuuuuuuuucuuuuuuugaaauaaaauagccugucuuucagaucuaaaaaaaaaaaaaaaaaaaaaaaaaaaaaaaaaaaaaaaaaaaaaaaaaaaaaaaaaaaaaaaaugcaucccccccccccccccccccccccccccccccaaaggcucuuuucagagccaccagaauu

SEQ ID NO: 2649 - RNA, 1768 nt, Artificial Sequence
  mRNA product Design a-2 comprising derived and/or modified sequence from LASV(Lassa virus/H.sapiens-wt/NGA/2015/ISTH_0543;Clade II)__AVO03639__GPC (opt3)
gggagaguccgcucagccagguugcagaagcggcuuagcguguguccuaaucuucucucugcguguagguaggccugugccgcaaacaagcuuaccaugggccagaucauuaccuucuuucaagaggugccccacgucauagaagagguuaugaacaucgugcugauugcccucagccuucuggcuaucuugaaggggauuuacaauguagcaacaugcggauuauucggucugguguccuuucuacuccuguguggcagaucuugcucaacuacguauaaaggggucuacgaacuucagacccuggaguuggacauggccaaccucaauaugacaaugccucugaguuguacuaagaacaauagccaucacuauaucauggugggaaacgaaaccggccuggagcucacauuaaccaauacuuccauaaucaaccauaaauucugcaaucugucugaugcgcacaagaaaaaccuuuacgaccaugcuuugaugucgauuaucucaacauuucaccugagcauuccaaauuucaaccaguaugaggccaugaguugugauuuuaauggugggaagaucuccguucaguacaaccuaucucacaccuaugcaguggacgccgcuaaucauugcggaacgauagcaaacggcguccuccaaacuuucaugaggauggccuggggcgggagcuacauugcucuggauuccggaaaggguucaugggacuguaucaugaccaguuaccaguaucuugugauucagaacacaacuugggaagaucacugccaguuuagccggccgucucccaucggcuaccugggguugcucucccaacgcacccgagacaucuauauuucacguagacuguuaggaacauucaccuggacgcugagcgauagugagggcaaugaaacuccugguggguacugucucacaagguggaugcuuauagaggccgagcugaaaugcuuuggaaacaccgcgguagcaaaguguaaugaaaaacaugacgaggaguucugcgauauguugcggcuauuugacuucaacaagcaggccauccgcagacugaaaacugaagcucagaugucuauucagcucaucaauaaggccguuaacgcacugauaaaugaucaacuuauuaugaagaaccaccugagggacaucaugggcaucccauauugcaauuacuccaaauauugguacuugaaccacacagugaccggcaagacgagccucccccgguguuggcuggucucgaaugggucuuacuuaaacgaaacccauuucuccgacgauauugagcagcaggcugacaauaugaucacagagcugcuacaaaaagaauauauugaucgccagggaaagacuccucucggucugguggaccuuuuuguguucucaaccaguuuuuacuugauaagcaucuuccugcaccucgucaaaauuccaacacaucgacacaucacuggcaagcccugcccuaaaccacauagacugaaccacauggggaucuguuccugcggacuuuauaagcacccgggcguucccgugaaguggaaaaggugaggacuagucccuguucccagagcccacuuuuuuuucuuuuuuugaaauaaaauagccugucuuucagaucuaaaaaaaaaaaaaaaaaaaaaaaaaaaaaaaaaaaaaaaaaaaaaaaaaaaaaaaaaaaaaaaaugcaucccccccccccccccccccccccccccccccaaaggcucuuuucagagccaccagaauu

SEQ ID NO: 2650 - RNA, 1768 nt, Artificial Sequence
  mRNA product Design a-2 comprising derived and/or modified sequence from LASV(Lassa virus/H.sapiens-wt/NGA/2016/ISTH_0009;Clade II)__AVO03571__GPC (opt3)
gggagaguccgcucagccagguugcagaagcggcuuagcguguguccuaaucuucucucugcguguagguaggccugugccgcaaacaagcuuaccaugggccagaucauuaccuucuuucaagaggugccccacgucauagaagagguuaugaacaucgugcugauugcccucagccuucuggcuaucuugaaggggauuuacaauguagcaacaugcggauuacugggucuaguguccuuccuccugcuuuguggcagaucuugcucaacuacguauaaaggggucuacgaacugcagaccuuggagcucgacauggccagucugaacaugacaaugccucugagcuguacuaagaauaacucccaucacuauaucauggugggaaaugaaaccggccucgaguuaacacugaccaacacuucuauaaucaaucauaaauuuugcaaccuuucggaugcgcacaagaaaaauuuguacgaccaugcucugaugucaauuaucagcacauuccaccuaaguauuccaaacuuuaaucaguaugaggccauguccugugauuucaacggugggaggaucucuguucaguacaaucucagccacuccuaugcaguggacgccgcuaaccauugcggaaccauagcaaauggcguccugcaaacguuuaugcggauggccuggggcgggucauacauugcucuugauaguggaaaggguagcugggacuguaucaugacuucuuaccaguaucugauuauccagaacaccacaugggaagaucacugccaguucucccgcccgucacccaucggcuacuuggggcuccugagccaacgaacucgugacauuuauauaaguagaagguuacugggaaccuuuacauggacccucucugauuccgagggcaacgaaacgccugguggguacugucuuacucgguggaugcugaucgaggccgaguugaagugcuucggaaauacagcgguggcaaaauguaacgaaaagcaugacgaggaauuuugcgauaugcuacgccuguucgacuuuaauaaacaggccauuagaaggcucaagaccgaggcucagaugagcauccagcugauaaacaaagccguaaaugcacuuauuaacgaucaacugaucaugaagaaucacuugcgggacaucaugggcauuccauauugcaacuacucgaaguauugguaccucaaucacacuguuacaggcaaaaccucucugccccgcuguugguuaguguccaacgggucauaccugaaugaaacgcauuucagugacgauaucgagcagcaggcugacaacaugauuaccgagcuacuccaaaaggaauauauagaucgacagggaaaaacaccucugggucuugucgacuuguucguguuuagcacuuccuucuaccugaucucuauuuuucuccaccuggugaagaucccaacccauagacacaucacaggcaaacccugcccuaagccacauaggcuuaaucacauggggauuuguagcugcggacuguauaaccacccgggcguccccguuaaauggaagcggugaggacuagucccuguucccagagcccacuuuuuuuucuuuuuuugaaauaaaauagccugucuuucagaucuaaaaaaaaaaaaaaaaaaaaaaaaaaaaaaaaaaaaaaaaaaaaaaaaaaaaaaaaaaaaaaaaugcaucccccccccccccccccccccccccccccccaaaggcucuuuucagagccaccagaauu

SEQ ID NO: 2651 - RNA, 1768 nt, Artificial Sequence
  mRNA product Design a-2 comprising derived and/or modified sequence from LASV(Lassa virus/H.sapiens-wt/NGA/2016/ISTH_0017;Clade II)__AVO03567__GPC (opt3)
gggagaguccgcucagccagguugcagaagcggcuuagcguguguccuaaucuucucucugcguguagguaggccugugccgcaaacaagcuuaccaugggccagaucauuaccuucuuucaagaggugccccacgucauagaagagguuaugaacaucgugcugauugcccucagccuucuggcuaucuugaaggggauuuacaauguagcaacaugcggauuauucggucugguguccuuucuacuccuguguggcagaucuugcucaacuacguauaaaggggucuacgaacuucagacccuggaguuggacauggccagucucaacaugacaaugccucugagcuguacuaagaauaacucccaucacuauaucauggugggaaaugaaaccggccuggagcucacauuaaccaacacuucuauaaucaaucauaaauucugcaaccugucggaugcgcacaagaaaaaucuuuacgaccaugcuuugaugucaauuaucagcacauuucaccugaguauuccaaacuucaaucaguaugaggccauguccugugauuuuaacggugggaagaucucuguucaguacaaucuaagccacaccuaugcaauagacgccgcuaaccauugcggaacgauugcaaauggcgugcuccaaacuuucaugaggauggccuggggcggguccuacaucgcucuggauucaggaaaggguaguugggacuguauuaugaccagcuaccaguaucuuaucauccagaacacaacuugggaagaucacugccaguuuucucggccgucccccauuggcuaccugggguugcucucacaacgcacccgagacauauauaucagccguagacuguuaggaacauucaccuggacgcugagugauucugagggcaacgaaacuccugguggguacugucucacaagguggaugcuuauugaggccgagcugaaaugcuuuggaaauaccgcggucgcaaaguguaacgaaaaacaugacgaggaguucugcgauauguugcggcuauuugacuucaauaagcaggccauccgcagacugaaaacugaagcucagauguccauacagcucauuaacaaggccgugaaugcacugaucaacgaucaacuuaucaugaagaaucaccugagggacauuaugggcaucccauauugcaacuacagcaaauauugguacuugaaucacacaguaaccggcaagacgucgcucccccgguguuggcugguuucuaacggguccuacuuaaaugaaacccauuucucagacgauauugagcagcaggcugacaacaugauaacagagcugcuacaaaaagaauauauggaucgccagggaaagacuccucucggucugguggaccuuuuugucuucaguaccagcuuuuacuugaucuccauuuuccugcaccucgugcgaaucccaacacauagacacgugaucggcaaacccugcccuaagccacauaggcugaaucacauggggauuuguucuugcggacuuuauaaacacccgggcguccccguuaaguggaagcggugaggacuagucccuguucccagagcccacuuuuuuuucuuuuuuugaaauaaaauagccugucuuucagaucuaaaaaaaaaaaaaaaaaaaaaaaaaaaaaaaaaaaaaaaaaaaaaaaaaaaaaaaaaaaaaaaaugcaucccccccccccccccccccccccccccccccaaaggcucuuuucagagccaccagaauu

SEQ ID NO: 2652 - RNA, 1768 nt, Artificial Sequence
  mRNA product Design a-2 comprising derived and/or modified sequence from LASV(Lassa virus/H.sapiens-wt/NGA/2018/ISTH_0959;Clade II)__AVV65099__GPC (opt3)
gggagaguccgcucagccagguugcagaagcggcuuagcguguguccuaaucuucucucugcguguagguaggccugugccgcaaacaagcuuaccaugggccagaucauuaccuucuuucaagaggugccccacgucauagaagagguuaugaacaucgugcugauugcccucagccuucuggcuaucuugaaggggauuuacaauguagugacaugcggauuauucggucuggucuccuuucuacuccuguguggcagaucuugcucaacuacguauaaagggguguacgaacuucagacccuggaguuggacauggcaagucucaacaugacaaugccucugagcuguacuaagaauaacucccaucacuauaucaugguuggaaaugaaaccggccuggagcucacauuaaccaacacuucuauaaucaaucauaaauucugcaaccugucggaugcccacaagaaaaaucuuuacgaccaugcguugaugucaauuaucagcacauuucaccugaguauuccaaacuucaaucaguaugaggcuauguccugugauuuuaacggugggaagaucucugugcaguacaaucuaagccacgccuaugcaauagacgccgcuaaccauugcggaaccauugcaaauggcguccuccaaacguucaugaggauggccuggggcggguccuacaucgcucuggauucaggaaaggguaguugggacuguauuaugacuagcuaccaguaucuuaucauccagaacaccacaugggaagaucacugccaguuuucucggccgucccccauuggcuaccugggguugcucucacaacgcacucgagacauauauaucagccguagacuguuaggaaccuucacauggacccugagugauucugagggcaacgaaacgccugguggguacugucucacuagguggaugcuuauugaggccgagcugaaaugcuuuggaaauacagcgguggcaaaguguaacgaaaaacaugacgaggaguucugcgauauguugcggcuauuugacuucaauaagcaggccauccgcagacugaaaaccgaagcucagauguccauacagcucauuaacaaggccguaaaugcacugaucaacgaucaacuuaucaugaagaaucaccugagggacauuaugggcaucccauauugcaacuacagcaaauauugguacuugaaucacacuguuacaggcaagaccucgcucccccgguguuggcuggugucuaacggguccuacuuaaaugaaacgcauuucucagacgauauugagcagcaggcugacaacaugauaaccgagcugcuacaaaaagaauauaucgaucgccagggaaagacaccucucggucuggucgaccuuuuuguguucaguacuagcuuuuacuugauuuccaucuuccugcaccucgugaaaaucccaacccaucgacacgucauuggcaagcccugcccuaaaccacauagacugaaucacauggggauauguucuugcggacuuuauaagcacccgggcguucccgugaaguggaaaaggugaggacuagucccuguucccagagcccacuuuuuuuucuuuuuuugaaauaaaauagccugucuuucagaucuaaaaaaaaaaaaaaaaaaaaaaaaaaaaaaaaaaaaaaaaaaaaaaaaaaaaaaaaaaaaaaaaugcaucccccccccccccccccccccccccccccccaaaggcucuuuucagagccaccagaauu

SEQ ID NO: 2653 - RNA, 1768 nt, Artificial Sequence
  mRNA product Design a-2 comprising derived and/or modified sequence from LASV(LASV003-NIG-2008;Clade II)__AIT17580__GPC (opt3)
gggagaguccgcucagccagguugcagaagcggcuuagcguguguccuaaucuucucucugcguguagguaggccugugccgcaaacaagcuuaccaugggccagaucauuaccuucuuucaagaggugccccacgucauagaagagguuaugaacaucgugcugauugcccucagccuucuggcuaucuugaaggggauuuacaauguagcaacaugcggauuauucggucugguguccuuucuacuccuguguggcagaucuugcucaacuacguauaaaggggucuacgaacuucagacccuggaguuggacauggccagucucaacaugacaaugccucugagcuguacuaagaauaacucccaucacuauaucauggugggaaaugaaaccggccuggagcucacauuaaccaacacuucuauaaucaaucauaaauucugcaaccugucggaugcgcacaagaaaaaucuuuacgaccaugcuuugaugucaauuaucagcacauuucaccugaguauuccaaacuucaaucaguaugaggccauguccugugauuuuaacggugggaagaucucuguucaguacaaucuaagccacaccuaugcaguggacgccgcuaaccauugcggaacgauagcaaauggcguccuccaaacuuucaugaggauggccuggggcggguccuacauugcucuggauucaggaaaggguaguugggacuguaucaugaccagcuaccaguaucuuauuauccagaacacaacuugggaagaucacugccaguuuucucggccgucccccaucggcuaccugggguugcucucacaacgcacccgagacauuuauauaagccguagacuguuaggaacauucaccuggacgcugagugauucugaguccaacgaaacuccuggcgguuacugucucacaagguggaugcuuaucgaggccgagcugaaaugcuuugggaauaccgcgguggcaaaguguaacgaaaaacaugacgaggaguucugcgauauguugcggcuauuugacuucaauaagcaggccauucgcagacugaaagcugaagcccagaugagcauccagcucauaaacaaggcaguaaaugcucugauuaacgaucaacuuaucaugaagaaucaccugagggacaucaugggcauuccauauugcaacuacucgaaauauugguacuugaaucacacuguuacaggacggaccucucucccccgcuguuggcugguguccaacggcucauacuuaaaugaaacgcauuucagugacgauaucgagcagcaggccgacaacaugauuaccgagcugcuacaaaaggaauauauggaucgacaggggaaaacaccucucggacuggucgaccuuuuuguguucagcacuuccuuuuacuugauaucuaucuuccugcaccucgugaagauuccaacccauagacacgucaucgguaaacccugcccuaagccacauaggcugaaucacaugggcaucuguagcugcgggcuuuauaaacacccgggaguucccgugaaguggaagcggugaggacuagucccuguucccagagcccacuuuuuuuucuuuuuuugaaauaaaauagccugucuuucagaucuaaaaaaaaaaaaaaaaaaaaaaaaaaaaaaaaaaaaaaaaaaaaaaaaaaaaaaaaaaaaaaaaugcaucccccccccccccccccccccccccccccccaaaggcucuuuucagagccaccagaauu

SEQ ID NO: 2654 - RNA, 1768 nt, Artificial Sequence
  mRNA product Design a-2 comprising derived and/or modified sequence from LASV(LASV035-NIG-2009;Clade II)__AIT17588__GPC (opt3)
gggagaguccgcucagccagguugcagaagcggcuuagcguguguccuaaucuucucucugcguguagguaggccugugccgcaaacaagcuuaccaugggccagaucauuaccuucuuucaagaggugccccacgucauagaagagguuaugaacaucgugcugauugcccucagccuucuggcuaucuugaaggggauuuacaauguagcaacaugcggauuauucggucugguguccuuucuacuccuguguggcagaucuugcucaacuacguauaaaggggucuacgaacuucagacccuggaguuggacauggccagucucaacaugacaaugccucugagcuguacuaagaauaacucccaucacuauaucauggugggaaaugaaaccggccuggagcucacauuaaccaacacuucuauaaucaaucauaaauucugcaaccugucggaugcgcacaagaaaaaucuuuacgaccaugcuuugaugucaauuaucagcacauuucaccugaguauuccaaacuucaaucaguaugaggccauguccugugauuuuaacggugggaagaucucuguucaguacaaucuaagccacgcauaugccguggacgcugcaaaccauugcggaaccauagccaauggcguccuccaaacguucaugaggauggcuuggggcggguccuacauugcccuggauucaggaaaggguaguugggacuguaucaugacuagcuaccaguaucuuauuauccagaacaccacaugggaagaucacugccaguuuucucggccgucccccaucggcuaccugggguugcucucacaacgcacucgagacauuuauauaagccguagacuguuaggaaccuucacauggacccugagugauucugagggcaacgaaacgccugguggguacugucucacuagguggaugcuuaucgaggcggagcugaaaugcuuuggaaauacagcaguggccaaguguaacgaaaaacaugacgaggaguucugcgauauguugcggcuauuugacuucaauaagcaggcuauucgcagacugaaagccgaagcacagauguccauccagcucauaaacaaggcuguaaaugcccugauuaacgaucaacuuaucaugaagaaucaccugagggacaucaugggcauuccauauugcaacuacagcaaauauugguacuugaaucacaccguuacuggcaagacaucgcucccccgguguuggcuggugucuaacggguccuacuuaaaugaaacccauuucucagacgauaucgagcagcaggcggacaacaugauuacggagcugcuacaaaaagaauauauagaucgccagggaaagaccccucucggucuggucgaccuuuuuguguucaguacuagcuuuuacuugaucuccauuuuccugcaccucgugaaaaucccaacacaucgacacgucaucggcaagcccugcccuaaaccacauagacugaaucacauggggauuuguucuugcggacuuuauaagcacccgggcguucccgugaaguggaaaaggugaggacuagucccuguucccagagcccacuuuuuuuucuuuuuuugaaauaaaauagccugucuuucagaucuaaaaaaaaaaaaaaaaaaaaaaaaaaaaaaaaaaaaaaaaaaaaaaaaaaaaaaaaaaaaaaaaugcaucccccccccccccccccccccccccccccccaaaggcucuuuucagagccaccagaauu

SEQ ID NO: 2655 - RNA, 1768 nt, Artificial Sequence
  mRNA product Design a-2 comprising derived and/or modified sequence from LASV(LASV1000-NIG-2009;Clade II)__AIT17782__GPC (opt3)
gggagaguccgcucagccagguugcagaagcggcuuagcguguguccuaaucuucucucugcguguagguaggccugugccgcaaacaagcuuaccaugggccagaucauuaccuucuuucaagaggugccccacgucauagaagagguuaugaacaucgugcugauugcccucagccuucuggcuaucuugaaggggauuuacaauguagcaacaugcggauuauucggucugguguccuuucuacuccuguguggcagaucuugcucaacuacguauaaaggggucuacgaacuucagacccuggaguuggacauggccagucucaacaugacaaugccucugagcuguacuaagaauaacucccaucacuauaucauggugggaaaugaaaccggccuggagcucacauuaaccaacacuucuauaaucaaucauaaauucugcaaccugucggaugcgcacaagaaaaaucuuuacgaccaugcuuugaugucaauuaucagcacauuucaccugaguauuccaaacuucaaucaguaugaggccauguccugugauuuuaacggugggaagaucucuguucaguacaaucuaagccacaccuaugcaguggacgccgcuaaccauugcggaacgauagcaaauggcguccuccaaacuuucaugaggauggccuggggcggguccuacauugcucuggauucaggaaaggguaguugggacuguaucaugaccagcuaccaguaucuuauuauccagaacacaacuugggaagaucacugccaguuuucucggccgucccccaucggcuaccugggguugcucucacaacgcacccgagacauuuauauaagccguagacuguuaggaacauucaccuggacgcugagugauucugagggcaacgaaacuccugguggguacugucucacaagguggaugcuuaucgaggccgagcugaaaugcuuuggaaauaccgcgguggcaaaguguaacgaaaaacaugacgaggaguucugcgauauguugcggcuauuugacuucaauaagcaggccauuaaacgccugaagacugaagcucagauguccauccagcucauaaacaaggccguaaaugcacugauuaacgaucaacuuaucaugaaaaaucaccugagagacaucaugggcauuccauauugcaacuacagcaaguauugguacuugaaucacacaguuaccggcaaaacgucgcuccccagguguuggcuggugucuaacggguccuacuuaaaugaaacccauuucucagacgauaucgagcagcaggcugacaacaugauuacagagcugcuacaaaaggaauauauagaucggcagggaaaaacuccucucggucuggucgaccuuuuuguguucaguaccagcuuuuacuugaucuccauuuuccugcaccucgugaagaucccaacacaucgccacgucguuggcaaacccugcccuaagccacaucgacugaaucacauggggaucuguucuugcggacuuuauaagcacccgggcgugcccguaaaauggaagagaugaggacuagucccuguucccagagcccacuuuuuuuucuuuuuuugaaauaaaauagccugucuuucagaucuaaaaaaaaaaaaaaaaaaaaaaaaaaaaaaaaaaaaaaaaaaaaaaaaaaaaaaaaaaaaaaaaugcaucccccccccccccccccccccccccccccccaaaggcucuuuucagagccaccagaauu

SEQ ID NO: 2656 - RNA, 1768 nt, Artificial Sequence
  mRNA product Design a-2 comprising derived and/or modified sequence from LASV(LASV221-NIG-2010;Clade II)__AIT17624__GPC (opt3)
gggagaguccgcucagccagguugcagaagcggcuuagcguguguccuaaucuucucucugcguguagguaggccugugccgcaaacaagcuuaccaugggccagaucauuaccuucuuucaagaggugccccacgucauagaagagguuaugaacaucgugcugauugcccucagccuucuggcuaucuugaaggggauuuacaauguagcaacaugcggauuauucggucugguguccuuucuacuccuguguggcagaucuugcucaacuacguauaaaggggucuacgaacuucagacccuggaguuggacauggccagucucaacaugacaaugccucugagcuguacuaagaauaacucccaucacuauaucauggugggaaaugaaaccggccuggagcucacauuaaccaacacuucuauaaucaaucauaaauucugcaaccugucggaugcgcacaagaaaaaucuuuacgaccaugcuuugaugucaauuaucagcacauuucaccugaguauuccaaacuucaaucaguaugaggccauguccugugauuuuaacggugggaagaucucuguucaguacaaucuaagccacaccuaugcaauagacgccgcuaaccauugcggaacgauugcaaauggcgugcuccaaacuuucaugaggauggccuggggcggguccuacaucgcucuggauucaggaaaggguaguugggacuguauuaugaccagcuaccaguaucuuaucauccagaacacaacuugggaagaucacugccaguuuucucggccgucccccauuggcuaccugggguugcucucacaacgcacccgagacauauauaucagccguagacuguuaggaacauucaccuggacgcugagugauucugagggcaacgaaacuccugguggguacugucucacaagguggaugcuuauugaggccgagcugaaaugcuuuggaaauaccgcggucgcaaaguguaacgaaaaacaugacgaggaguucugcgauauguugcggcuauuugacuucaauaagcaggccauccgcagacugaaaacugaagcucagauguccauacagcucauuaacaaggccgugaaugcacugaucaacgaucaacuuaucaugaagaaucaccugagggacauuaugggcaucccauauugcaacuacagcaaauauugguacuugaaucacacaguaaccggcaagacgucgcucccccgguguuggcugguuucuaacggguccuacuuaaaugaaacccauuucucagacgauauugagcagcaggcugacaacaugauaacagagaugcugcaaaaagaauauauggaucgccagggaaagacuccucuaggucucguggaccuguuugucuucaguaccagcuuuuaccuuaucuccauuuucuugcaccuggugaaaaucccaacacaucgacacgugaucggcaagcccugcccuaaaccacauagacucaaucacauggggauuuguucuugcggacuguauaagcacccgggcguccccguuaaguggaaaaggugaggacuagucccuguucccagagcccacuuuuuuuucuuuuuuugaaauaaaauagccugucuuucagaucuaaaaaaaaaaaaaaaaaaaaaaaaaaaaaaaaaaaaaaaaaaaaaaaaaaaaaaaaaaaaaaaaugcaucccccccccccccccccccccccccccccccaaaggcucuuuucagagccaccagaauu

SEQ ID NO: 2657 - RNA, 1768 nt, Artificial Sequence
  mRNA product Design a-2 comprising derived and/or modified sequence from LASV(LASV237-NIG-2010;Clade II)__AIT17638__GPC (opt3)
gggagaguccgcucagccagguugcagaagcggcuuagcguguguccuaaucuucucucugcguguagguaggccugugccgcaaacaagcuuaccaugggccagaucauuaccuucuuucaagaggugccccacgucauagaagagguuaugaacaucgugcugauugcccucagccuucuggcuaucuugaaggggauuuacaauguagcaacaugcggauuauucggucugguguccuuucuacuccuguguggcagaucuugcucaacuacguauaaaggggucuacgaacuucagacccuggaguuggacauggccagucucaacaugacaaugccucugagcuguacuaagaauaacucccaucacuauaucauggugggaaaugaaaccggccuggagcucacauuaaccaacacuucuauaaucaaucauaaauucugcaaccugucggaugcgcacaagaaagaccuuuacgaucaugcuuugaugucaauuaucagcacauuucaccugaguauuccaaauuucaaccaguaugaggccauguccugugacuuuaauggugggaagaucucuguucaguacaaccuaagccacaccuaugcaguggaugccgcuaaucauugcggaacgauagcaaacggcguccuccaaacuuucaugaggauggccuggggcggguccuacauugcucuggacucaggaaaggguaguugggauuguaucaugaccagcuaccaguaucuuauuauccagaauacaacuugggaagaccacugccaguuuucucggccgucccccaucggcuaccugggguugcucucacaacgcacccgagauauuuauauaagccguagacuguuaggaacauucaccuggacgcugagugacucugagggcaacgaaacuccugguggguacugucucacaagguggaugcuuaucgaggccgagcugaaaugcuuuggaaacaccgcgguggcaaaguguaaugaaaaacaugaugaggaguucugcgacauguugcggcuauuugauuucaacaagcaggccauucgcagacugaaaacugaagcucagauguccauccagcucauaaauaaggccguaaacgcacugauuaaugaccaacuuaucaugaagaaccaccugagggacaucaugggcauuccauauugcaauuacagcaaauauugguacuugaaccacacaguuaccggcaagacgucgcucccccgguguuggcuggugucuaauggguccuacuuaaacgaaacccauuucucagaugacaucgagcagcaggcugauaauaugauuacagagcugcuacaaaaagaauauauggaccgccagggaaagacuccucucggucuggucgaucuuuuuguguucaguaccagcuuuuacuugauauccaucuuccugcaccucauuaaaaucccaacacaucgacacaucacuggcaagcccugcccuaaaccacauagacugaaccacauggggauuuguucuugcggacuuuauaagcacccgggcgugcccgucaaguggaaaaggugaggacuagucccuguucccagagcccacuuuuuuuucuuuuuuugaaauaaaauagccugucuuucagaucuaaaaaaaaaaaaaaaaaaaaaaaaaaaaaaaaaaaaaaaaaaaaaaaaaaaaaaaaaaaaaaaaugcaucccccccccccccccccccccccccccccccaaaggcucuuuucagagccaccagaauu

SEQ ID NO: 2658 - RNA, 1768 nt, Artificial Sequence
  mRNA product Design a-2 comprising derived and/or modified sequence from LASV(LASV253-NIG-2011;Clade II)__AIT17670__GPC (opt3)
gggagaguccgcucagccagguugcagaagcggcuuagcguguguccuaaucuucucucugcguguagguaggccugugccgcaaacaagcuuaccaugggccagaucauuaccuucuuucaagaggugccccacgucauagaagagguuaugaacaucgugcugauugcccucagccuucuggcuaucuugaaggggauuuacaauguagcaacaugcggauuauucggucugguguccuuucuacuccuguguggcagaucuugcucaacuacguauaaaggggucuacgaacuucagacccuggaguuggacauggccagucucaacaugacaaugccucugagcuguacuaagaauaacucccaucacuauaucauggugggaaaugaaaccggccuggagcucacauuaaccaacacuucuauaaucaaucauaaauucugcaaccugucggaugcgcacaagaaaaaucuuuacgaccaugcuuugaugucaauuaucagcacauuucaccugaguauuccaaacuucaaucaguaugaggccauguccugugauuuuaacggugggaagaucucuguucaguacaaucuaagccacaccuaugcaguggacgccgcuaaccauugcggaacgauagcaaauggcguccuccaaacuuucaugaggauggccuggggcggguccuacauugcucuggauucaggaaaggguaguugggacuguaucaugaccagcuaccaguaucuuauuauccagaacacaacuugggaagaucacugccaguuuucucggccgucccccaucggcuaccugggguugcucucacaacgcacccgagacauuuauauaagccguagacuguuaggaacauucaccuggacgcugagugauucugagggcaacgaaacuccugguggguacugucucacaagguggaugcuuaucgaggccgagcugaaaugcuuuggaaauaccgcgguggcaaaguguaacgaaaaacaugacgaggaguucugcgauauguugcggcuauuugacuucaauaagcaggccauucgcagacugaaagcugaagcccagauguccauccagcucauaaacaaggcaguaaaugcucugauuaacgaucaacuuaucaugaagaaucaccugagggacaucaugggcauuccauauugcaacuacagcaaauauugguacuugaaucacacuguuacaggccggaccucgcucccccgcuguuggcuggugucuaacggguccuacuuaaaugaaacgcauuucucagacgauaucgagcagcaggccgacaacaugauuaccgagcugcuacaaaaggaauauauagaucgacagggaaaaacaccucucggucuggucgaccuuuuuguguucaguacuagcuuuuacuugaucuccauuuuccugcaccucgugaagaucccaacccauagacacaucauuggcaaacccugcccuaagccacauaggcugaaucacauggggauauguucuugcggacuuuauaaacacccgggcguccccguuaaguggaagcggugaggacuagucccuguucccagagcccacuuuuuuuucuuuuuuugaaauaaaauagccugucuuucagaucuaaaaaaaaaaaaaaaaaaaaaaaaaaaaaaaaaaaaaaaaaaaaaaaaaaaaaaaaaaaaaaaaugcaucccccccccccccccccccccccccccccccaaaggcucuuuucagagccaccagaauu

SEQ ID NO: 2659 - RNA, 1768 nt, Artificial Sequence
  mRNA product Design a-2 comprising derived and/or modified sequence from LASV(LASV254-NIG-2011;Clade II)__AIT17674__GPC (opt3)
gggagaguccgcucagccagguugcagaagcggcuuagcguguguccuaaucuucucucugcguguagguaggccugugccgcaaacaagcuuaccaugggccagaucauuaccuucuuucaagaggugccccacgucauagaagagguuaugaacaucgugcugauugcccucagccuucuggcuaucuugaaggggauuuacaauguagcaacaugcggauuauucggucugguguccuuucuacuccuguguggcagaucuugcucaacuacguauaaaggggucuacgaacuucagacccuggaguuggacaugacaaaccucaauaugacuaugccucugaguuguaccaagaacaauagccaucacuauaucauggugggaaacgaaacaggccuggagcucaccuuaacuaauacauccauaaucaaccauaaauucugcaaucugucugaugcccacaagaaaaaccuuuacaaucaugcguugaugucgauuaucucaaccuuucaccugagcauuccaaacuucaaucaguaugaggcuaugaguugugacuuuaacggugggaagaucuccguucaguacaaucuaucucacagcuaugccguggaugcagccaaccauugcggaacgauagcuaacggcguccuccaaacuuucaugaggauggcauggggcggguccuacauugcccuggacucaggaaaggguaauugggauuguaucaugaccaguuaccaguaucuuauuauccagaacacaacuugggaagaccacugccaguuuagccggccgucucccaucggcuaccugggguugcucucccaacgcacccgagauauuuauauaucacguagacuguuaggaacauucaccuggacgcugagcgacagugagggcaaugaaacuccugguggguacugucucacaagguggaugcuuaucgaggcugagcugaaaugcuuuggaaacaccgccguggcgaaguguaaugaaaaacaugaugaggaguucugcgacauguugcggcuauuugauuucaacaagcaggcaauucgcagacugaaaacugaagcccaggcuaauauccagcucauaaacaaggccguaaaugcacugauuaacgaccaacuuaucaugaagaaucaccugagggauaucaugggcauuccauauugcaacuacucuaaauauugguacuugaaucacacaguuaccggcaagacgucccucccccgguguuggcuggugagcaacgggucguacuuaaaugaaacccauuucucugacgacaucgagcagcaggcugauaacaugauuacagagcugcuacaaaaagaauauauggaccgccagggaaagacuccucucggucuggucgaucuuuuuguguucuccaccucauuuuacuugauaaguaucuuccugcaccucgugaaaauuccaacacaucgacacgucaucggcaagcccugcccuaaaccacauagacugaaccacauggggaucuguagcugcggacuuuauaagcacccgggcguucccgugaaguggaaaaggugaggacuagucccuguucccagagcccacuuuuuuuucuuuuuuugaaauaaaauagccugucuuucagaucuaaaaaaaaaaaaaaaaaaaaaaaaaaaaaaaaaaaaaaaaaaaaaaaaaaaaaaaaaaaaaaaaugcaucccccccccccccccccccccccccccccccaaaggcucuuuucagagccaccagaauu

SEQ ID NO: 2660 - RNA, 1768 nt, Artificial Sequence
  mRNA product Design a-2 comprising derived and/or modified sequence from LASV(Nig08-A19;Clade III)__ADU56618__GPC (opt3)
gggagaguccgcucagccagguugcagaagcggcuuagcguguguccuaaucuucucucugcguguagguaggccugugccgcaaacaagcuuaccaugggccagaucgugaccuucuuucaagaggucccccacguuauugaagaggugaugaacauaguacugaucgcccucagcauucuugcuauccugaagggguuguacaauauugcaacaugcggauuaaucggucuggugacuuuccuacuccuguccggcagaucuuguucaaugacguauaaaggggucuacgaacuucagacccuggaguugaacaugaauacacucaacaugacuaugccucugaguugcaccaagaauaacagccaucacuauauaauggugggaaaugaaacaggccuggagcucaccuuaacuaacacaucccugcuucaucacaaauuuuguaauuugucugacgcccauaagaaaaaccuguacgaucacacccuaaugucgaucauuucaacguuccaccucagcaucccaaauuuuaaccaguaugaggcgaugaguugcgacuucaauggugggaagauuacuguucaguacaaccugucccauucuuaugcuaucgaugccgcaaaucacuguggaaccguggccaacggcguccuucaaacauuuaugaggauggcuuggggcgggagcuacauagcacuggacuccggacgggguaagugggauugcauuaugacuucauaccaguauuugaucauucagaacaccacaugggaagaccauugucaguucagucgcccgagccccaucggcuaccucgggcuguuaucucaacgaacccgugauaucuauauuuccagaaggcugcucggaacguuuacuuggacacuuucagacagcgagggcaaugaaaccccugguggguacugccugacucgguggauguugauagaggccgagcuaaaauguuucggaaacacagcuguggccaagugcaaugaaaaacacgaugaggaauuuugugacaugcugcgccucuucgauuuuaacaagcaggcgaucagaaggcugaaagcagaggcccagaugaguauucagcuuaucaauaaggcuguaaacgcccugauaaaugaccaauugauuaugaagaaccaccuccgggauaucaugggcaucccauauugcaauuacucuaaauauugguaccugaaccauaccuccacgggccgcaccagcuuaccccgaugcuggcugguuucgaaugggucuuaccuaaacgaaacacacuucuccgacgacauugagcagcaggcagauaauaugaucacugagaugcuccaaaaggaauaucuggacagacagggaaaaaccccucuugguuugguggaucuguucgucuuuucaacaaguuucuaccucauuagcauauuucugcaucuugugaagaucccaacucacaggcauauugugggcaaacccuguccuaagccacaccggcugaaccacauggggaucugcuccuguggauuguauaaacagccgggcguccccguucguuggaagcgcugaggacuagucccuguucccagagcccacuuuuuuuucuuuuuuugaaauaaaauagccugucuuucagaucuaaaaaaaaaaaaaaaaaaaaaaaaaaaaaaaaaaaaaaaaaaaaaaaaaaaaaaaaaaaaaaaaugcaucccccccccccccccccccccccccccccccaaaggcucuuuucagagccaccagaauu

SEQ ID NO: 2661 - RNA, 1771 nt, Artificial Sequence
  mRNA product Design a-2 comprising derived and/or modified sequence from LASV(G1180-SLE-2010;Clade IV)__AIT17168__GPC (opt3)
gggagaguccgcucagccagguugcagaagcggcuuagcguguguccuaaucuucucucugcguguagguaggccugugccgcaaacaagcuuaccaugggccagaucgugaccuucuuucaagaggucccccacguuauugaagaggugaugaacauaguacugaucgcccucagcauucuugcugugcugaagggguuguacaauuucgcaacaugcggauuagucggucugcuaacuuuucuccugcuuuguggcagauccugcacggccucuagguauaaagggguguacgaacugcagaccuuggagcucaacauggaaacacugaauaugacuaugccucugucauguaccaagaacaauagucaucacuauaucaugguuggaaacgagacaggccucgaguuaacccugacuaauacaagcauuaucaaccauaaauucugcaaucuuuccgacgcgcacaagaaaaacuuguacgaucaugcucugaugucuauaaucucgaccuuucaccuaucaauuccaaauuucaaccaguaugaagccaugagcugugacuuuaauggugggaagaucagugugcaguacaaccucucccacucuuaugcaggagaugccgcuaaucauugcggcacggucgcaaacggcgugcugcaaacuuucaugcggauggccuggggagggagcuacauugcucuugacuccggucacggcucaugggauuguaucaugaccaguuaccaguaucugauaauucagaacacaacuugggaggaccauugccaguuuagccgcccgucucccaucggguacuugggacuccugucccaacgaacccgugauauuuauaucucaagaagguuacugggcacauucaccuggacgcucagcgacagugaagguaaggauacuccugggggauacugucuuacacgguggaugcugaucgaggccgaguugaaaugcuuuggcaauaccgcgguagcaaaguguaacgaaaaacacgacgaggaguucugcgauaugcuacgccuguuugacuucaauaagcaggccauucagagacucaaagcugaagcccagaugucuauacaacugaucaacaaggcaguuaaugcucuuauuaacgaucagcugaucaugaagaaucacuugagggacauaaugggcauuccauauugcaacuacuccaaauauugguaccucaaucauacuacaaccgggaagacgagccugcccaaauguugguuagugucgaacggaucuuaccugaaugaaacccacuucuccgacgauaucgagcagcaagccgacaacaugaucacagagaugcuacagaaggaauauauggagcggcaggguaaaacuccucucggccuggucgaucuuuuuguguucucaaccaguuuuuacuugauuagcaucuuccugcaucucgugaagauuccaacacaccgccauauagucgggaaauccugccccaagccucaccgacugaaucacaugggaaucuguucuugcggccuuuauaagcagccagguguuccggugaaauggaagagaugaggacuagucccuguucccagagcccacuuuuuuuucuuuuuuugaaauaaaauagccugucuuucagaucuaaaaaaaaaaaaaaaaaaaaaaaaaaaaaaaaaaaaaaaaaaaaaaaaaaaaaaaaaaaaaaaaugcaucccccccccccccccccccccccccccccccaaaggcucuuuucagagccaccagaauu

SEQ ID NO: 2662 - RNA, 1771 nt, Artificial Sequence
  mRNA product Design a-2 comprising derived and/or modified sequence from LASV(G1442-SLE-2011;Clade IV)__AIT17180__GPC (opt3)
gggagaguccgcucagccagguugcagaagcggcuuagcguguguccuaaucuucucucugcguguagguaggccugugccgcaaacaagcuuaccaugggccagaucgugaccuucuuucaagaggucccccacguuauugaagaggugaugaacauaguacugaucgcccucagcauucuugcugugcugaagggguuguacaaugucgcaacaugcggauuaaucggucuggugacuuuccuacuccuguguggcagauccugcacgaccacacuuuauaaagggguuuacgaacugcagacuuuggagcucaacauggaaacccugaauaugacaaugccucugucuuguaccaagaacaauucacaucacuauauuagggugggaaacgagacuggccucgaguuaacacugaccaauacgaguaucauaaaccauaaauuuugcaaucuuagcgacgcccacaagaaaaacuuguacgaucaugcgcugauguccaucauuucuacuuuccaccuaucgaucccaaauuuuaaccaguaugaagcuaugucaugugacuucaauggugggaagauuagcguccaguacaaccucagucacuccuaugccggagaugcagccaaucauugcggcaccguggcuaacggcguacugcaaacauuuaugcggauggcauggggagggucuuacaucgcccuugacagcggucgcggcaacugggauuguauaaugacuuccuaccaguaucugauuauccagaauaccacaugggacgaucacugccaguucucacgaccgagucccauuggguacuugggacuccugagccaacguaccagagacguuuauaucucuaggcgguuacugggcacguuuacuuggacacucuccgauucagaggguaaggacaccccugggggauacugucuuacucgcuggaugcugaucgaagcugaguugaaaugcuucggcaacacagccguggcgaaguguaaugagaaacaugaugaagaguuuugcgacaugcuaagacuguucgauuuuaacaagcaggcaauucagaggcucaaagccgaagcucagaugagcauacaacugaucaauaaggccgucaacgcacuuauuaaugaccagcugaucaugaagaaccacuugcgggacauaaugggcauuccauauugcaauuacaguaaauauugguaccucaacaauaccgcuacggggaagaccucucugcccaaauguugguuaaucuccaacggaagcuaccugaaugagacacacuucucggaugacaucgaacaggaggccgauaacaugauuacugagaugcuacaaaaggaauauauggagcgccaggguaaaaccccucucggccugguggaccuuuucguguuuucuacauccuucuacuugaucucaauuuuucugcaucucgucaagauaccaacucaccgacauaucguugggaaaaguugccccaagccucacagacugaaucauaugggaauuuguagcugcggccuuuauaagcagccaggugugccgguaagguggaaacggugaggacuagucccuguucccagagcccacuuuuuuuucuuuuuuugaaauaaaauagccugucuuucagaucuaaaaaaaaaaaaaaaaaaaaaaaaaaaaaaaaaaaaaaaaaaaaaaaaaaaaaaaaaaaaaaaaugcaucccccccccccccccccccccccccccccccaaaggcucuuuucagagccaccagaauu

SEQ ID NO: 2663 - RNA, 1771 nt, Artificial Sequence
  mRNA product Design a-2 comprising derived and/or modified sequence from LASV(G3010-SLE-2013;Clade IV)__AIT17344__GPC (opt3)
gggagaguccgcucagccagguugcagaagcggcuuagcguguguccuaaucuucucucugcguguagguaggccugugccgcaaacaagcuuaccaugggccagaucgugaccuucuuucaagaggucccccacguuauugaagaggugaugaacauaguacugaucgcccucagcauucuugcugugcugaagggguuguacaauuucgcaacaugcggauuagucggucuggugacuuuucuacuccuguguggcagauccugcacgaccucucuuuauaaagggguuuacgaacugcagacauuggagcucaacauggaaacucugaauaugaccaugccucugucauguacaaagaacaauagucaucacuauaucauggugggaaacgagaccggccucgaguuaacucugacaaauaccagcauuaucaaccauaaauucugcaaucuuuccgacgcccacaagaaaaacuuguacaaucaugcgcugaugucuauaaucucgacguuucaccuaucaauuccaaacuucaaucaguaugaagcuaugagcugugauuuuaacggugggaagaucaguguccaguacaaucucucccacucuuaugccggagacgcagccagccauugcggcacuguggcuaacggcguacugcaaaccuucaugaggauggcauggggaggguccuacauugcccuugauucagguuacggcaagugggacuguaucaugacaaguuaucaguaccugauaauucagaacacuaccugggaggaucacugccaguuuagccggccgucucccaucggguauuugggacuccugucccaacgcacacgagacauuuacaucucacguagauuacugggcaccuucacguggacucucagcgauagugaagguaaagacacaccugggggauauugucuuaccagguggaugcugaucgaggcugaguugaagugcuuuggcaauacugccguugcgaaauguaacgaaaagcaugaugaggaguucugcgacaugcuacggcuguuugauuucaauaaacaggcaauucagcgccucaagacagaagcccagaugucuauacaacugaucaacaaggcugugaaugcccuuauuaacgaccagcugaucaugaaaaaucacuugagagauauaaugggcauuccauacugcaacuauuccaaguacugguaccucaaucacaccacgaccgggaaaacaagccugcccaaguguugguuagucucgaacggaucuuaucugaaugaaacucauuucuccgacgacaucgagcagcaagcagauaacaugaucaccgagaugcuacagaaagaauacauggagaggcaggguaagacaccucucggccugguggaccuuuuuguguucucaaccaguuuuuauuugauuagcaucuuccugcaccucgucaaaauuccaacucaucggcacauaguugggaaguccugccccaagccucaucgccugaaucacaugggaaucuguucuugcggccuuuacaaacagccaggugugccgguacgauggaagagaugaggacuagucccuguucccagagcccacuuuuuuuucuuuuuuugaaauaaaauagccugucuuucagaucuaaaaaaaaaaaaaaaaaaaaaaaaaaaaaaaaaaaaaaaaaaaaaaaaaaaaaaaaaaaaaaaaugcaucccccccccccccccccccccccccccccccaaaggcucuuuucagagccaccagaauu

SEQ ID NO: 2664 - RNA, 1771 nt, Artificial Sequence
  mRNA product Design a-2 comprising derived and/or modified sequence from LASV(G502-SLE-2009;Clade IV)__AIT17126__GPC (opt3)
gggagaguccgcucagccagguugcagaagcggcuuagcguguguccuaaucuucucucugcguguagguaggccugugccgcaaacaagcuuaccaugggccagaucgugaccuucuuucaagaggucccccacguuauugaagaggugaugaacauaguacugaucgcccucagcauucuugcugugcugaagggguuguacaauuucgcaacaugcggauuagucggucugcuaacuuuucuccugcuuuguggcagauccugcacgaccgggcuguauaaaggaguguacgaauugcagacacucgagcugaacauggaaacucugaauaugaccaugccucucucuuguacaaagaacaauucacaucacuauaucaugguuggcaacgagaccgguuuagagcugacucuuacaaauaccaguauuaucaaccauaaauucugcaauuugagcgacgcccacaagaaaaaccuguacgaucaugcgcuaauguccauaaucucuacguuucaccucucgauuccaaauuucaaccaguaugaagcuaugucaugugacuuuaaugggggaaagaucagcgugcaguacaaccugagucacuccuaugccggcgaugcagccgaccauugcggcacugucgcuaauggggugcuucaaaccuucaugaggauggcauggggagguucuuacauugcccuggauagcggccgggggcgcugggacuguaucaugacauccuaccaguauuugauaauucagaacacuaccugggaggaucacugccaguuuucacgaccgagucccaucggauaccucggccuguuaagccaacguacaagagacauuuauaucucuaggcggcugcucgguaccuucacguggacucuuuccgauucagaagggaaggacacaccuggaggcuacugucugacccgcuggauguugaucgaggcugagcuaaaaugcuuuggcaacacugccguagcgaaguguaaugaaaaacaugaugaggaguucugcgacaugcugagacucuuugauuucaacaagcaggcaauucagaggcugaaagccgaagcucagaugagcauacaacuuaucaauaaggccguuaacgcacugauuaaugaccaguuggugaugaagaaccaccuccgggacaucauggggauaccauauugcaauuacagucgcuauugguaccugaaccacacaaccacgggacgaaccucuuuacccaaauguuggcuggucuccaaugguagcuaccuaaacgaaacacauuucucggaugacauugagcagcaagcugauaauaugaucacugagaugcuccagaaggaauauauggagagacagggcaaaaccccucuggggcuuguggacuuguuuguguucucuacauccuuuuaccugaucucaauuuuccuccaccuggucaagaucccaacucauaggcacauuguuggaaaaaguugccccaagccucaucggcuuaaccacaugggcauauguagcugcggucuguauaaacagccaggggugccgguaaaguggaagcguugaggacuagucccuguucccagagcccacuuuuuuuucuuuuuuugaaauaaaauagccugucuuucagaucuaaaaaaaaaaaaaaaaaaaaaaaaaaaaaaaaaaaaaaaaaaaaaaaaaaaaaaaaaaaaaaaaugcaucccccccccccccccccccccccccccccccaaaggcucuuuucagagccaccagaauu

SEQ ID NO: 2665 - RNA, 1771 nt, Artificial Sequence
  mRNA product Design a-2 comprising derived and/or modified sequence from LASV(G733-SLE-2010;Clade IV)__AIT17154__GPC (opt3)
gggagaguccgcucagccagguugcagaagcggcuuagcguguguccuaaucuucucucugcguguagguaggccugugccgcaaacaagcuuaccaugggccagaucgugaccuucuuucaagaggucccccacguuauugaagaggugaugaacauaguacugaucgcccucagcauucuugcugugcugaagggguuguacaauuucgcaacaugcggaaucgucgguuuaguguccuuucugcuacucuguggcagaucuugcacuacgucacuguauaaagggguuuacgaacuucagacccuggaguugaacauggaaacacucaauaugacuaugccucugaguuguaccaagaacaauagccaucacuauauuauggugggaaacgagacaggccuggagcucaccuuaacuaauacauccaucauaaaccauaaauucugcaaucugucugacgcccacaagaaaaaccuuuacgaucaugcguugaugucgaucauuucaaccuuucaccugagcaucccaaauuucaaccaguaugaagcuaugaguugugacuuuaauggugggaagauuuccguccaguacaaccuaucucacagcuaugccggagaugcagccaaucauugcggcacgaucgcuaacggcgugcuccaaacuuucaugaggauggcauggggaggguccuacauagcccuggacucaggucgggaucgcugggacuguauuaugaccaguuaccaguaucuuaucauucagaacacaacuugggaggaucacugccaguuuagccgaccgucucccaucggcuaccugggguugcucucccaacguaccagagacaucuauauuucaaggcggcuguuaggaacauucaccuggacgcugagcgauagugaaggcaaggacacuccugguggguacugucucacacgcuggaugcuuauagaggcugagcugaaaugcuuuggaaauaccgccguagcgaaguguaacgaaaaacaugaugaggaguucugcgacauguugagacuauuugauuucaauaagcaggcaauccagaggcugaaagccgaagcucagaugucuauucaacucaucaacaaggccguuaaugcacugauaaacgaccagcuuauuaugaagaaucaucugcgggacaucaugggcaucccauauugcaacuacuccaaauauugguacuugaaucacacuacaaccggcaagacgagccuccccaaauguuggcuggugucgaacgggucuuacuuaaaugaaacccacuucuccgaugacauugagcagcaagcugauaacaugaucacagagaugcugcagaaggaauauauggagcgccagggaaaaacuccucuaggucucgucgaccuguuuguguucucaaccaguuuuuaccuuauuagcauauucuugcaccuggugaagaucccaacacaucgacacgucguuggcaaauccugccccaagccucauagacucaaucacauggggauuuguucuugcggacuguauggccagccaggugugccgguaaaguggaaaaggugaggacuagucccuguucccagagcccacuuuuuuuucuuuuuuugaaauaaaauagccugucuuucagaucuaaaaaaaaaaaaaaaaaaaaaaaaaaaaaaaaaaaaaaaaaaaaaaaaaaaaaaaaaaaaaaaaugcaucccccccccccccccccccccccccccccccaaaggcucuuuucagagccaccagaauu

SEQ ID NO: 2666 - RNA, 1771 nt, Artificial Sequence
  mRNA product Design a-2 comprising derived and/or modified sequence from MOPV/LASV reassortant(IGS-1;Clade IV)__AFY05576__GPC (opt3)
gggagaguccgcucagccagguugcagaagcggcuuagcguguguccuaaucuucucucugcguguagguaggccugugccgcaaacaagcuuaccaugggccagaucgugaccuucuuucaagaggucccccacguuauugaagaggugaugaacauaguacugaucgcccucagcgugcuugcuguccugaagggguuguacaauuucgcaacaugcggauuagugggucugguuacuuuucuacuccuguguggcagauccugcacgaccucucuuuauaaagggguguacgaacugcagacauuggagcucaacauggaaacucugaauaugaccaugccucugucauguacaaagaacaauagucaucacuauauuauggucggaaacgagaccggccucgaguuaacucugacaaauaccagcaucauuaaccauaaauucugcaaucuuuccgacgcccacaagaaaaacuuguacgaucaugcgcugaugucuaucauaucgacguuucaccuaucaaucccaaauuucaaccaguaugaagcuaugagcugugacuuuaauggugggaagauuagugugcaguacaaccucucccacucuuaugccggagaugcagccaaucauugcggcacuguagcuaacggcguucugcaaaccuucaugaggauggcauggggagggagcuacaucgcccuugacuccggucggggcaacugggauuguauuaugacaucauaccaguaucugaucauacagaauacuaccugggaggaccacugccaguuuagucgcccgagccccauuggguacuugggacuccugucucaacgaacacgugauaucuauauuuccagaagguuacugggcaccuucacguggacucucucagacagcgaaggugaggauacaccugggggauacugucuuacccgguggaugcugaucgaggcugaauugaagugcuuuggcaacacugccguggcgaaauguaaugagaagcaugacgaagaguucugcgauaugcuacgccuguuugacuucaacaaacaggcaauccagagacucaaggccgaagcucagaugaguauucaacugauaaauaaagccgucaacgcacuuaucaaugaucagcugauuaugaagaaccacuugagggacaucaugggcauaccauauugcaauuacucuaaguauugguaccucaaccacacaaccacggggcggaccucccugcccaaauguugguuagugagcaauggaucguaccugaacgagacacauuucucugacgauauugagcagcaagcugacaauaugaucacugaaaugcuacagaaggaguauauggaacgccaggguaaaaccccucucggccugguggaucuuuuugucuucuccacaucauuuuacuugaucaguauuuuccugcaccucguuaagaucccaacucaucgacacauuguggggaaaagcugccccaagccucauagacugaaccacaugggaauauguuccugcggccuuuauaaacagccagguguaccggugaaguggaagaggugaggacuagucccuguucccagagcccacuuuuuuuucuuuuuuugaaauaaaauagccugucuuucagaucuaaaaaaaaaaaaaaaaaaaaaaaaaaaaaaaaaaaaaaaaaaaaaaaaaaaaaaaaaaaaaaaaugcaucccccccccccccccccccccccccccccccaaaggcucuuuucagagccaccagaauu

SEQ ID NO: 2667 - RNA, 1771 nt, Artificial Sequence
  mRNA product Design a-2 comprising derived and/or modified sequence from LASV(LM765-SLE-2012;Clade IV)__AIT17814__GPC (opt3)
gggagaguccgcucagccagguugcagaagcggcuuagcguguguccuaaucuucucucugcguguagguaggccugugccgcaaacaagcuuaccaugggccagaucgugaccuucuuucaagaggucccccacguuauugaagaggugaugaacauaguacugaucgcccucagcauucuugcugugcugaagggguuguacaauuucgcaacaugcggauuagucggucuggugacuuuucuacuccuguguggcagauccugcacgaccucucuuuauaaagggguuuacgaacugcagacauuggagcucaacauggaaacucugaauaugaccaugccucugucauguacaaagaacaauagucaucacuauaucauggugggaaacgagaccggccucgaguuaacucugacaaauaccagcauuaucgaccauaaauucugcaaccuuuccgaugcccacaggaagaauuuguacgaccaugcgcugaugucuauaaucucgacguuucaccuaucaauuccaaacuucaaucaguaugaagcuaugagcugugauuuuaacggugggaaaaucaguguccaguacaaucucucccacucuuaugccaaggacgcagccgaucauugcggaacuguggcuaacggcguacugcaaaccuucaugcggauggcauggggcgggagcuacauugcccuugacuccggacgcggucgaugggauuguaucaugacaucauaccaguaucugauaauucagaauacuaccugggaggaccacugccaguuuagucguccgagccccaucggcuacuuggggcuccugucucaaagaacaagggauauuuauaucucccggcgcuuacugggaaccuucacguggacucucucagacagcgaaggcaaggauacaccugguggguacugucuuaccagauggaugcugaucgaggcugaguugaaaugcuuuggaaacacugccguugcgaaguguaacgaaaaacaugacgaggaguucugcgauaugcuaaggcuguuugacuucaauaagcaggcaauucagcggcucaaagccgaagcucagaugaguauacaacugaucaacaaggccgugaaugcacuuauuaacgaccagcugaucaugaagaaucacuugcgcgauauaaugggcauuccauauugcaacuacucuaaauauugguaccucaaucacacaaccacgggcaagaccucccugcccaaauguugguuagucagcaacgggucguaccugaaugaaacacauuucucugacgauaucgagcagcaagcugacaacaugaucacugagaugcuacagaaggaauauauggagcgacagggaaaaaccccucucggucugguggaucuuuuuguguucuccacaucauuuuacuugauuaguaucuuccugcaccucgucaagauuccaacucauagacacauaguuggcaaacccugcccuaagccacauaggcugaaucacauggggaucuguagcugcggacuuuauaagcagccgggcgugcccguaaaauggaagcggugaggacuagucccuguucccagagcccacuuuuuuuucuuuuuuugaaauaaaauagccugucuuucagaucuaaaaaaaaaaaaaaaaaaaaaaaaaaaaaaaaaaaaaaaaaaaaaaaaaaaaaaaaaaaaaaaaugcaucccccccccccccccccccccccccccccccaaaggcucuuuucagagccaccagaauu

SEQ ID NO: 2668 - RNA, 1771 nt, Artificial Sequence
  mRNA product Design a-2 comprising derived and/or modified sequence from LASV(LM776-SLE-2012;Clade IV)__AIT17824__GPC (opt3)
gggagaguccgcucagccagguugcagaagcggcuuagcguguguccuaaucuucucucugcguguagguaggccugugccgcaaacaagcuuaccaugggccagaucgugaccuucuuucaagaggucccccacguuauugaagaggugaugaacauaguacugaucgcccucagcauucuugcugugcugaagggguuguacaauuucgcaacaugcggauuagucggucuggugacuuuucuacuccuguguggcagauccugcacgaccucuguuuauaaagggguguacgaacuucagacacuggaguugaacauggaaacucucaauaugaccaugccucugucauguacaaagaacaauagucaucacuauaucauggucggaaacgagaccggccuggagcucacuuuaacaaauaccagcauuaucaaccauaaauucugcaaucuguccgacgcccacaagaaaaaccuuuacgaucaugcguugaugucuauaaucucgacguuucaccugucaauuccaaauuucaaccaguaugaagcuaugagcugugacuuuaauggugggaagaucagugugcaguacaaccuaucccacucuuaugccggagaugcagccaaucauugcggcacuguagcuaacggcguucuccaaaccuucaugaggauggcauggggagggagcuacauugcccuggacuccggucacggcaagugggauuguaucaugacaucauaccaguaucuuauaauucagaacacuaccugggaggaccauugccaguuuagucggccgagccccaucggguaccugggauugcucucucaacgcacacgagauauuuauaucucccguagacuguuaggcaccuucacguggacucugucagacagcgaagguaaagauacaccugggggauacugucucaccagguggaugcuuaucgaggcugagcugaagugcuuuggcaauacugccguggcgaaauguaacgaaaagcacgacgaggaguucugcgauauguugcggcuauuugacuucaauaaacaggcaauucagcgccugaaggccgaagcucagaugaguauacaacucaucaacaaggccgucaaugcacugauuaacgaucagcuuaucaugaaaaaucaccugagagacauaaugggcauuccauauugcaacuacucuaaguauugguacuugaaucauacaaccacggggaaaaccucccuccccaaguguuggcuggugagcaacggaucguacuuaaaugaaacacacuucucugacgauaucgagcagcaagcugacaacaugaucacugagaugcugcagaaagaauauauggagaggcaggguaagaccccucuaggccucguggaucuguuugucuucuccacaucauuuuaccuuauuaguaucuucuugcaucugguuaaaauuccaacucaccggcauauagugggaaagagcugccccaagccucaccgccucaaucacauggggaucuguuccugcggccuguauaaacagccagguguaccggugcgauggaagagaugaggacuagucccuguucccagagcccacuuuuuuuucuuuuuuugaaauaaaauagccugucuuucagaucuaaaaaaaaaaaaaaaaaaaaaaaaaaaaaaaaaaaaaaaaaaaaaaaaaaaaaaaaaaaaaaaaugcaucccccccccccccccccccccccccccccccaaaggcucuuuucagagccaccagaauu

SEQ ID NO: 2669 - RNA, 1771 nt, Artificial Sequence
  mRNA product Design a-2 comprising derived and/or modified sequence from LASV(Mad39;Clade IV)__ANH09722__GPC (opt3)
gggagaguccgcucagccagguugcagaagcggcuuagcguguguccuaaucuucucucugcguguagguaggccugugccgcaaacaagcuuaccaugggccagaucgugaccuucuuucaagaggucccccacguuauugaagaggugaugaacauaguacugaucgcccucagcauucuugcugugcugaagggguuguacaaugucgcaacaugcggauuaaucggucuggugacuuuccuacuccuguguggcagauccugcacgaccacacuuuauaaagggguuuacgaacugcaggccuuggagcucaacauggaaacucugaauaugaccaugccucugucuuguacaaagaacaauucacaucacuauauuagggugggaaacgagaccggccucgaguuaacucugacaaauaccagucuuaucaaccauaaauuuugcaauuugagcgacgcgcacaagaaaaaccuguacgaucaugcucuaauguccauaaucucuacguuccaccucucgauuccaaauuuuaaccaguaugaagccaugucaugugacuucaaugaugguaagaucagcguccaguacaaccugagucacacuuaugcaggggacaccgccaaucauugcggaacaguggcuaacggcguacuucaaacuuuuaugcggauggcauggggcggguccuacauugcccuggauucuggacgcgguggcugggacuguaucaugaccagcuaccaguauuugauaauucagaacacaaccugggaggaucacugccaguucucccgaccgucacccaucggguaccucggacuguuaagucaacguacgagagacauuuauaucagcaggcggcugcucggcacuuuuacauggacccuuucugauuccgaagguaaggacacuccugggggauacugucugacacgcuggauguugaucgaggcugagcuaaaaugcuucggcaauaccgccguugcgaaguguaacgaaaaacaugaugaggaauuuugcgacaugcugagacucuucgauuuuaauaagcaggcaauucagaggcugaaagccgaggcucagaugucaauacaacuuaucaacaaggccgugaaugcacugauuaacgaccaguugaucaugaagaaucaccuccgggacauaaugggcauuccauauugcaacuacagcaaauauugguaccugaaucacacggucaccgggaagacaaguuuacccaaauguuggcuggugucuaacggauccuaccuaaaugaaacucauuucagcgaugacaucgagcagcaagcugauaacaugaucaccgagaugcuccagaaggaauauauggagcgccaggguaaaacaccucugggccuuguggacuuguucgucuuuucgacuucuuucuaccugauuuccaucuuucuccaccugguuaagauuccaacccaucgacacgugguagggaaacccugcccuaagccacauagacuuaaucacaugggaauauguucaugcggcuucuauaagcagccgggugugcccgucagguggaaacggugaggacuagucccuguucccagagcccacuuuuuuuucuuuuuuugaaauaaaauagccugucuuucagaucuaaaaaaaaaaaaaaaaaaaaaaaaaaaaaaaaaaaaaaaaaaaaaaaaaaaaaaaaaaaaaaaaugcaucccccccccccccccccccccccccccccccaaaggcucuuuucagagccaccagaauu

SEQ ID NO: 2670 - RNA, 1771 nt, Artificial Sequence
  mRNA product Design a-2 comprising derived and/or modified sequence from LASV(Z0947-SLE-2011;Clade IV)__AIT17840__GPC (opt3)
gggagaguccgcucagccagguugcagaagcggcuuagcguguguccuaaucuucucucugcguguagguaggccugugccgcaaacaagcuuaccaugggccagaucgugaccuucuuucaagaggucccccacguuauugaagaggugaugaacauaguacugaucgcccucagcauucuugcugugcugaagggguuguacaauuucgcaacaugcggauuagucggucuggugacuuuucuacuccuguguggcagauccugcacgaucucucuuuauaaagggguuuacgaacugcagaccuuggagcucaacauggaaacacugaauaugacuaugccucugucauguaccaagaacaauagucaucacuauauuauggugggaaacgagacaggccucgaguuaacccugacuaauacaagcaucauaaaccauaaauucugcaaucuuuccgacgcccacaagaaaaacuuguacgaucaugcgcugaugucuaucauuucgaccuuucaccuaucaaucccaaauuucaaccaguaugaagcuaugagcugugacuuuaauggugggaagauuaguguccaguacaaccucucccacucuuaugccggagaugcagccaaucauugcggcacgguggcuaacggcguacugcaaacuuucaugaggauggcauggggagggagcuacaucgcccuugacuccggucgggaucgcugggacuguauaaugaccucauaccaguaucugauuauccagaacacaacuugggaggaucacugccaguuuagucgaccgagccccauuggcuacuuggggcuccugucucaacguaccagagacaucuauaucuccaggcgguuacugggaacauucaccuggacgcucucagauagcgaaggcaaggacacuccugguggguacugucuuacacgcuggaugcugauugaggcugaguugaaaugcuuuggaaauaccgccguugcgaaguguaacgaaaaacaugaugaggaguucugcgacaugcuaagacuguuugauuucaauaagcaggcaauacagaggcucaaagccgaagcucagaugaguauccaacugauuaacaaggccgugaaugcacuuaucaacgaccagcugauaaugaagaaucacuugcgggacauuaugggcaucccauauugcaacuacucuaaauauugguaccucaaucacacuacaaccggcaagacgucccugcccaaauguugguuagucagcaacgggucguaccugaaugaaacccauuucucugaugacaucgagcagcaagcugauaacaugauuacagagaugcuacagaaggaauauauggagcgccagggaaaaacuccucucggucugguggaccuuuuuguguucuccaccucauuuuacuugaucaguauuuuccugcaccucgucaagauaccaacacaucgacacaucguuggcaaacccugcccuaagccacauagacugaaucacauggggauuuguagcugcggacuuuauaagcagccgggcgugcccguaaaauggaagaggugaggacuagucccuguucccagagcccacuuuuuuuucuuuuuuugaaauaaaauagccugucuuucagaucuaaaaaaaaaaaaaaaaaaaaaaaaaaaaaaaaaaaaaaaaaaaaaaaaaaaaaaaaaaaaaaaaugcaucccccccccccccccccccccccccccccccaaaggcucuuuucagagccaccagaauu

SEQ ID NO: 2671 - RNA, 1771 nt, Artificial Sequence
  mRNA product Design a-2 comprising derived and/or modified sequence from LASV(Josiah;Clade IV)__NP_694870__GPC (opt4)
gggagaguccgcucagccagguugcagaagcggcuuagcguguguccuaaucuucucucugcguguagguaggccugugccgcaaacaagcuuaccaugggccagaucgugaccuucuuccaggaggugccccacgugaucgaggaggugaugaacaucgugcugaucgcccugagcgugcuggccgugcugaagggccuguacaacuucgccaccugcggccuggugggccuggugaccuuccugcugcugugcggcagaagcugcaccaccagccuguacaagggcguguacgagcugcagacccuggagcugaacauggagacccugaacaugaccaugccccugagcugcaccaagaacaacagccaccacuacaucauggugggcaacgagaccggccuggagcugacccugaccaacaccagcaucaucaaccacaaguucugcaaccugagcgacgcccacaagaagaaccuguacgaccacgcccugaugagcaucaucagcaccuuccaccugagcauccccaacuucaaccaguacgaggccaugagcugcgacuucaacggcggcaagaucagcgugcaguacaaccugagccacagcuacgccggcgacgccgccaaccacugcggcaccguggccaacggcgugcugcagaccuucaugagaauggccuggggcggcagcuacaucgcccuggacagcggcagaggcaacugggacugcaucaugaccagcuaccaguaccugaucauccagaacaccaccugggaggaccacugccaguucagcagacccagccccaucggcuaccugggccugcugagccagagaaccagagacaucuacaucagcagaagacugcugggcaccuucaccuggacccugagcgacagcgagggcaaggacacccccggcggcuacugccugaccagauggaugcugaucgaggccgagcugaagugcuucggcaacaccgccguggccaagugcaacgagaagcacgacgaggaguucugcgacaugcugagacuguucgacuucaacaagcaggccauccagagacugaaggccgaggcccagaugagcauccagcugaucaacaaggccgugaacgcccugaucaacgaccagcugaucaugaagaaccaccugagagacaucaugggcauccccuacugcaacuacagcaaguacugguaccugaaccacaccaccaccggcagaaccagccugcccaagugcuggcuggugagcaacggcagcuaccugaacgagacccacuucagcgacgacaucgagcagcaggccgacaacaugaucaccgagaugcugcagaaggaguacauggagagacagggcaagaccccccugggccugguggaccuguucguguucagcaccagcuucuaccugaucagcaucuuccugcaccuggugaagauccccacccacagacacaucgugggcaagagcugccccaagccccacagacugaaccacaugggcaucugcagcugcggccuguacaagcagcccggcgugcccgugaaguggaagagaugaggacuagucccuguucccagagcccacuuuuuuuucuuuuuuugaaauaaaauagccugucuuucagaucuaaaaaaaaaaaaaaaaaaaaaaaaaaaaaaaaaaaaaaaaaaaaaaaaaaaaaaaaaaaaaaaaugcaucccccccccccccccccccccccccccccccaaaggcucuuuucagagccaccagaauu

SEQ ID NO: 2672 - RNA, 1768 nt, Artificial Sequence
  mRNA product Design a-2 comprising derived and/or modified sequence from LASV(LP;Clade I)__AAF86701__GPC (opt4)
gggagaguccgcucagccagguugcagaagcggcuuagcguguguccuaaucuucucucugcguguagguaggccugugccgcaaacaagcuuaccaugggccagaucaucaccuucuuccaggaggugccccacgugaucgaggaggugaugaacaucgugcugaucgcccugagccugcuggccauccugaagggccuguacaacaucgccaccugcggcaucaucggccugguggccuuccuguuccugugcggcaagagcugcagccugacccugaagggcggcuacgagcugcagacccuggagcugaacauggagacccugaacaugaccaugccccugagcugcaccaagaacagcagccaccacuacaucagagugggcaacgagaccggccuggagcugacccugaccaacaccagcaucaucaaccacaaguucugcaaccugagcgacgcccacaagaagaaccuguacgaccacgcccugaugagcaucaucagcaccuuccaccugagcauccccaacuucaaccaguacgaggccaugagcugcgacuucaacggcggcaagaucagcgugcaguacaaccugagccacagcuacgccggcgacgccgccgagcacugcggcaccguggccaacggcgugcugcagaccuucaugagaauggccuggggcggcagauacaucgcccuggacagcggcaagggcaacugggacugcaucaugaccagcuaccaguaccugaucauccagaacaccaccugggaggaccacugccaguucagcagacccagccccaucggcuaccugggccugcugagccagagaaccagagacaucuacaucagcagaagacugcugggcaccuucaccuggacccugagcgacagcgagggcaacgagacccccggcggcuacugccugaccagauggaugcugaucgaggccgagcugaagugcuucggcaacaccgccguggccaagugcaacgagaagcacgacgaggaguucugcgacaugcugagacuguucgacuucaacaagcaggccaucagaagacugaaggccgaggcccagaugagcauccagcugaucaacaaggccgugaacgcccugaucaacgaccagcugaucaugaagaaccaccugagagacaucaugggcauccccuacugcaacuacagcaaguacugguaccugaaccacaccagcagcggcagaaccagccugcccaagugcuggcugaucagcaacggcagcuaccugaacgagacccaguucagcgacgacaucgagcagcaggccgacaacaugaucaccgagaugcugcagaaggaguacaucgagagacagggcaagaccccccugggccugguggacaucuucaucuucagcaccagcuucuaccugaucagcaucuuccugcaccugaucaagauccccacccacagacacaucgugggcaagcccugccccaagccccacagacugaaccacaugggcgugugcagcugcggccuguacaagcaccccggcgugcccaccaaguggaagagaugaggacuagucccuguucccagagcccacuuuuuuuucuuuuuuugaaauaaaauagccugucuuucagaucuaaaaaaaaaaaaaaaaaaaaaaaaaaaaaaaaaaaaaaaaaaaaaaaaaaaaaaaaaaaaaaaaugcaucccccccccccccccccccccccccccccccaaaggcucuuuucagagccaccagaauu

SEQ ID NO: 2673 - RNA, 1768 nt, Artificial Sequence
  mRNA product Design a-2 comprising derived and/or modified sequence from LASV(803213;Clade II)__AAF86703__GPC (opt4)
gggagaguccgcucagccagguugcagaagcggcuuagcguguguccuaaucuucucucugcguguagguaggccugugccgcaaacaagcuuaccaugggccagaucaucaccuucuuccaggaggugccccacgugaucgaggaggugaugaacaucgugcugaucgcccugagccugcuggccauccugaagggcaucuacaacguggccaccugcggccuguucggccugaucagcuuccugcugcugugcggcagaagcugcagcgugaccuacaagggcguguacgagcugcagacccuggagcugaacauggccaaccugaacaugaccaugccccugagcugcaccaagaacaacagccaccacuacaucauggugggcaacgagaccggccuggagcugacccugaccaacaccagcaucaucaaccacaaguucugcaaccugagcgacgcccacaagaagaaccuguacgaccacgcccugaugagcaucaucagcaccuuccaccugagcauccccaacuucaaccaguacgaggccaugagcugcgacuucaacggcggcaagaucagcgugcaguacaaccugagccacagcuucgccguggacgccgccaaccacugcggcaccaucgccaacggcgugcugcagaccuucaugagaauggccuggggcggcagcuacaucgcccuggacagcggcaagggcaacugggacugcaucaugaccagcuaccaguaccugaucauccagaacaccaccugggaggaccacugccaguucagcagacccagccccaucggcuaccugggccugcugagccagagaaccagagacaucuacaucagcagaagacugcugggcaccuucaccuggacccugagcgacagcgagggcaacgaggcccccggcggcuacugccugaccagauggaugcugaucgaggccgagcugaagugcuucggcaacaccgccguggccaagugcaacgagaagcacgacgaggaguucugcgacaugcugagacuguucgacuucaacaagcaggccaucaagagacugaagaccgaggcccagaugagcauccagcugaucaacaaggccgugaacgcccugaucaacgaccagcugaucaugaagaaccaccugagagacaucaugggcauccccuacugcaacuacagcagauacugguaccugaaccacaccgugaccggcaagaccagccugcccagaugcuggcuggugagcaacggcagcuaccugaacgagacccacuucagcgacgacaucgagcagcaggccgacaacaugaucaccgagaugcugcagaaggaguacauggacagacagggcaagaccccccugggccugguggaccuguucguguucagcaccagcuucuaccugaucagcaucuuccugcaccuggugaagauccccacccacagacacaucgugggcaagcccugccccaagccccacagacugaaccacaugggcaucugcagcugcggccuguacaagcaccccggcgugcccgugaaguggaagagaugaggacuagucccuguucccagagcccacuuuuuuuucuuuuuuugaaauaaaauagccugucuuucagaucuaaaaaaaaaaaaaaaaaaaaaaaaaaaaaaaaaaaaaaaaaaaaaaaaaaaaaaaaaaaaaaaaugcaucccccccccccccccccccccccccccccccaaaggcucuuuucagagccaccagaauu

SEQ ID NO: 2674 - RNA, 1768 nt, Artificial Sequence
  mRNA product Design a-2 comprising derived and/or modified sequence from LASV(GA391;Clade III)__CAA36645__GPC (opt4)
gggagaguccgcucagccagguugcagaagcggcuuagcguguguccuaaucuucucucugcguguagguaggccugugccgcaaacaagcuuaccaugggccagaucgugaccuucuuccaggaggugccccacgugaucgaggaggugaugaacaucgugcugaucgcccugagcauccuggccauccugaagggccuguacaacguggccaccugcggccugaucggccuggugaccuuccugcugcugagcggcagaagcugcagccugaucuacaagggcaccuacgagcugcagacccuggagcugaacauggagacccugaacaugaccaugccccugagcugcaccaagaacaacagccaccacuacaucagagugggcaacgagaccggccuggagcugacccugaccaacaccagcauccugaaccacaaguucugcaaccugagcgacgcccacaagagaaaccuguacgaccacagccugaugagcaucaucagcaccuuccaccugagcauccccaacuucaaccaguacgaggccaugagcugcgacuucaacggcggcaagaucaccgugcaguacaaccugagccacagcuucgccguggacgccgccggccacugcggcacccuggccaacggcgugcugcagaccuucaugagaauggccuggggcggcagcuacaucgcccuggacagcggcagaggcaacugggacugcaucaugaccagcuaccaguaccugaucauccagaacaccaccugggacgaccacugccaguucagcagacccagccccaucggcuaccugggccugcugagccagagaaccagagacaucuacaucagcagaagacugcugggcaccuucaccuggacccugagcgacagcgagggcaacgagacccccggcggcuacugccugaccagauggaugcugaucgaggccgagcugaagugcuucggcaacaccgccguggccaagugcaacgagaagcacgacgaggaguucugcgacaugcugagacuguucgacuucaacaagcaggccaucagaagacugaagaccgaggcccagaugagcauccagcugaucaacaaggccgugaacgcccugaucaacgaccagcugaucaugaagaaccaccugagagacaucaugggcauccccuacugcaacuacagcagauacugguaccugaaccacaccagcaccggcaagaccagccugcccagaugcuggcugaucagcaacggcagcuaccugaacgagaccaaguucagcgacgacaucgagcagcaggccgacaacaugaucaccgagaugcugcagaaggaguacaucgacagacagggcaagaccccccugggccugguggaccuguucguguucagcaccagcuucuaccugaucagcaucuuccugcaccuggugaagauccccacccacagacacaucgugggcaagcccugccccaagccccacagacugaaccacaugggcaucugcagcugcggccuguacaagcagcccggcgugcccgugagauggaagagaugaggacuagucccuguucccagagcccacuuuuuuuucuuuuuuugaaauaaaauagccugucuuucagaucuaaaaaaaaaaaaaaaaaaaaaaaaaaaaaaaaaaaaaaaaaaaaaaaaaaaaaaaaaaaaaaaaugcaucccccccccccccccccccccccccccccccaaaggcucuuuucagagccaccagaauu

SEQ ID NO: 2675 - RNA, 1771 nt, Artificial Sequence
  mRNA product Design a-2 comprising derived and/or modified sequence from LASV(AV;Clade V)__CCA30314__GPC (opt4)
gggagaguccgcucagccagguugcagaagcggcuuagcguguguccuaaucuucucucugcguguagguaggccugugccgcaaacaagcuuaccaugggccagaucgugaccuucuuccaggaggugccccacgugaucgaggaggugaugaacaucgugcugaucgcccugagcauccuggccgugcugaagggccuguacaacaucgccaccugcggccugaucggccugaucaccuuccugcugcugugcggcagaagcugcagcagcaaccuguacaagggcguguacgagcugcagagccuggaccugaacauggagacccugaacaugaccaugccccugagcugcaccaagaacaacagccaccacuacaucagagugggcaacgacaccggccuggagcugacccugaccaacaccagcauccugaaccacaaguucugcaaccugagcgacgcccacaagaaggaccuguacgaccacgcccugaugagcaucaucagcaccuuccaccugagcauccccaacuucaaccaguacgaggccaugagcugcgacuucaacggcggcaagaucagcgugcaguacaaccugagccacagcuacgccaucgacgccgccaaccacugcggcaccguggccaacggcauccugcagaccuucaugagaauggccuggggcggcagcuacaucgcccuggacagcggcagaggcaacugggacugcaucaugaccagcuaccaguaccugaucauccagaacaccaccugggagaaccacugccaguucagcagacccagccccaucggcuaccugggccugcugagccagagaaccagagacaucuacaucagcagaagacugcugggcaccuucaccuggacccugagcgacagcgagggcaacgccacccccggcggcuacugccugaccagauggaugcugaucgaggccgagcugaagugcuucggcaacaccgccguggccaagugcaacgagaagcacgacgaggaguucugcgacaugcugagacuguucgacuucaacaagcaggccaucagcagacugaagagcgaggcccagaugagcauccagcugaucaacaaggccgugaacgcccugaucaacgaccagcugaucaugaagaaccaccugagagacaucaugggcauccccuacugcaacuacagcaaguacugguaccugaaccacaccaucaccggcaagaccagccugcccaagugcuggcuggugagcaacggcagcuaccugaacgagacccacuucagcgacgacaucgagcagcaggccgacaacaugaucaccgagaugcugcagaaggaguacauggagagacagggcaagaccccccugggccugguggaccuguucguguucagcaccagcuucuaccugaucagcaucuuccugagacuggugaagauccccacccacagacacaucgugggcaagcccugccccaagccccacagacugaaccacaugggcaucugcagcugcggccuguacaagcagcccggcgugcccgugagauggaagagaugaggacuagucccuguucccagagcccacuuuuuuuucuuuuuuugaaauaaaauagccugucuuucagaucuaaaaaaaaaaaaaaaaaaaaaaaaaaaaaaaaaaaaaaaaaaaaaaaaaaaaaaaaaaaaaaaaugcaucccccccccccccccccccccccccccccccaaaggcucuuuucagagccaccagaauu

SEQ ID NO: 2676 - RNA, 1768 nt, Artificial Sequence
  mRNA product Design a-2 comprising derived and/or modified sequence from LASV(Togo/2016/7082;Clade VI)__AMR44577__GPC (opt4)
gggagaguccgcucagccagguugcagaagcggcuuagcguguguccuaaucuucucucugcguguagguaggccugugccgcaaacaagcuuaccaugggccagaucaucaccuucuuccaggaggugccccacgugaucgaggaggugaugaacaucgugcugaucgcccugagccugcuggccauccugaagggcguguacaacguggccaccugcggcaucaucggccuggugaccuuccuguuccugugcggcagaagcugcagccugaucuacaagggcagcuacgagcugcagacccuggagcugaacauggagacccugaacaugaccaugccccugagcugcaccaagaacagcagccaccacuacaucagagugggcaacgagaccggccuggagcugacccugaccaacaccagcaucaucaaccacaaguucugcaaccugagcgacgcccacaagagaaaccuguacgaccacgcccugaugagcauccugagcaccuuccaccugagcauccccaacuucaaccaguacgaggccaugagcugcgacuucaacggcggcaagaucagcgugcaguacaaccugagccacgccuacgccguggacgccgccgagcacugcggcaccguggccaacggcgugcugcagaccuucaugagaauggccuggggcggcagcuacaucgcccuggacagcggcagaggcaacugggacugcaucaugaccagcuaccaguaccugaucauccagaacaccaccugggaggaccacugccaguucagcagacccagccccaucggcuaccugggccugcugagccagagaaccagagacaucuacaucagcagaagacugcugggcaccuucaccuggacccugagcgacagcgagggcaacgagacccccggcggcuacugccugaccagauggaugcugaucgaggccgagcugaagugcuucggcaacaccgccguggccaagugcaacgagaagcacgacgaggaguucugcgacaugcugagacuguucgacuucaacaagcaggccauccagagacugaagagcgaggcccagaugagcauccagcugaucaacaaggccgugaacgcccugaucaacgaccagcugaucaugaagaaccaccugagagacaugaugggcauccccuacugcaacuacagcaaguacugguaccugaaccacaccagcagcggcagaaccagccugcccaagugcuggcuggugagcaacggcagcuaccugaacgagacccacuucagcgacgacaucgagcagcaggccgacaacaugaucaccgagaugcugcagaaggaguacaucgacagacagggcaagaccccccugggccugguggaccuguucguguucagcaccagcuucuaccugaucagcaucuuccugcaccugaucaagauccccacccacagacacaucgugggcaagcccugccccaagccccacagacugaaccacaugggcaucugcagcugcggccuguacaagcagcccggcgugcccaccagauggaagagaugaggacuagucccuguucccagagcccacuuuuuuuucuuuuuuugaaauaaaauagccugucuuucagaucuaaaaaaaaaaaaaaaaaaaaaaaaaaaaaaaaaaaaaaaaaaaaaaaaaaaaaaaaaaaaaaaaugcaucccccccccccccccccccccccccccccccaaaggcucuuuucagagccaccagaauu

SEQ ID NO: 2677 - RNA, 1768 nt, Artificial Sequence
  mRNA product Design a-2 comprising derived and/or modified sequence from LASV(KAK-428;Clade n.d. (VII))__ANH09740__GPC (opt4)
gggagaguccgcucagccagguugcagaagcggcuuagcguguguccuaaucuucucucugcguguagguaggccugugccgcaaacaagcuuaccaugggccagaucgugaccuucuuccaggaggugccccacgugaucgaggaggugaugaacaucgugcugaucgcccugagccugcuggccauccugaagggccuguacaacuucgccaccugcggcgugaucggccugaucaccuuccugcugcugugcggcagaagcugcagcgccaccuacaagggccaguacgagcugcagacccuggagcugaacauggagagccugaacaugaccaugccccugagcugcaccaagaacaacagccaccacuacaucagagccggcaacaacaccggccuggagcugacccugaccaacaccagcaucaucagccacaaguucugcaaccugagcgacgcccacaagaagaaccuguacgaccacacccugaugagcaucaucaccaccuuccaccugagcauccccaacuucaaccaguacgaggccaugagcugcgacuucaacggcggcaagaucagcauccaguacaaccugagccacagcuacgccggcgacgccgcccagcacugcggcaccguggccaacggcgugcugcagaccuucaugagaauggccuggggcggcagcuaccuggcccuggacagcggcagaagaggcugggacugcaucaucagcagcuaccaguaccugaucauccagaacaccaccugggacgaccacugccaguucagcagacccagccccaucggcuaccugggcuucgugagccagaagaccagagacaucuacaucagcagaagacugcugggcaccuucaccuggacccugagcgacagcgagggccacgacaugcccggcggcuacugccugaccagauggaugcugaucgaggccgaccugaagugcuucggcaacaccgccguggccaagugcaacgagaagcacgacgaggaguucugcgacauguggagacuguucgacuucaacaagcaggccauccagagacugaaggccgaggcccagaugaacauccagcugaucaacaaggccgugaacgcccugaucaacgaccagcugaugaugaagaaccaccugagagacaucaugggcauccccuacugcaacuacagcaaguucugguaccugaacaacaccaccaccggcagaaccagccugcccagaugcuggcugaucagcaacggcagcuaccugaacgagacccacuucagcgacgacaucgagcagcaggccgacaacaugaucaccgagaugcugcagaaggaguacauggacagacagggcaagaccccccugggccugguggaccuguucguguucagcaccagcuucuaccugaucaccaucuuccugcaccuggugaagauccccacccacagacacaucgugggcaagcccugccccaagccccacagacugaaccacaugggcaucugcagcugcggccuguacaagcagcccggcgugcccgugagauggaagagaugaggacuagucccuguucccagagcccacuuuuuuuucuuuuuuugaaauaaaauagccugucuuucagaucuaaaaaaaaaaaaaaaaaaaaaaaaaaaaaaaaaaaaaaaaaaaaaaaaaaaaaaaaaaaaaaaaugcaucccccccccccccccccccccccccccccccaaaggcucuuuucagagccaccagaauu

SEQ ID NO: 2678 - RNA, 1768 nt, Artificial Sequence; identical to SEQ ID NO: 2672
  mRNA product Design a-2 comprising derived and/or modified sequence from LASV(Pinneo-NIG-1969;Clade I)__AIT17836__GPC (opt4)

SEQ ID NO: 2679 - RNA, 1768 nt, Artificial Sequence
  mRNA product Design a-2 comprising derived and/or modified sequence from LASV(ISTH0009-NIG-2011;Clade II)__AIT17404__GPC (opt4)
gggagaguccgcucagccagguugcagaagcggcuuagcguguguccuaaucuucucucugcguguagguaggccugugccgcaaacaagcuuaccaugggccagaucaucaccuucuuccaggaggugccccacgugaucgaggaggugaugaacaucgugcugaucgcccugagccugcuggccauccugaagggcaucuacaacguggccaccugcggccuguucggccuggugagcuuccugcugcugugcggcagaagcugcagcaccaccuacaagggcguguacgagcugcagacccuggagcuggacauggccagccugaacaugaccaugccccugagcugcaccaagaacaacagccaccacuacaucauggugggcaacgagaccggccuggagcugacccugaccaacaccagcaucaucaaccacaaguucugcaaccugagcgacgcccacaagaagaaccuguacgaccacgcccugaugagcaucaucagcaccuuccaccugagcauccccaacuucaaccaguacgaggccaugagcugcgacuucaacggcggcaagaucagcgugcaguacaaccugagccacgccuacgccguggacgccgccaaccacugcggcaccaucgccaacggcgugcugcagaccuucaugagaauggccuggggcggcagcuacaucgcccuggacagcggcaagggcagcugggacugcaucaugaccagcuaccaguaccugaucauccagaacaccaccugggaggaccacugccaguucagcagacccagccccaucggcuaccugggccugcugagccagagaaccagagacaucuacaucagcagaagacugcugggcaccuucaccuggacccugagcgacagcgagggcaacgagacccccggcggcuacugccugaccagauggaugcugaucgaggccgagcugaagugcuucggcaacaccgccguggccaagugcaacgagaagcacgacgaggaguucugcgacaugcugagacuguucgacuucaacaagcaggccaucagaagacugaagaccgaggcccagaugagcauccagcugaucaacaaggccgugaacgcccugaucaacgaccagcugaucaugaagaaccaccugagagacaucaugggcauccccuacugcaacuacagcaaguacugguaccugaaccacaccgugaccggcaagaccagccugcccagaugcuggcuggugagcaacggcagcuaccugaacgagacccacuucagcgacgacaucgagcagcaggccgacaacaugaucaccgagcugcugcagaaggaguacauggacagacagggcaagaccccccugggccugguggaccuguucguguucagcaccagcuucuaccugaucagcaucuuccugcaccugaucaagauccccacccacagacacaucaccggcaagcccugccccaagccccacagacugaaccacaugggcaucugcagcugcggccuguacaagcaccccggcgugcccgugaaguggaagagaugaggacuagucccuguucccagagcccacuuuuuuuucuuuuuuugaaauaaaauagccugucuuucagaucuaaaaaaaaaaaaaaaaaaaaaaaaaaaaaaaaaaaaaaaaaaaaaaaaaaaaaaaaaaaaaaaaugcaucccccccccccccccccccccccccccccccaaaggcucuuuucagagccaccagaauu

SEQ ID NO: 2680 - RNA, 1768 nt, Artificial Sequence
  mRNA product Design a-2 comprising derived and/or modified sequence from LASV(ISTH2010-NIG-2012;Clade II)__AIT17482__GPC (opt4)
gggagaguccgcucagccagguugcagaagcggcuuagcguguguccuaaucuucucucugcguguagguaggccugugccgcaaacaagcuuaccaugggccagaucaucaccuucuuccaggaggugccccacgugaucgaggaggugaugaacaucgugcugaucgcccugagccugcuggccauccugaagggcaucuacaacguggccaccugcggccuguucggccuggugagcuuccugcugcugugcggcagaagcugcagcaccaccuacaagggcguguacgagcugcagacccuggagcuggacauggccagccugaacaugaccaugccccugagcugcaccaagaacaacagccaccacuacaucauggugggcaacgagaccggccuggagcugacccugaccaacaccagcaucaucaaccacaaguucugcaaccugagcgacgcccacaagaagaaccuguacgaccacgcccugaugagcaucaucagcaccuuccaccugagcauccccaacuucaaccaguacgaggccaugagcugcgacuucaacggcggcaagaucagcgugcaguacaaccugagccacgccuacgccguggacgccgccaaccacugcggcaccaucgccaacggcgugcugcagaccuucaugagaauggccuggggcggcagcuacaucgcccuggacagcggcaagggcagcugggacugcaucaugaccagcuaccaguaccugaucauccagaacaucaccugggaggaccacugccaguucagcagacccagccccaucggcuaccugggccugcugagccagagaaccagagacaucuacaucagcagaagacugcugggcaccuucaccuggacccugagcgacagcgagggcaacgagacccccggcggcuacugccugaccagauggaugcugaucgaggccgagcugaagugcuucggcaacaccgccguggccaagugcaacgagaagcacgacgaggaguucugcgacaugcugagacuguucgacuucaacaagcaggccaucagaagacugaagaccgaggcccagaugagcauccagcugaucaacaaggccgugaacgcccugaucaacgaccagcugaucaugaagaaccaccugagagacaucaugggcauccccuacugcaacuacagcaaguacugguaccugaaccacaccgugaccggcaagaccagccugcccagaugcuggcuggugagcaacggcagcuaccugaacgagacccacuucagcgacgacaucgagcagcaggccgacaacaugaucaccgagcugcugcagaaggaguacaucgacagacagggcaagaccccccugggccugguggaccuguucguguucagcaccagcuucuaccugaucagcaucuuccugcaccuggugaagauccccacccacagacacguggugggcaagcccugccccaagccccacagacugaaccacaugggcaucugcagcugcggccuguacaagcaccccggcgugcccgugaaguggaagagaugaggacuagucccuguucccagagcccacuuuuuuuucuuuuuuugaaauaaaauagccugucuuucagaucuaaaaaaaaaaaaaaaaaaaaaaaaaaaaaaaaaaaaaaaaaaaaaaaaaaaaaaaaaaaaaaaaugcaucccccccccccccccccccccccccccccccaaaggcucuuuucagagccaccagaauu

SEQ ID NO: 2681 - RNA, 1768 nt, Artificial Sequence
  mRNA product Design a-2 comprising derived and/or modified sequence from LASV(Lassa virus/H.sapiens-wt/NGA/2015/ISTH_0543;Clade II)__AVO03639__GPC (opt4)
gggagaguccgcucagccagguugcagaagcggcuuagcguguguccuaaucuucucucugcguguagguaggccugugccgcaaacaagcuuaccaugggccagaucaucaccuucuuccaggaggugccccacgugaucgaggaggugaugaacaucgugcugaucgcccugagccugcuggccauccugaagggcaucuacaacguggccaccugcggccuguucggccuggugagcuuccugcugcugugcggcagaagcugcagcaccaccuacaagggcguguacgagcugcagacccuggagcuggacauggccaaccugaacaugaccaugccccugagcugcaccaagaacaacagccaccacuacaucauggugggcaacgagaccggccuggagcugacccugaccaacaccagcaucaucaaccacaaguucugcaaccugagcgacgcccacaagaagaaccuguacgaccacgcccugaugagcaucaucagcaccuuccaccugagcauccccaacuucaaccaguacgaggccaugagcugcgacuucaacggcggcaagaucagcgugcaguacaaccugagccacaccuacgccguggacgccgccaaccacugcggcaccaucgccaacggcgugcugcagaccuucaugagaauggccuggggcggcagcuacaucgcccuggacagcggcaagggcagcugggacugcaucaugaccagcuaccaguaccuggugauccagaacaccaccugggaggaccacugccaguucagcagacccagccccaucggcuaccugggccugcugagccagagaaccagagacaucuacaucagcagaagacugcugggcaccuucaccuggacccugagcgacagcgagggcaacgagacccccggcggcuacugccugaccagauggaugcugaucgaggccgagcugaagugcuucggcaacaccgccguggccaagugcaacgagaagcacgacgaggaguucugcgacaugcugagacuguucgacuucaacaagcaggccaucagaagacugaagaccgaggcccagaugagcauccagcugaucaacaaggccgugaacgcccugaucaacgaccagcugaucaugaagaaccaccugagagacaucaugggcauccccuacugcaacuacagcaaguacugguaccugaaccacaccgugaccggcaagaccagccugcccagaugcuggcuggugagcaacggcagcuaccugaacgagacccacuucagcgacgacaucgagcagcaggccgacaacaugaucaccgagcugcugcagaaggaguacaucgacagacagggcaagaccccccugggccugguggaccuguucguguucagcaccagcuucuaccugaucagcaucuuccugcaccuggugaagauccccacccacagacacaucaccggcaagcccugccccaagccccacagacugaaccacaugggcaucugcagcugcggccuguacaagcaccccggcgugcccgugaaguggaagagaugaggacuagucccuguucccagagcccacuuuuuuuucuuuuuuugaaauaaaauagccugucuuucagaucuaaaaaaaaaaaaaaaaaaaaaaaaaaaaaaaaaaaaaaaaaaaaaaaaaaaaaaaaaaaaaaaaugcaucccccccccccccccccccccccccccccccaaaggcucuuuucagagccaccagaauu

SEQ ID NO: 2682 - RNA, 1768 nt, Artificial Sequence
  mRNA product Design a-2 comprising derived and/or modified sequence from LASV(Lassa virus/H.sapiens-wt/NGA/2016/ISTH_0009;Clade II)__AVO03571__GPC (opt4)
gggagaguccgcucagccagguugcagaagcggcuuagcguguguccuaaucuucucucugcguguagguaggccugugccgcaaacaagcuuaccaugggccagaucaucaccuucuuccaggaggugccccacgugaucgaggaggugaugaacaucgugcugaucgcccugagccugcuggccauccugaagggcaucuacaacguggccaccugcggccugcugggccuggugagcuuccugcugcugugcggcagaagcugcagcaccaccuacaagggcguguacgagcugcagacccuggagcuggacauggccagccugaacaugaccaugccccugagcugcaccaagaacaacagccaccacuacaucauggugggcaacgagaccggccuggagcugacccugaccaacaccagcaucaucaaccacaaguucugcaaccugagcgacgcccacaagaagaaccuguacgaccacgcccugaugagcaucaucagcaccuuccaccugagcauccccaacuucaaccaguacgaggccaugagcugcgacuucaacggcggcagaaucagcgugcaguacaaccugagccacagcuacgccguggacgccgccaaccacugcggcaccaucgccaacggcgugcugcagaccuucaugagaauggccuggggcggcagcuacaucgcccuggacagcggcaagggcagcugggacugcaucaugaccagcuaccaguaccugaucauccagaacaccaccugggaggaccacugccaguucagcagacccagccccaucggcuaccugggccugcugagccagagaaccagagacaucuacaucagcagaagacugcugggcaccuucaccuggacccugagcgacagcgagggcaacgagacccccggcggcuacugccugaccagauggaugcugaucgaggccgagcugaagugcuucggcaacaccgccguggccaagugcaacgagaagcacgacgaggaguucugcgacaugcugagacuguucgacuucaacaagcaggccaucagaagacugaagaccgaggcccagaugagcauccagcugaucaacaaggccgugaacgcccugaucaacgaccagcugaucaugaagaaccaccugagagacaucaugggcauccccuacugcaacuacagcaaguacugguaccugaaccacaccgugaccggcaagaccagccugcccagaugcuggcuggugagcaacggcagcuaccugaacgagacccacuucagcgacgacaucgagcagcaggccgacaacaugaucaccgagcugcugcagaaggaguacaucgacagacagggcaagaccccccugggccugguggaccuguucguguucagcaccagcuucuaccugaucagcaucuuccugcaccuggugaagauccccacccacagacacaucaccggcaagcccugccccaagccccacagacugaaccacaugggcaucugcagcugcggccuguacaaccaccccggcgugcccgugaaguggaagagaugaggacuagucccuguucccagagcccacuuuuuuuucuuuuuuugaaauaaaauagccugucuuucagaucuaaaaaaaaaaaaaaaaaaaaaaaaaaaaaaaaaaaaaaaaaaaaaaaaaaaaaaaaaaaaaaaaugcaucccccccccccccccccccccccccccccccaaaggcucuuuucagagccaccagaauu

SEQ ID NO: 2683 - RNA, 1768 nt, Artificial Sequence
  mRNA product Design a-2 comprising derived and/or modified sequence from LASV(Lassa virus/H.sapiens-wt/NGA/2016/ISTH_0017;Clade II)__AVO03567__GPC (opt4)
gggagaguccgcucagccagguugcagaagcggcuuagcguguguccuaaucuucucucugcguguagguaggccugugccgcaaacaagcuuaccaugggccagaucaucaccuucuuccaggaggugccccacgugaucgaggaggugaugaacaucgugcugaucgcccugagccugcuggccauccugaagggcaucuacaacguggccaccugcggccuguucggccuggugagcuuccugcugcugugcggcagaagcugcagcaccaccuacaagggcguguacgagcugcagacccuggagcuggacauggccagccugaacaugaccaugccccugagcugcaccaagaacaacagccaccacuacaucauggugggcaacgagaccggccuggagcugacccugaccaacaccagcaucaucaaccacaaguucugcaaccugagcgacgcccacaagaagaaccuguacgaccacgcccugaugagcaucaucagcaccuuccaccugagcauccccaacuucaaccaguacgaggccaugagcugcgacuucaacggcggcaagaucagcgugcaguacaaccugagccacaccuacgccaucgacgccgccaaccacugcggcaccaucgccaacggcgugcugcagaccuucaugagaauggccuggggcggcagcuacaucgcccuggacagcggcaagggcagcugggacugcaucaugaccagcuaccaguaccugaucauccagaacaccaccugggaggaccacugccaguucagcagacccagccccaucggcuaccugggccugcugagccagagaaccagagacaucuacaucagcagaagacugcugggcaccuucaccuggacccugagcgacagcgagggcaacgagacccccggcggcuacugccugaccagauggaugcugaucgaggccgagcugaagugcuucggcaacaccgccguggccaagugcaacgagaagcacgacgaggaguucugcgacaugcugagacuguucgacuucaacaagcaggccaucagaagacugaagaccgaggcccagaugagcauccagcugaucaacaaggccgugaacgcccugaucaacgaccagcugaucaugaagaaccaccugagagacaucaugggcauccccuacugcaacuacagcaaguacugguaccugaaccacaccgugaccggcaagaccagccugcccagaugcuggcuggugagcaacggcagcuaccugaacgagacccacuucagcgacgacaucgagcagcaggccgacaacaugaucaccgagcugcugcagaaggaguacauggacagacagggcaagaccccccugggccugguggaccuguucguguucagcaccagcuucuaccugaucagcaucuuccugcaccuggugagaauccccacccacagacacgugaucggcaagcccugccccaagccccacagacugaaccacaugggcaucugcagcugcggccuguacaagcaccccggcgugcccgugaaguggaagagaugaggacuagucccuguucccagagcccacuuuuuuuucuuuuuuugaaauaaaauagccugucuuucagaucuaaaaaaaaaaaaaaaaaaaaaaaaaaaaaaaaaaaaaaaaaaaaaaaaaaaaaaaaaaaaaaaaugcaucccccccccccccccccccccccccccccccaaaggcucuuuucagagccaccagaauu

SEQ ID NO: 2684 - RNA, 1768 nt, Artificial Sequence
  mRNA product Design a-2 comprising derived and/or modified sequence from LASV(Lassa virus/H.sapiens-wt/NGA/2018/ISTH_0959;Clade II)__AVV65099__GPC (opt4)
gggagaguccgcucagccagguugcagaagcggcuuagcguguguccuaaucuucucucugcguguagguaggccugugccgcaaacaagcuuaccaugggccagaucaucaccuucuuccaggaggugccccacgugaucgaggaggugaugaacaucgugcugaucgcccugagccugcuggccauccugaagggcaucuacaacguggugaccugcggccuguucggccuggugagcuuccugcugcugugcggcagaagcugcagcaccaccuacaagggcguguacgagcugcagacccuggagcuggacauggccagccugaacaugaccaugccccugagcugcaccaagaacaacagccaccacuacaucauggugggcaacgagaccggccuggagcugacccugaccaacaccagcaucaucaaccacaaguucugcaaccugagcgacgcccacaagaagaaccuguacgaccacgcccugaugagcaucaucagcaccuuccaccugagcauccccaacuucaaccaguacgaggccaugagcugcgacuucaacggcggcaagaucagcgugcaguacaaccugagccacgccuacgccaucgacgccgccaaccacugcggcaccaucgccaacggcgugcugcagaccuucaugagaauggccuggggcggcagcuacaucgcccuggacagcggcaagggcagcugggacugcaucaugaccagcuaccaguaccugaucauccagaacaccaccugggaggaccacugccaguucagcagacccagccccaucggcuaccugggccugcugagccagagaaccagagacaucuacaucagcagaagacugcugggcaccuucaccuggacccugagcgacagcgagggcaacgagacccccggcggcuacugccugaccagauggaugcugaucgaggccgagcugaagugcuucggcaacaccgccguggccaagugcaacgagaagcacgacgaggaguucugcgacaugcugagacuguucgacuucaacaagcaggccaucagaagacugaagaccgaggcccagaugagcauccagcugaucaacaaggccgugaacgcccugaucaacgaccagcugaucaugaagaaccaccugagagacaucaugggcauccccuacugcaacuacagcaaguacugguaccugaaccacaccgugaccggcaagaccagccugcccagaugcuggcuggugagcaacggcagcuaccugaacgagacccacuucagcgacgacaucgagcagcaggccgacaacaugaucaccgagcugcugcagaaggaguacaucgacagacagggcaagaccccccugggccugguggaccuguucguguucagcaccagcuucuaccugaucagcaucuuccugcaccuggugaagauccccacccacagacacgugaucggcaagcccugccccaagccccacagacugaaccacaugggcaucugcagcugcggccuguacaagcaccccggcgugcccgugaaguggaagagaugaggacuagucccuguucccagagcccacuuuuuuuucuuuuuuugaaauaaaauagccugucuuucagaucuaaaaaaaaaaaaaaaaaaaaaaaaaaaaaaaaaaaaaaaaaaaaaaaaaaaaaaaaaaaaaaaaugcaucccccccccccccccccccccccccccccccaaaggcucuuuucagagccaccagaauu

SEQ ID NO: 2685 - RNA, 1768 nt, Artificial Sequence
  mRNA product Design a-2 comprising derived and/or modified sequence from LASV(LASV003-NIG-2008;Clade II)__AIT17580__GPC (opt4)
gggagaguccgcucagccagguugcagaagcggcuuagcguguguccuaaucuucucucugcguguagguaggccugugccgcaaacaagcuuaccaugggccagaucaucaccuucuuccaggaggugccccacgugaucgaggaggugaugaacaucgugcugaucgcccugagccugcuggccauccugaagggcaucuacaacguggccaccugcggccuguucggccuggugagcuuccugcugcugugcggcagaagcugcagcaccaccuacaagggcguguacgagcugcagacccuggagcuggacauggccagccugaacaugaccaugccccugagcugcaccaagaacaacagccaccacuacaucauggugggcaacgagaccggccuggagcugacccugaccaacaccagcaucaucaaccacaaguucugcaaccugagcgacgcccacaagaagaaccuguacgaccacgcccugaugagcaucaucagcaccuuccaccugagcauccccaacuucaaccaguacgaggccaugagcugcgacuucaacggcggcaagaucagcgugcaguacaaccugagccacaccuacgccguggacgccgccaaccacugcggcaccaucgccaacggcgugcugcagaccuucaugagaauggccuggggcggcagcuacaucgcccuggacagcggcaagggcagcugggacugcaucaugaccagcuaccaguaccugaucauccagaacaccaccugggaggaccacugccaguucagcagacccagccccaucggcuaccugggccugcugagccagagaaccagagacaucuacaucagcagaagacugcugggcaccuucaccuggacccugagcgacagcgagagcaacgagacccccggcggcuacugccugaccagauggaugcugaucgaggccgagcugaagugcuucggcaacaccgccguggccaagugcaacgagaagcacgacgaggaguucugcgacaugcugagacuguucgacuucaacaagcaggccaucagaagacugaaggccgaggcccagaugagcauccagcugaucaacaaggccgugaacgcccugaucaacgaccagcugaucaugaagaaccaccugagagacaucaugggcauccccuacugcaacuacagcaaguacugguaccugaaccacaccgugaccggcagaaccagccugcccagaugcuggcuggugagcaacggcagcuaccugaacgagacccacuucagcgacgacaucgagcagcaggccgacaacaugaucaccgagcugcugcagaaggaguacauggacagacagggcaagaccccccugggccugguggaccuguucguguucagcaccagcuucuaccugaucagcaucuuccugcaccuggugaagauccccacccacagacacgugaucggcaagcccugccccaagccccacagacugaaccacaugggcaucugcagcugcggccuguacaagcaccccggcgugcccgugaaguggaagagaugaggacuagucccuguucccagagcccacuuuuuuuucuuuuuuugaaauaaaauagccugucuuucagaucuaaaaaaaaaaaaaaaaaaaaaaaaaaaaaaaaaaaaaaaaaaaaaaaaaaaaaaaaaaaaaaaaugcaucccccccccccccccccccccccccccccccaaaggcucuuuucagagccaccagaauu

SEQ ID NO: 2686 - RNA, 1768 nt, Artificial Sequence
  mRNA product Design a-2 comprising derived and/or modified sequence from LASV(LASV035-NIG-2009;Clade II)__AIT17588__GPC (opt4)
gggagaguccgcucagccagguugcagaagcggcuuagcguguguccuaaucuucucucugcguguagguaggccugugccgcaaacaagcuuaccaugggccagaucaucaccuucuuccaggaggugccccacgugaucgaggaggugaugaacaucgugcugaucgcccugagccugcuggccauccugaagggcaucuacaacguggccaccugcggccuguucggccuggugagcuuccugcugcugugcggcagaagcugcagcaccaccuacaagggcguguacgagcugcagacccuggagcuggacauggccagccugaacaugaccaugccccugagcugcaccaagaacaacagccaccacuacaucauggugggcaacgagaccggccuggagcugacccugaccaacaccagcaucaucaaccacaaguucugcaaccugagcgacgcccacaagaagaaccuguacgaccacgcccugaugagcaucaucagcaccuuccaccugagcauccccaacuucaaccaguacgaggccaugagcugcgacuucaacggcggcaagaucagcgugcaguacaaccugagccacgccuacgccguggacgccgccaaccacugcggcaccaucgccaacggcgugcugcagaccuucaugagaauggccuggggcggcagcuacaucgcccuggacagcggcaagggcagcugggacugcaucaugaccagcuaccaguaccugaucauccagaacaccaccugggaggaccacugccaguucagcagacccagccccaucggcuaccugggccugcugagccagagaaccagagacaucuacaucagcagaagacugcugggcaccuucaccuggacccugagcgacagcgagggcaacgagacccccggcggcuacugccugaccagauggaugcugaucgaggccgagcugaagugcuucggcaacaccgccguggccaagugcaacgagaagcacgacgaggaguucugcgacaugcugagacuguucgacuucaacaagcaggccaucagaagacugaaggccgaggcccagaugagcauccagcugaucaacaaggccgugaacgcccugaucaacgaccagcugaucaugaagaaccaccugagagacaucaugggcauccccuacugcaacuacagcaaguacugguaccugaaccacaccgugaccggcaagaccagccugcccagaugcuggcuggugagcaacggcagcuaccugaacgagacccacuucagcgacgacaucgagcagcaggccgacaacaugaucaccgagcugcugcagaaggaguacaucgacagacagggcaagaccccccugggccugguggaccuguucguguucagcaccagcuucuaccugaucagcaucuuccugcaccuggugaagauccccacccacagacacgugaucggcaagcccugccccaagccccacagacugaaccacaugggcaucugcagcugcggccuguacaagcaccccggcgugcccgugaaguggaagagaugaggacuagucccuguucccagagcccacuuuuuuuucuuuuuuugaaauaaaauagccugucuuucagaucuaaaaaaaaaaaaaaaaaaaaaaaaaaaaaaaaaaaaaaaaaaaaaaaaaaaaaaaaaaaaaaaaugcaucccccccccccccccccccccccccccccccaaaggcucuuuucagagccaccagaauu

SEQ ID NO: 2687 - RNA, 1768 nt, Artificial Sequence
  mRNA product Design a-2 comprising derived and/or modified sequence from LASV(LASV1000-NIG-2009;Clade II)__AIT17782__GPC (opt4)
gggagaguccgcucagccagguugcagaagcggcuuagcguguguccuaaucuucucucugcguguagguaggccugugccgcaaacaagcuuaccaugggccagaucaucaccuucuuccaggaggugccccacgugaucgaggaggugaugaacaucgugcugaucgcccugagccugcuggccauccugaagggcaucuacaacguggccaccugcggccuguucggccuggugagcuuccugcugcugugcggcagaagcugcagcaccaccuacaagggcguguacgagcugcagacccuggagcuggacauggccagccugaacaugaccaugccccugagcugcaccaagaacaacagccaccacuacaucauggugggcaacgagaccggccuggagcugacccugaccaacaccagcaucaucaaccacaaguucugcaaccugagcgacgcccacaagaagaaccuguacgaccacgcccugaugagcaucaucagcaccuuccaccugagcauccccaacuucaaccaguacgaggccaugagcugcgacuucaacggcggcaagaucagcgugcaguacaaccugagccacaccuacgccguggacgccgccaaccacugcggcaccaucgccaacggcgugcugcagaccuucaugagaauggccuggggcggcagcuacaucgcccuggacagcggcaagggcagcugggacugcaucaugaccagcuaccaguaccugaucauccagaacaccaccugggaggaccacugccaguucagcagacccagccccaucggcuaccugggccugcugagccagagaaccagagacaucuacaucagcagaagacugcugggcaccuucaccuggacccugagcgacagcgagggcaacgagacccccggcggcuacugccugaccagauggaugcugaucgaggccgagcugaagugcuucggcaacaccgccguggccaagugcaacgagaagcacgacgaggaguucugcgacaugcugagacuguucgacuucaacaagcaggccaucaagagacugaagaccgaggcccagaugagcauccagcugaucaacaaggccgugaacgcccugaucaacgaccagcugaucaugaagaaccaccugagagacaucaugggcauccccuacugcaacuacagcaaguacugguaccugaaccacaccgugaccggcaagaccagccugcccagaugcuggcuggugagcaacggcagcuaccugaacgagacccacuucagcgacgacaucgagcagcaggccgacaacaugaucaccgagcugcugcagaaggaguacaucgacagacagggcaagaccccccugggccugguggaccuguucguguucagcaccagcuucuaccugaucagcaucuuccugcaccuggugaagauccccacccacagacacguggugggcaagcccugccccaagccccacagacugaaccacaugggcaucugcagcugcggccuguacaagcaccccggcgugcccgugaaguggaagagaugaggacuagucccuguucccagagcccacuuuuuuuucuuuuuuugaaauaaaauagccugucuuucagaucuaaaaaaaaaaaaaaaaaaaaaaaaaaaaaaaaaaaaaaaaaaaaaaaaaaaaaaaaaaaaaaaaugcaucccccccccccccccccccccccccccccccaaaggcucuuuucagagccaccagaauu

SEQ ID NO: 2688 - RNA, 1768 nt, Artificial Sequence
  mRNA product Design a-2 comprising derived and/or modified sequence from LASV(LASV221-NIG-2010;Clade II)__AIT17624__GPC (opt4)
gggagaguccgcucagccagguugcagaagcggcuuagcguguguccuaaucuucucucugcguguagguaggccugugccgcaaacaagcuuaccaugggccagaucaucaccuucuuccaggaggugccccacgugaucgaggaggugaugaacaucgugcugaucgcccugagccugcuggccauccugaagggcaucuacaacguggccaccugcggccuguucggccuggugagcuuccugcugcugugcggcagaagcugcagcaccaccuacaagggcguguacgagcugcagacccuggagcuggacauggccagccugaacaugaccaugccccugagcugcaccaagaacaacagccaccacuacaucauggugggcaacgagaccggccuggagcugacccugaccaacaccagcaucaucaaccacaaguucugcaaccugagcgacgcccacaagaagaaccuguacgaccacgcccugaugagcaucaucagcaccuuccaccugagcauccccaacuucaaccaguacgaggccaugagcugcgacuucaacggcggcaagaucagcgugcaguacaaccugagccacaccuacgccaucgacgccgccaaccacugcggcaccaucgccaacggcgugcugcagaccuucaugagaauggccuggggcggcagcuacaucgcccuggacagcggcaagggcagcugggacugcaucaugaccagcuaccaguaccugaucauccagaacaccaccugggaggaccacugccaguucagcagacccagccccaucggcuaccugggccugcugagccagagaaccagagacaucuacaucagcagaagacugcugggcaccuucaccuggacccugagcgacagcgagggcaacgagacccccggcggcuacugccugaccagauggaugcugaucgaggccgagcugaagugcuucggcaacaccgccguggccaagugcaacgagaagcacgacgaggaguucugcgacaugcugagacuguucgacuucaacaagcaggccaucagaagacugaagaccgaggcccagaugagcauccagcugaucaacaaggccgugaacgcccugaucaacgaccagcugaucaugaagaaccaccugagagacaucaugggcauccccuacugcaacuacagcaaguacugguaccugaaccacaccgugaccggcaagaccagccugcccagaugcuggcuggugagcaacggcagcuaccugaacgagacccacuucagcgacgacaucgagcagcaggccgacaacaugaucaccgagaugcugcagaaggaguacauggacagacagggcaagaccccccugggccugguggaccuguucguguucagcaccagcuucuaccugaucagcaucuuccugcaccuggugaagauccccacccacagacacgugaucggcaagcccugccccaagccccacagacugaaccacaugggcaucugcagcugcggccuguacaagcaccccggcgugcccgugaaguggaagagaugaggacuagucccuguucccagagcccacuuuuuuuucuuuuuuugaaauaaaauagccugucuuucagaucuaaaaaaaaaaaaaaaaaaaaaaaaaaaaaaaaaaaaaaaaaaaaaaaaaaaaaaaaaaaaaaaaugcaucccccccccccccccccccccccccccccccaaaggcucuuuucagagccaccagaauu

SEQ ID NO: 2689 - RNA, 1768 nt, Artificial Sequence
  mRNA product Design a-2 comprising derived and/or modified sequence from LASV(LASV237-NIG-2010;Clade II)__AIT17638__GPC (opt4)
gggagaguccgcucagccagguugcagaagcggcuuagcguguguccuaaucuucucucugcguguagguaggccugugccgcaaacaagcuuaccaugggccagaucaucaccuucuuccaggaggugccccacgugaucgaggaggugaugaacaucgugcugaucgcccugagccugcuggccauccugaagggcaucuacaacguggccaccugcggccuguucggccuggugagcuuccugcugcugugcggcagaagcugcagcaccaccuacaagggcguguacgagcugcagacccuggagcuggacauggccagccugaacaugaccaugccccugagcugcaccaagaacaacagccaccacuacaucauggugggcaacgagaccggccuggagcugacccugaccaacaccagcaucaucaaccacaaguucugcaaccugagcgacgcccacaagaaggaccuguacgaccacgcccugaugagcaucaucagcaccuuccaccugagcauccccaacuucaaccaguacgaggccaugagcugcgacuucaacggcggcaagaucagcgugcaguacaaccugagccacaccuacgccguggacgccgccaaccacugcggcaccaucgccaacggcgugcugcagaccuucaugagaauggccuggggcggcagcuacaucgcccuggacagcggcaagggcagcugggacugcaucaugaccagcuaccaguaccugaucauccagaacaccaccugggaggaccacugccaguucagcagacccagccccaucggcuaccugggccugcugagccagagaaccagagacaucuacaucagcagaagacugcugggcaccuucaccuggacccugagcgacagcgagggcaacgagacccccggcggcuacugccugaccagauggaugcugaucgaggccgagcugaagugcuucggcaacaccgccguggccaagugcaacgagaagcacgacgaggaguucugcgacaugcugagacuguucgacuucaacaagcaggccaucagaagacugaagaccgaggcccagaugagcauccagcugaucaacaaggccgugaacgcccugaucaacgaccagcugaucaugaagaaccaccugagagacaucaugggcauccccuacugcaacuacagcaaguacugguaccugaaccacaccgugaccggcaagaccagccugcccagaugcuggcuggugagcaacggcagcuaccugaacgagacccacuucagcgacgacaucgagcagcaggccgacaacaugaucaccgagcugcugcagaaggaguacauggacagacagggcaagaccccccugggccugguggaccuguucguguucagcaccagcuucuaccugaucagcaucuuccugcaccugaucaagauccccacccacagacacaucaccggcaagcccugccccaagccccacagacugaaccacaugggcaucugcagcugcggccuguacaagcaccccggcgugcccgugaaguggaagagaugaggacuagucccuguucccagagcccacuuuuuuuucuuuuuuugaaauaaaauagccugucuuucagaucuaaaaaaaaaaaaaaaaaaaaaaaaaaaaaaaaaaaaaaaaaaaaaaaaaaaaaaaaaaaaaaaaugcaucccccccccccccccccccccccccccccccaaaggcucuuuucagagccaccagaauu

SEQ ID NO: 2690 - RNA, 1768 nt, Artificial Sequence
  mRNA product Design a-2 comprising derived and/or modified sequence from LASV(LASV253-NIG-2011;Clade II)__AIT17670__GPC (opt4)
gggagaguccgcucagccagguugcagaagcggcuuagcguguguccuaaucuucucucugcguguagguaggccugugccgcaaacaagcuuaccaugggccagaucaucaccuucuuccaggaggugccccacgugaucgaggaggugaugaacaucgugcugaucgcccugagccugcuggccauccugaagggcaucuacaacguggccaccugcggccuguucggccuggugagcuuccugcugcugugcggcagaagcugcagcaccaccuacaagggcguguacgagcugcagacccuggagcuggacauggccagccugaacaugaccaugccccugagcugcaccaagaacaacagccaccacuacaucauggugggcaacgagaccggccuggagcugacccugaccaacaccagcaucaucaaccacaaguucugcaaccugagcgacgcccacaagaagaaccuguacgaccacgcccugaugagcaucaucagcaccuuccaccugagcauccccaacuucaaccaguacgaggccaugagcugcgacuucaacggcggcaagaucagcgugcaguacaaccugagccacaccuacgccguggacgccgccaaccacugcggcaccaucgccaacggcgugcugcagaccuucaugagaauggccuggggcggcagcuacaucgcccuggacagcggcaagggcagcugggacugcaucaugaccagcuaccaguaccugaucauccagaacaccaccugggaggaccacugccaguucagcagacccagccccaucggcuaccugggccugcugagccagagaaccagagacaucuacaucagcagaagacugcugggcaccuucaccuggacccugagcgacagcgagggcaacgagacccccggcggcuacugccugaccagauggaugcugaucgaggccgagcugaagugcuucggcaacaccgccguggccaagugcaacgagaagcacgacgaggaguucugcgacaugcugagacuguucgacuucaacaagcaggccaucagaagacugaaggccgaggcccagaugagcauccagcugaucaacaaggccgugaacgcccugaucaacgaccagcugaucaugaagaaccaccugagagacaucaugggcauccccuacugcaacuacagcaaguacugguaccugaaccacaccgugaccggcagaaccagccugcccagaugcuggcuggugagcaacggcagcuaccugaacgagacccacuucagcgacgacaucgagcagcaggccgacaacaugaucaccgagcugcugcagaaggaguacaucgacagacagggcaagaccccccugggccugguggaccuguucguguucagcaccagcuucuaccugaucagcaucuuccugcaccuggugaagauccccacccacagacacaucaucggcaagcccugccccaagccccacagacugaaccacaugggcaucugcagcugcggccuguacaagcaccccggcgugcccgugaaguggaagagaugaggacuagucccuguucccagagcccacuuuuuuuucuuuuuuugaaauaaaauagccugucuuucagaucuaaaaaaaaaaaaaaaaaaaaaaaaaaaaaaaaaaaaaaaaaaaaaaaaaaaaaaaaaaaaaaaaugcaucccccccccccccccccccccccccccccccaaaggcucuuuucagagccaccagaauu

SEQ ID NO: 2691 - RNA, 1768 nt, Artificial Sequence
  mRNA product Design a-2 comprising derived and/or modified sequence from LASV(LASV254-NIG-2011;Clade II)__AIT17674__GPC (opt4)
gggagaguccgcucagccagguugcagaagcggcuuagcguguguccuaaucuucucucugcguguagguaggccugugccgcaaacaagcuuaccaugggccagaucaucaccuucuuccaggaggugccccacgugaucgaggaggugaugaacaucgugcugaucgcccugagccugcuggccauccugaagggcaucuacaacguggccaccugcggccuguucggccuggugagcuuccugcugcugugcggcagaagcugcagcaccaccuacaagggcguguacgagcugcagacccuggagcuggacaugaccaaccugaacaugaccaugccccugagcugcaccaagaacaacagccaccacuacaucauggugggcaacgagaccggccuggagcugacccugaccaacaccagcaucaucaaccacaaguucugcaaccugagcgacgcccacaagaagaaccuguacaaccacgcccugaugagcaucaucagcaccuuccaccugagcauccccaacuucaaccaguacgaggccaugagcugcgacuucaacggcggcaagaucagcgugcaguacaaccugagccacagcuacgccguggacgccgccaaccacugcggcaccaucgccaacggcgugcugcagaccuucaugagaauggccuggggcggcagcuacaucgcccuggacagcggcaagggcaacugggacugcaucaugaccagcuaccaguaccugaucauccagaacaccaccugggaggaccacugccaguucagcagacccagccccaucggcuaccugggccugcugagccagagaaccagagacaucuacaucagcagaagacugcugggcaccuucaccuggacccugagcgacagcgagggcaacgagacccccggcggcuacugccugaccagauggaugcugaucgaggccgagcugaagugcuucggcaacaccgccguggccaagugcaacgagaagcacgacgaggaguucugcgacaugcugagacuguucgacuucaacaagcaggccaucagaagacugaagaccgaggcccaggccaacauccagcugaucaacaaggccgugaacgcccugaucaacgaccagcugaucaugaagaaccaccugagagacaucaugggcauccccuacugcaacuacagcaaguacugguaccugaaccacaccgugaccggcaagaccagccugcccagaugcuggcuggugagcaacggcagcuaccugaacgagacccacuucagcgacgacaucgagcagcaggccgacaacaugaucaccgagcugcugcagaaggaguacauggacagacagggcaagaccccccugggccugguggaccuguucguguucagcaccagcuucuaccugaucagcaucuuccugcaccuggugaagauccccacccacagacacgugaucggcaagcccugccccaagccccacagacugaaccacaugggcaucugcagcugcggccuguacaagcaccccggcgugcccgugaaguggaagagaugaggacuagucccuguucccagagcccacuuuuuuuucuuuuuuugaaauaaaauagccugucuuucagaucuaaaaaaaaaaaaaaaaaaaaaaaaaaaaaaaaaaaaaaaaaaaaaaaaaaaaaaaaaaaaaaaaugcaucccccccccccccccccccccccccccccccaaaggcucuuuucagagccaccagaauu

SEQ ID NO: 2692 - RNA, 1768 nt, Artificial Sequence
  mRNA product Design a-2 comprising derived and/or modified sequence from LASV(Nig08-A19;Clade III)__ADU56618__GPC (opt4)
gggagaguccgcucagccagguugcagaagcggcuuagcguguguccuaaucuucucucugcguguagguaggccugugccgcaaacaagcuuaccaugggccagaucgugaccuucuuccaggaggugccccacgugaucgaggaggugaugaacaucgugcugaucgcccugagcauccuggccauccugaagggccuguacaacaucgccaccugcggccugaucggccuggugaccuuccugcugcugagcggcagaagcugcagcaugaccuacaagggcguguacgagcugcagacccuggagcugaacaugaacacccugaacaugaccaugccccugagcugcaccaagaacaacagccaccacuacaucauggugggcaacgagaccggccuggagcugacccugaccaacaccagccugcugcaccacaaguucugcaaccugagcgacgcccacaagaagaaccuguacgaccacacccugaugagcaucaucagcaccuuccaccugagcauccccaacuucaaccaguacgaggccaugagcugcgacuucaacggcggcaagaucaccgugcaguacaaccugagccacagcuacgccaucgacgccgccaaccacugcggcaccguggccaacggcgugcugcagaccuucaugagaauggccuggggcggcagcuacaucgcccuggacagcggcagaggcaagugggacugcaucaugaccagcuaccaguaccugaucauccagaacaccaccugggaggaccacugccaguucagcagacccagccccaucggcuaccugggccugcugagccagagaaccagagacaucuacaucagcagaagacugcugggcaccuucaccuggacccugagcgacagcgagggcaacgagacccccggcggcuacugccugaccagauggaugcugaucgaggccgagcugaagugcuucggcaacaccgccguggccaagugcaacgagaagcacgacgaggaguucugcgacaugcugagacuguucgacuucaacaagcaggccaucagaagacugaaggccgaggcccagaugagcauccagcugaucaacaaggccgugaacgcccugaucaacgaccagcugaucaugaagaaccaccugagagacaucaugggcauccccuacugcaacuacagcaaguacugguaccugaaccacaccagcaccggcagaaccagccugcccagaugcuggcuggugagcaacggcagcuaccugaacgagacccacuucagcgacgacaucgagcagcaggccgacaacaugaucaccgagaugcugcagaaggaguaccuggacagacagggcaagaccccccugggccugguggaccuguucguguucagcaccagcuucuaccugaucagcaucuuccugcaccuggugaagauccccacccacagacacaucgugggcaagcccugccccaagccccacagacugaaccacaugggcaucugcagcugcggccuguacaagcagcccggcgugcccgugagauggaagagaugaggacuagucccuguucccagagcccacuuuuuuuucuuuuuuugaaauaaaauagccugucuuucagaucuaaaaaaaaaaaaaaaaaaaaaaaaaaaaaaaaaaaaaaaaaaaaaaaaaaaaaaaaaaaaaaaaugcaucccccccccccccccccccccccccccccccaaaggcucuuuucagagccaccagaauu

SEQ ID NO: 2693 - RNA, 1771 nt, Artificial Sequence
  mRNA product Design a-2 comprising derived and/or modified sequence from LASV(G1180-SLE-2010;Clade IV)__AIT17168__GPC (opt4)
gggagaguccgcucagccagguugcagaagcggcuuagcguguguccuaaucuucucucugcguguagguaggccugugccgcaaacaagcuuaccaugggccagaucgugaccuucuuccaggaggugccccacgugaucgaggaggugaugaacaucgugcugaucgcccugagcauccuggccgugcugaagggccuguacaacuucgccaccugcggccuggugggccugcugaccuuccugcugcugugcggcagaagcugcaccgccagcagauacaagggcguguacgagcugcagacccuggagcugaacauggagacccugaacaugaccaugccccugagcugcaccaagaacaacagccaccacuacaucauggugggcaacgagaccggccuggagcugacccugaccaacaccagcaucaucaaccacaaguucugcaaccugagcgacgcccacaagaagaaccuguacgaccacgcccugaugagcaucaucagcaccuuccaccugagcauccccaacuucaaccaguacgaggccaugagcugcgacuucaacggcggcaagaucagcgugcaguacaaccugagccacagcuacgccggcgacgccgccaaccacugcggcaccguggccaacggcgugcugcagaccuucaugagaauggccuggggcggcagcuacaucgcccuggacagcggccacggcagcugggacugcaucaugaccagcuaccaguaccugaucauccagaacaccaccugggaggaccacugccaguucagcagacccagccccaucggcuaccugggccugcugagccagagaaccagagacaucuacaucagcagaagacugcugggcaccuucaccuggacccugagcgacagcgagggcaaggacacccccggcggcuacugccugaccagauggaugcugaucgaggccgagcugaagugcuucggcaacaccgccguggccaagugcaacgagaagcacgacgaggaguucugcgacaugcugagacuguucgacuucaacaagcaggccauccagagacugaaggccgaggcccagaugagcauccagcugaucaacaaggccgugaacgcccugaucaacgaccagcugaucaugaagaaccaccugagagacaucaugggcauccccuacugcaacuacagcaaguacugguaccugaaccacaccaccaccggcaagaccagccugcccaagugcuggcuggugagcaacggcagcuaccugaacgagacccacuucagcgacgacaucgagcagcaggccgacaacaugaucaccgagaugcugcagaaggaguacauggagagacagggcaagaccccccugggccugguggaccuguucguguucagcaccagcuucuaccugaucagcaucuuccugcaccuggugaagauccccacccacagacacaucgugggcaagagcugccccaagccccacagacugaaccacaugggcaucugcagcugcggccuguacaagcagcccggcgugcccgugaaguggaagagaugaggacuagucccuguucccagagcccacuuuuuuuucuuuuuuugaaauaaaauagccugucuuucagaucuaaaaaaaaaaaaaaaaaaaaaaaaaaaaaaaaaaaaaaaaaaaaaaaaaaaaaaaaaaaaaaaaugcaucccccccccccccccccccccccccccccccaaaggcucuuuucagagccaccagaauu

SEQ ID NO: 2694 - RNA, 1771 nt, Artificial Sequence
  mRNA product Design a-2 comprising derived and/or modified sequence from LASV(G1442-SLE-2011;Clade IV)__AIT17180__GPC (opt4)
gggagaguccgcucagccagguugcagaagcggcuuagcguguguccuaaucuucucucugcguguagguaggccugugccgcaaacaagcuuaccaugggccagaucgugaccuucuuccaggaggugccccacgugaucgaggaggugaugaacaucgugcugaucgcccugagcauccuggccgugcugaagggccuguacaacguggccaccugcggccugaucggccuggugaccuuccugcugcugugcggcagaagcugcaccaccacccuguacaagggcguguacgagcugcagacccuggagcugaacauggagacccugaacaugaccaugccccugagcugcaccaagaacaacagccaccacuacaucagagugggcaacgagaccggccuggagcugacccugaccaacaccagcaucaucaaccacaaguucugcaaccugagcgacgcccacaagaagaaccuguacgaccacgcccugaugagcaucaucagcaccuuccaccugagcauccccaacuucaaccaguacgaggccaugagcugcgacuucaacggcggcaagaucagcgugcaguacaaccugagccacagcuacgccggcgacgccgccaaccacugcggcaccguggccaacggcgugcugcagaccuucaugagaauggccuggggcggcagcuacaucgcccuggacagcggcagaggcaacugggacugcaucaugaccagcuaccaguaccugaucauccagaacaccaccugggacgaccacugccaguucagcagacccagccccaucggcuaccugggccugcugagccagagaaccagagacguguacaucagcagaagacugcugggcaccuucaccuggacccugagcgacagcgagggcaaggacacccccggcggcuacugccugaccagauggaugcugaucgaggccgagcugaagugcuucggcaacaccgccguggccaagugcaacgagaagcacgacgaggaguucugcgacaugcugagacuguucgacuucaacaagcaggccauccagagacugaaggccgaggcccagaugagcauccagcugaucaacaaggccgugaacgcccugaucaacgaccagcugaucaugaagaaccaccugagagacaucaugggcauccccuacugcaacuacagcaaguacugguaccugaacaacaccgccaccggcaagaccagccugcccaagugcuggcugaucagcaacggcagcuaccugaacgagacccacuucagcgacgacaucgagcaggaggccgacaacaugaucaccgagaugcugcagaaggaguacauggagagacagggcaagaccccccugggccugguggaccuguucguguucagcaccagcuucuaccugaucagcaucuuccugcaccuggugaagauccccacccacagacacaucgugggcaagagcugccccaagccccacagacugaaccacaugggcaucugcagcugcggccuguacaagcagcccggcgugcccgugagauggaagagaugaggacuagucccuguucccagagcccacuuuuuuuucuuuuuuugaaauaaaauagccugucuuucagaucuaaaaaaaaaaaaaaaaaaaaaaaaaaaaaaaaaaaaaaaaaaaaaaaaaaaaaaaaaaaaaaaaugcaucccccccccccccccccccccccccccccccaaaggcucuuuucagagccaccagaauu

SEQ ID NO: 2695 - RNA, 1771 nt, Artificial Sequence
  mRNA product Design a-2 comprising derived and/or modified sequence from LASV(G3010-SLE-2013;Clade IV)__AIT17344__GPC (opt4)
gggagaguccgcucagccagguugcagaagcggcuuagcguguguccuaaucuucucucugcguguagguaggccugugccgcaaacaagcuuaccaugggccagaucgugaccuucuuccaggaggugccccacgugaucgaggaggugaugaacaucgugcugaucgcccugagcauccuggccgugcugaagggccuguacaacuucgccaccugcggccuggugggccuggugaccuuccugcugcugugcggcagaagcugcaccaccagccuguacaagggcguguacgagcugcagacccuggagcugaacauggagacccugaacaugaccaugccccugagcugcaccaagaacaacagccaccacuacaucauggugggcaacgagaccggccuggagcugacccugaccaacaccagcaucaucaaccacaaguucugcaaccugagcgacgcccacaagaagaaccuguacaaccacgcccugaugagcaucaucagcaccuuccaccugagcauccccaacuucaaccaguacgaggccaugagcugcgacuucaacggcggcaagaucagcgugcaguacaaccugagccacagcuacgccggcgacgccgccagccacugcggcaccguggccaacggcgugcugcagaccuucaugagaauggccuggggcggcagcuacaucgcccuggacagcggcuacggcaagugggacugcaucaugaccagcuaccaguaccugaucauccagaacaccaccugggaggaccacugccaguucagcagacccagccccaucggcuaccugggccugcugagccagagaaccagagacaucuacaucagcagaagacugcugggcaccuucaccuggacccugagcgacagcgagggcaaggacacccccggcggcuacugccugaccagauggaugcugaucgaggccgagcugaagugcuucggcaacaccgccguggccaagugcaacgagaagcacgacgaggaguucugcgacaugcugagacuguucgacuucaacaagcaggccauccagagacugaagaccgaggcccagaugagcauccagcugaucaacaaggccgugaacgcccugaucaacgaccagcugaucaugaagaaccaccugagagacaucaugggcauccccuacugcaacuacagcaaguacugguaccugaaccacaccaccaccggcaagaccagccugcccaagugcuggcuggugagcaacggcagcuaccugaacgagacccacuucagcgacgacaucgagcagcaggccgacaacaugaucaccgagaugcugcagaaggaguacauggagagacagggcaagaccccccugggccugguggaccuguucguguucagcaccagcuucuaccugaucagcaucuuccugcaccuggugaagauccccacccacagacacaucgugggcaagagcugccccaagccccacagacugaaccacaugggcaucugcagcugcggccuguacaagcagcccggcgugcccgugagauggaagagaugaggacuagucccuguucccagagcccacuuuuuuuucuuuuuuugaaauaaaauagccugucuuucagaucuaaaaaaaaaaaaaaaaaaaaaaaaaaaaaaaaaaaaaaaaaaaaaaaaaaaaaaaaaaaaaaaaugcaucccccccccccccccccccccccccccccccaaaggcucuuuucagagccaccagaauu

SEQ ID NO: 2696 - RNA, 1771 nt, Artificial Sequence
  mRNA product Design a-2 comprising derived and/or modified sequence from LASV(G502-SLE-2009;Clade IV)__AIT17126__GPC (opt4)
gggagaguccgcucagccagguugcagaagcggcuuagcguguguccuaaucuucucucugcguguagguaggccugugccgcaaacaagcuuaccaugggccagaucgugaccuucuuccaggaggugccccacgugaucgaggaggugaugaacaucgugcugaucgcccugagcauccuggccgugcugaagggccuguacaacuucgccaccugcggccuggugggccugcugaccuuccugcugcugugcggcagaagcugcaccaccggccuguacaagggcguguacgagcugcagacccuggagcugaacauggagacccugaacaugaccaugccccugagcugcaccaagaacaacagccaccacuacaucauggugggcaacgagaccggccuggagcugacccugaccaacaccagcaucaucaaccacaaguucugcaaccugagcgacgcccacaagaagaaccuguacgaccacgcccugaugagcaucaucagcaccuuccaccugagcauccccaacuucaaccaguacgaggccaugagcugcgacuucaacggcggcaagaucagcgugcaguacaaccugagccacagcuacgccggcgacgccgccgaccacugcggcaccguggccaacggcgugcugcagaccuucaugagaauggccuggggcggcagcuacaucgcccuggacagcggcagaggcagaugggacugcaucaugaccagcuaccaguaccugaucauccagaacaccaccugggaggaccacugccaguucagcagacccagccccaucggcuaccugggccugcugagccagagaaccagagacaucuacaucagcagaagacugcugggcaccuucaccuggacccugagcgacagcgagggcaaggacacccccggcggcuacugccugaccagauggaugcugaucgaggccgagcugaagugcuucggcaacaccgccguggccaagugcaacgagaagcacgacgaggaguucugcgacaugcugagacuguucgacuucaacaagcaggccauccagagacugaaggccgaggcccagaugagcauccagcugaucaacaaggccgugaacgcccugaucaacgaccagcuggugaugaagaaccaccugagagacaucaugggcauccccuacugcaacuacagcagauacugguaccugaaccacaccaccaccggcagaaccagccugcccaagugcuggcuggugagcaacggcagcuaccugaacgagacccacuucagcgacgacaucgagcagcaggccgacaacaugaucaccgagaugcugcagaaggaguacauggagagacagggcaagaccccccugggccugguggaccuguucguguucagcaccagcuucuaccugaucagcaucuuccugcaccuggugaagauccccacccacagacacaucgugggcaagagcugccccaagccccacagacugaaccacaugggcaucugcagcugcggccuguacaagcagcccggcgugcccgugaaguggaagagaugaggacuagucccuguucccagagcccacuuuuuuuucuuuuuuugaaauaaaauagccugucuuucagaucuaaaaaaaaaaaaaaaaaaaaaaaaaaaaaaaaaaaaaaaaaaaaaaaaaaaaaaaaaaaaaaaaugcaucccccccccccccccccccccccccccccccaaaggcucuuuucagagccaccagaauu

SEQ ID NO: 2697 - RNA, 1771 nt, Artificial Sequence
  mRNA product Design a-2 comprising derived and/or modified sequence from LASV(G733-SLE-2010;Clade IV)__AIT17154__GPC (opt4)
gggagaguccgcucagccagguugcagaagcggcuuagcguguguccuaaucuucucucugcguguagguaggccugugccgcaaacaagcuuaccaugggccagaucgugaccuucuuccaggaggugccccacgugaucgaggaggugaugaacaucgugcugaucgcccugagcauccuggccgugcugaagggccuguacaacuucgccaccugcggcaucgugggccuggugagcuuccugcugcugugcggcagaagcugcaccaccagccuguacaagggcguguacgagcugcagacccuggagcugaacauggagacccugaacaugaccaugccccugagcugcaccaagaacaacagccaccacuacaucauggugggcaacgagaccggccuggagcugacccugaccaacaccagcaucaucaaccacaaguucugcaaccugagcgacgcccacaagaagaaccuguacgaccacgcccugaugagcaucaucagcaccuuccaccugagcauccccaacuucaaccaguacgaggccaugagcugcgacuucaacggcggcaagaucagcgugcaguacaaccugagccacagcuacgccggcgacgccgccaaccacugcggcaccaucgccaacggcgugcugcagaccuucaugagaauggccuggggcggcagcuacaucgcccuggacagcggcagagacagaugggacugcaucaugaccagcuaccaguaccugaucauccagaacaccaccugggaggaccacugccaguucagcagacccagccccaucggcuaccugggccugcugagccagagaaccagagacaucuacaucagcagaagacugcugggcaccuucaccuggacccugagcgacagcgagggcaaggacacccccggcggcuacugccugaccagauggaugcugaucgaggccgagcugaagugcuucggcaacaccgccguggccaagugcaacgagaagcacgacgaggaguucugcgacaugcugagacuguucgacuucaacaagcaggccauccagagacugaaggccgaggcccagaugagcauccagcugaucaacaaggccgugaacgcccugaucaacgaccagcugaucaugaagaaccaccugagagacaucaugggcauccccuacugcaacuacagcaaguacugguaccugaaccacaccaccaccggcaagaccagccugcccaagugcuggcuggugagcaacggcagcuaccugaacgagacccacuucagcgacgacaucgagcagcaggccgacaacaugaucaccgagaugcugcagaaggaguacauggagagacagggcaagaccccccugggccugguggaccuguucguguucagcaccagcuucuaccugaucagcaucuuccugcaccuggugaagauccccacccacagacacguggugggcaagagcugccccaagccccacagacugaaccacaugggcaucugcagcugcggccuguacggccagcccggcgugcccgugaaguggaagagaugaggacuagucccuguucccagagcccacuuuuuuuucuuuuuuugaaauaaaauagccugucuuucagaucuaaaaaaaaaaaaaaaaaaaaaaaaaaaaaaaaaaaaaaaaaaaaaaaaaaaaaaaaaaaaaaaaugcaucccccccccccccccccccccccccccccccaaaggcucuuuucagagccaccagaauu

SEQ ID NO: 2698 - RNA, 1771 nt, Artificial Sequence
  mRNA product Design a-2 comprising derived and/or modified sequence from MOPV/LASV reassortant(IGS-1;Clade IV)__AFY05576__GPC (opt4)
gggagaguccgcucagccagguugcagaagcggcuuagcguguguccuaaucuucucucugcguguagguaggccugugccgcaaacaagcuuaccaugggccagaucgugaccuucuuccaggaggugccccacgugaucgaggaggugaugaacaucgugcugaucgcccugagcgugcuggccgugcugaagggccuguacaacuucgccaccugcggccuggugggccuggugaccuuccugcugcugugcggcagaagcugcaccaccagccuguacaagggcguguacgagcugcagacccuggagcugaacauggagacccugaacaugaccaugccccugagcugcaccaagaacaacagccaccacuacaucauggugggcaacgagaccggccuggagcugacccugaccaacaccagcaucaucaaccacaaguucugcaaccugagcgacgcccacaagaagaaccuguacgaccacgcccugaugagcaucaucagcaccuuccaccugagcauccccaacuucaaccaguacgaggccaugagcugcgacuucaacggcggcaagaucagcgugcaguacaaccugagccacagcuacgccggcgacgccgccaaccacugcggcaccguggccaacggcgugcugcagaccuucaugagaauggccuggggcggcagcuacaucgcccuggacagcggcagaggcaacugggacugcaucaugaccagcuaccaguaccugaucauccagaacaccaccugggaggaccacugccaguucagcagacccagccccaucggcuaccugggccugcugagccagagaaccagagacaucuacaucagcagaagacugcugggcaccuucaccuggacccugagcgacagcgagggcgaggacacccccggcggcuacugccugaccagauggaugcugaucgaggccgagcugaagugcuucggcaacaccgccguggccaagugcaacgagaagcacgacgaggaguucugcgacaugcugagacuguucgacuucaacaagcaggccauccagagacugaaggccgaggcccagaugagcauccagcugaucaacaaggccgugaacgcccugaucaacgaccagcugaucaugaagaaccaccugagagacaucaugggcauccccuacugcaacuacagcaaguacugguaccugaaccacaccaccaccggcagaaccagccugcccaagugcuggcuggugagcaacggcagcuaccugaacgagacccacuucagcgacgacaucgagcagcaggccgacaacaugaucaccgagaugcugcagaaggaguacauggagagacagggcaagaccccccugggccugguggaccuguucguguucagcaccagcuucuaccugaucagcaucuuccugcaccuggugaagauccccacccacagacacaucgugggcaagagcugccccaagccccacagacugaaccacaugggcaucugcagcugcggccuguacaagcagcccggcgugcccgugaaguggaagagaugaggacuagucccuguucccagagcccacuuuuuuuucuuuuuuugaaauaaaauagccugucuuucagaucuaaaaaaaaaaaaaaaaaaaaaaaaaaaaaaaaaaaaaaaaaaaaaaaaaaaaaaaaaaaaaaaaugcaucccccccccccccccccccccccccccccccaaaggcucuuuucagagccaccagaauu

SEQ ID NO: 2699 - RNA, 1771 nt, Artificial Sequence
  mRNA product Design a-2 comprising derived and/or modified sequence from LASV(LM765-SLE-2012;Clade IV)__AIT17814__GPC (opt4)
gggagaguccgcucagccagguugcagaagcggcuuagcguguguccuaaucuucucucugcguguagguaggccugugccgcaaacaagcuuaccaugggccagaucgugaccuucuuccaggaggugccccacgugaucgaggaggugaugaacaucgugcugaucgcccugagcauccuggccgugcugaagggccuguacaacuucgccaccugcggccuggugggccuggugaccuuccugcugcugugcggcagaagcugcaccaccagccuguacaagggcguguacgagcugcagacccuggagcugaacauggagacccugaacaugaccaugccccugagcugcaccaagaacaacagccaccacuacaucauggugggcaacgagaccggccuggagcugacccugaccaacaccagcaucaucgaccacaaguucugcaaccugagcgacgcccacagaaagaaccuguacgaccacgcccugaugagcaucaucagcaccuuccaccugagcauccccaacuucaaccaguacgaggccaugagcugcgacuucaacggcggcaagaucagcgugcaguacaaccugagccacagcuacgccaaggacgccgccgaccacugcggcaccguggccaacggcgugcugcagaccuucaugagaauggccuggggcggcagcuacaucgcccuggacagcggcagaggcagaugggacugcaucaugaccagcuaccaguaccugaucauccagaacaccaccugggaggaccacugccaguucagcagacccagccccaucggcuaccugggccugcugagccagagaaccagagacaucuacaucagcagaagacugcugggcaccuucaccuggacccugagcgacagcgagggcaaggacacccccggcggcuacugccugaccagauggaugcugaucgaggccgagcugaagugcuucggcaacaccgccguggccaagugcaacgagaagcacgacgaggaguucugcgacaugcugagacuguucgacuucaacaagcaggccauccagagacugaaggccgaggcccagaugagcauccagcugaucaacaaggccgugaacgcccugaucaacgaccagcugaucaugaagaaccaccugagagacaucaugggcauccccuacugcaacuacagcaaguacugguaccugaaccacaccaccaccggcaagaccagccugcccaagugcuggcuggugagcaacggcagcuaccugaacgagacccacuucagcgacgacaucgagcagcaggccgacaacaugaucaccgagaugcugcagaaggaguacauggagagacagggcaagaccccccugggccugguggaccuguucguguucagcaccagcuucuaccugaucagcaucuuccugcaccuggugaagauccccacccacagacacaucgugggcaagcccugccccaagccccacagacugaaccacaugggcaucugcagcugcggccuguacaagcagcccggcgugcccgugaaguggaagagaugaggacuagucccuguucccagagcccacuuuuuuuucuuuuuuugaaauaaaauagccugucuuucagaucuaaaaaaaaaaaaaaaaaaaaaaaaaaaaaaaaaaaaaaaaaaaaaaaaaaaaaaaaaaaaaaaaugcaucccccccccccccccccccccccccccccccaaaggcucuuuucagagccaccagaauu

SEQ ID NO: 2700 - RNA, 1771 nt, Artificial Sequence
  mRNA product Design a-2 comprising derived and/or modified sequence from LASV(LM776-SLE-2012;Clade IV)__AIT17824__GPC (opt4)
gggagaguccgcucagccagguugcagaagcggcuuagcguguguccuaaucuucucucugcguguagguaggccugugccgcaaacaagcuuaccaugggccagaucgugaccuucuuccaggaggugccccacgugaucgaggaggugaugaacaucgugcugaucgcccugagcauccuggccgugcugaagggccuguacaacuucgccaccugcggccuggugggccuggugaccuuccugcugcugugcggcagaagcugcaccaccagcguguacaagggcguguacgagcugcagacccuggagcugaacauggagacccugaacaugaccaugccccugagcugcaccaagaacaacagccaccacuacaucauggugggcaacgagaccggccuggagcugacccugaccaacaccagcaucaucaaccacaaguucugcaaccugagcgacgcccacaagaagaaccuguacgaccacgcccugaugagcaucaucagcaccuuccaccugagcauccccaacuucaaccaguacgaggccaugagcugcgacuucaacggcggcaagaucagcgugcaguacaaccugagccacagcuacgccggcgacgccgccaaccacugcggcaccguggccaacggcgugcugcagaccuucaugagaauggccuggggcggcagcuacaucgcccuggacagcggccacggcaagugggacugcaucaugaccagcuaccaguaccugaucauccagaacaccaccugggaggaccacugccaguucagcagacccagccccaucggcuaccugggccugcugagccagagaaccagagacaucuacaucagcagaagacugcugggcaccuucaccuggacccugagcgacagcgagggcaaggacacccccggcggcuacugccugaccagauggaugcugaucgaggccgagcugaagugcuucggcaacaccgccguggccaagugcaacgagaagcacgacgaggaguucugcgacaugcugagacuguucgacuucaacaagcaggccauccagagacugaaggccgaggcccagaugagcauccagcugaucaacaaggccgugaacgcccugaucaacgaccagcugaucaugaagaaccaccugagagacaucaugggcauccccuacugcaacuacagcaaguacugguaccugaaccacaccaccaccggcaagaccagccugcccaagugcuggcuggugagcaacggcagcuaccugaacgagacccacuucagcgacgacaucgagcagcaggccgacaacaugaucaccgagaugcugcagaaggaguacauggagagacagggcaagaccccccugggccugguggaccuguucguguucagcaccagcuucuaccugaucagcaucuuccugcaccuggugaagauccccacccacagacacaucgugggcaagagcugccccaagccccacagacugaaccacaugggcaucugcagcugcggccuguacaagcagcccggcgugcccgugagauggaagagaugaggacuagucccuguucccagagcccacuuuuuuuucuuuuuuugaaauaaaauagccugucuuucagaucuaaaaaaaaaaaaaaaaaaaaaaaaaaaaaaaaaaaaaaaaaaaaaaaaaaaaaaaaaaaaaaaaugcaucccccccccccccccccccccccccccccccaaaggcucuuuucagagccaccagaauu

SEQ ID NO: 2701 - RNA, 1771 nt, Artificial Sequence
  mRNA product Design a-2 comprising derived and/or modified sequence from LASV(Mad39;Clade IV)__ANH09722__GPC (opt4)
gggagaguccgcucagccagguugcagaagcggcuuagcguguguccuaaucuucucucugcguguagguaggccugugccgcaaacaagcuuaccaugggccagaucgugaccuucuuccaggaggugccccacgugaucgaggaggugaugaacaucgugcugaucgcccugagcauccuggccgugcugaagggccuguacaacguggccaccugcggccugaucggccuggugaccuuccugcugcugugcggcagaagcugcaccaccacccuguacaagggcguguacgagcugcaggcccuggagcugaacauggagacccugaacaugaccaugccccugagcugcaccaagaacaacagccaccacuacaucagagugggcaacgagaccggccuggagcugacccugaccaacaccagccugaucaaccacaaguucugcaaccugagcgacgcccacaagaagaaccuguacgaccacgcccugaugagcaucaucagcaccuuccaccugagcauccccaacuucaaccaguacgaggccaugagcugcgacuucaacgacggcaagaucagcgugcaguacaaccugagccacaccuacgccggcgacaccgccaaccacugcggcaccguggccaacggcgugcugcagaccuucaugagaauggccuggggcggcagcuacaucgcccuggacagcggcagaggcggcugggacugcaucaugaccagcuaccaguaccugaucauccagaacaccaccugggaggaccacugccaguucagcagacccagccccaucggcuaccugggccugcugagccagagaaccagagacaucuacaucagcagaagacugcugggcaccuucaccuggacccugagcgacagcgagggcaaggacacccccggcggcuacugccugaccagauggaugcugaucgaggccgagcugaagugcuucggcaacaccgccguggccaagugcaacgagaagcacgacgaggaguucugcgacaugcugagacuguucgacuucaacaagcaggccauccagagacugaaggccgaggcccagaugagcauccagcugaucaacaaggccgugaacgcccugaucaacgaccagcugaucaugaagaaccaccugagagacaucaugggcauccccuacugcaacuacagcaaguacugguaccugaaccacaccgugaccggcaagaccagccugcccaagugcuggcuggugagcaacggcagcuaccugaacgagacccacuucagcgacgacaucgagcagcaggccgacaacaugaucaccgagaugcugcagaaggaguacauggagagacagggcaagaccccccugggccugguggaccuguucguguucagcaccagcuucuaccugaucagcaucuuccugcaccuggugaagauccccacccacagacacguggugggcaagcccugccccaagccccacagacugaaccacaugggcaucugcagcugcggcuucuacaagcagcccggcgugcccgugagauggaagagaugaggacuagucccuguucccagagcccacuuuuuuuucuuuuuuugaaauaaaauagccugucuuucagaucuaaaaaaaaaaaaaaaaaaaaaaaaaaaaaaaaaaaaaaaaaaaaaaaaaaaaaaaaaaaaaaaaugcaucccccccccccccccccccccccccccccccaaaggcucuuuucagagccaccagaauu

SEQ ID NO: 2702 - RNA, 1771 nt, Artificial Sequence
  mRNA product Design a-2 comprising derived and/or modified sequence from LASV(Z0947-SLE-2011;Clade IV)__AIT17840__GPC (opt4)
gggagaguccgcucagccagguugcagaagcggcuuagcguguguccuaaucuucucucugcguguagguaggccugugccgcaaacaagcuuaccaugggccagaucgugaccuucuuccaggaggugccccacgugaucgaggaggugaugaacaucgugcugaucgcccugagcauccuggccgugcugaagggccuguacaacuucgccaccugcggccuggugggccuggugaccuuccugcugcugugcggcagaagcugcaccaucagccuguacaagggcguguacgagcugcagacccuggagcugaacauggagacccugaacaugaccaugccccugagcugcaccaagaacaacagccaccacuacaucauggugggcaacgagaccggccuggagcugacccugaccaacaccagcaucaucaaccacaaguucugcaaccugagcgacgcccacaagaagaaccuguacgaccacgcccugaugagcaucaucagcaccuuccaccugagcauccccaacuucaaccaguacgaggccaugagcugcgacuucaacggcggcaagaucagcgugcaguacaaccugagccacagcuacgccggcgacgccgccaaccacugcggcaccguggccaacggcgugcugcagaccuucaugagaauggccuggggcggcagcuacaucgcccuggacagcggcagagacagaugggacugcaucaugaccagcuaccaguaccugaucauccagaacaccaccugggaggaccacugccaguucagcagacccagccccaucggcuaccugggccugcugagccagagaaccagagacaucuacaucagcagaagacugcugggcaccuucaccuggacccugagcgacagcgagggcaaggacacccccggcggcuacugccugaccagauggaugcugaucgaggccgagcugaagugcuucggcaacaccgccguggccaagugcaacgagaagcacgacgaggaguucugcgacaugcugagacuguucgacuucaacaagcaggccauccagagacugaaggccgaggcccagaugagcauccagcugaucaacaaggccgugaacgcccugaucaacgaccagcugaucaugaagaaccaccugagagacaucaugggcauccccuacugcaacuacagcaaguacugguaccugaaccacaccaccaccggcaagaccagccugcccaagugcuggcuggugagcaacggcagcuaccugaacgagacccacuucagcgacgacaucgagcagcaggccgacaacaugaucaccgagaugcugcagaaggaguacauggagagacagggcaagaccccccugggccugguggaccuguucguguucagcaccagcuucuaccugaucagcaucuuccugcaccuggugaagauccccacccacagacacaucgugggcaagcccugccccaagccccacagacugaaccacaugggcaucugcagcugcggccuguacaagcagcccggcgugcccgugaaguggaagagaugaggacuagucccuguucccagagcccacuuuuuuuucuuuuuuugaaauaaaauagccugucuuucagaucuaaaaaaaaaaaaaaaaaaaaaaaaaaaaaaaaaaaaaaaaaaaaaaaaaaaaaaaaaaaaaaaaugcaucccccccccccccccccccccccccccccccaaaggcucuuuucagagccaccagaauu

SEQ ID NO: 2703 - RNA, 1771 nt, Artificial Sequence
  mRNA product Design a-2 comprising derived and/or modified sequence from LASV(Josiah;Clade IV)__NP_694870__GPC (opt5)
gggagaguccgcucagccagguugcagaagcggcuuagcguguguccuaaucuucucucugcguguagguaggccugugccgcaaacaagcuuaccaugggccagaucgugaccuucuuucaagaggucccccacguuauugaagaggugaugaacaucgugcugauugcccucagcguccuggcugugcuuaaggggcuguacaauuucgccacaugcggacucguuggccuggugacguuucuucugcucugugggagauccugcaccacaucucuguauaaaggagucuacgaacugcagacccucgagcugaacauggaaacacuuaauaugaccaugccucugagcuguacaaagaacaauucccaucacuauaucauggugggcaacgagaccgggcucgagcugacgcuuaccaauacaucuauuaucaaccauaaauucugcaaucugagcgacgcgcacaagaaaaaccucuacgaucaugcucugauguccaucauuucuaccuuucaccugagcaucccgaauuucaaccaguaugaagccauguccugugacuuuaauggaggcaagauuagcguucaguacaaccucucucacuccuaugccggcgaugcugccaaucauugcgggacaguggcuaacggaguccugcaaaccuucaugcggauggccuggggcgggagcuacaucgcgcuugacucuggacgcggcaacugggauuguauuaugacguccuaccaguaucugaucauucagaauacaaccugggaggaccacugccaguuuagcagacccucuccuaucggguaccucggacugcuuucccaacggacacgcgauaucuauauuagcagacggcugcucggcaccuucaccuggacacuguccgacucugaaggcaaggauacgcccgggggauacugucugacccgcuggaugcucaucgaggccgagcugaaaugcuuuggcaacacagcuguggccaaguguaaugaaaaacaugacgaggaguucugcgauaugcuuagacuguuugacuucaacaagcaggcuauucagcggcucaaagccgaagcgcagaugagcauccaacugauuaauaaggccgugaacgcucuuaucaaugaucagcugaucaugaagaaccaccuccgcgacauuauggggaucccuuauugcaauuacuccaaauauugguaccugaaccacaccacaaccggaagaacgagccugcccaaguguuggcucgucucuaauggcuccuaccugaacgaaacacauuucagcgacgauauugagcagcaagccgacaauaugaucaccgagaugcuucagaaagaauauauggagcggcaggggaagaccccucugggacucguugaucuguuuguguucucuaccagcuuuuaccugauuuccaucuuccuucaccucgugaaaaucccgacacaucgccacauugucggcaagucuugccccaaaccucauagacugaaccacaugggcaucuguagcugcgggcuguauaagcagcccggagugccuguuaaguggaaacggugaggacuagucccuguucccagagcccacuuuuuuuucuuuuuuugaaauaaaauagccugucuuucagaucuaaaaaaaaaaaaaaaaaaaaaaaaaaaaaaaaaaaaaaaaaaaaaaaaaaaaaaaaaaaaaaaaugcaucccccccccccccccccccccccccccccccaaaggcucuuuucagagccaccagaauu

SEQ ID NO: 2704 - RNA, 1768 nt, Artificial Sequence
  mRNA product Design a-2 comprising derived and/or modified sequence from LASV(LP;Clade I)__AAF86701__GPC (opt5)
gggagaguccgcucagccagguugcagaagcggcuuagcguguguccuaaucuucucucugcguguagguaggccugugccgcaaacaagcuuaccaugggccagaucauuaccuucuuucaagaggugccccacgucaucgaagagguuaugaacauugugcugaucgcccucagccugcuugcuauucugaaggggcucuacaauaucgccacaugcggaaucauuggccugguggcguuccuuuuucugugugggaaauccugcucucucacgcugaagggaggcuaugaacugcagacccucgagcugaacauggaaacacuuaauaugaccaugccucugagcuguaccaaaaacuccucucaucacuacaucagagucgggaaugagacaggacucgagcugacacuuaccaacacgagcauuaucaaucauaaguucugcaaccuguccgacgcucacaaaaagaaucucuaugaucaugcccugaugucuauuaucagcaccuuucaccuguccauuccgaacuucaaucaguacgaagccaugagcugugacuuuaacggcggcaagaucucugugcaguauaaucucucccacagcuacgcuggggaugccgcugagcauugcggaacaguugccaacggcgugcugcaaaccuucaugcggauggcguggggagggcgcuauaucgcccuugacucuggcaaagggaauugggauuguauuaugacauccuaccaguaccugaucauucagaacaccacgugggaagaccacugccaguuuagcagacccucuccuaucggauaucucggccugcuuucccaacggacacgcgauauuuacaucagcagacggcugcucggcaccuucacauggacccuguccgacucugaggggaacgagacccccggaggcuauugucugacacgcuggaugcucaucgaagcugagcugaagugcuuugggaauacggccgucgcuaaauguaacgaaaagcaugaugaggaguucugcgacaugcuuagacuguuugauuucaauaaacaggccauucggcgccucaaggcggaagcccagaugagcauccagcugauuaacaaggcugugaaugcccuuaucaacgaccaacugauuaugaaaaaucaccucagagauaucaugggaaucccuuacugcaacuauuccaaguacugguaucugaaucacaccagcucuggccggacaucccugcccaaauguuggcucauuagcaacgggucuuaccugaaugagacccaguucagcgacgacaucgaacagcaagcugauaacaugauuacagagaugcuucagaaggaauacaucgagcgccagggaaaaaccccucugggccucguugacauuuuuaucuucuccacgucuuuuuaucugauuagcaucuuccugcaucuuaucaagauuccgacacacagacauaucgugggcaaacccugcccuaagccccaccggcucaaucauaugggggucuguuccugcggacuguacaagcacccuggcgugcccaccaaauggaagcgcugaggacuagucccuguucccagagcccacuuuuuuuucuuuuuuugaaauaaaauagccugucuuucagaucuaaaaaaaaaaaaaaaaaaaaaaaaaaaaaaaaaaaaaaaaaaaaaaaaaaaaaaaaaaaaaaaaugcaucccccccccccccccccccccccccccccccaaaggcucuuuucagagccaccagaauu

SEQ ID NO: 2705 - RNA, 1768 nt, Artificial Sequence
  mRNA product Design a-2 comprising derived and/or modified sequence from LASV(803213;Clade II)__AAF86703__GPC (opt5)
gggagaguccgcucagccagguugcagaagcggcuuagcguguguccuaaucuucucucugcguguagguaggccugugccgcaaacaagcuuaccaugggccagaucauuaccuucuuucaagaggugccccacgucaucgaagagguuaugaacauugugcugaucgcccucagccugcuugcuauucugaaggggaucuacaauguggccacaugcggacucuucggccugaucuccuuucuucugcucugugggagaucuugcagcgucacguauaaaggaguguacgaacugcagacccuggagcucaacauggcgaaucugaacaugacaaugccucuuuccuguaccaagaauaacucucaucacuauauuaugguuggcaaugaaacagggcuggagcucacccugacaaacaccagcaucauuaaucauaaauucugcaaccuuuccgacgcucacaagaaaaaucuguacgaucaugcccucaugucuaucauuagcacguuucaccuguccaucccgaacuucaaucaguaugaggccaugagcugugacuuuaacggaggcaagauuucugugcaguacaaucugucccacagcuucgcugucgaugccgcuaaccauugcggcaccaucgccaacggggugcuccaaacauuuaugcggauggcguggggaggcucuuauaucgcccuggacuccgggaagggaaauugggauuguauuaugaccagcuaccaguaccuuaucauucagaacacaaccugggaagaccacugccaguucucucgccccuccccuaucggcuaucuggggcuccugagccaaagaacgcgggauauuuacaucucccgcagacuucugggaacauuuaccuggacacucucugacagcgagggcaaugaagcucccggcggguauugucugacccgguggaugcugaucgaggccgagcucaaaugcuucggaaacaccgcuguugccaaguguaaugaaaaacaugaugaggaauuuugcgacaugcugcgccuuuucgauuucaacaagcaggcgauuaaaagacugaagacagaggcccagauguccauccagcucauuaauaaggcugugaacgcccugaucaaugaccaacuuauuaugaaaaaccaucugcgggauaucaugggcaucccuuacugcaauuauagccgcuacugguaucucaaccacacggucaccgggaagacaucucugcccagauguuggcugguguccaauggaagcuaccucaacgaaacccacuuuucugacgacauugagcagcaggcugauaauaugaucacagagaugcugcaaaaagaauacauggaccggcagggcaagaccccucuugggcugguggaucucuucgucuuuagcacguccuucuaucugauuucuaucuuucugcaccuuguuaaaauuccgacacaucgccacaucgugggaaagcccugcccuaaaccccauagacucaaccacaugggcauuuguagcugcggccuguacaagcacccuggggugcccgucaaguggaaacggugaggacuagucccuguucccagagcccacuuuuuuuucuuuuuuugaaauaaaauagccugucuuucagaucuaaaaaaaaaaaaaaaaaaaaaaaaaaaaaaaaaaaaaaaaaaaaaaaaaaaaaaaaaaaaaaaaugcaucccccccccccccccccccccccccccccccaaaggcucuuuucagagccaccagaauu

SEQ ID NO: 2706 - RNA, 1768 nt, Artificial Sequence
  mRNA product Design a-2 comprising derived and/or modified sequence from LASV(GA391;Clade III)__CAA36645__GPC (opt5)
gggagaguccgcucagccagguugcagaagcggcuuagcguguguccuaaucuucucucugcguguagguaggccugugccgcaaacaagcuuaccaugggccagaucgugaccuucuuucaagaggucccccacguuauugaagaggugaugaacaucgugcugauugcccucagcauccuggcuauucuuaaggggcuguacaaugucgccacaugcggacucaucggccuggugacguuccuucugcucuccgggagaucuuguagccugaucuauaaaggaaccuacgaacugcagacacucgagcugaacauggaaacccuuaauaugacaaugccucuguccugcaccaagaacaauucucaucacuauauucggguuggcaacgagacagggcucgagcugacccuuacgaauaccagcauccugaaccauaaauuuuguaaucucuccgacgcgcacaagcgcaaccuguacgaucauucucugaugagcauuaucuccacauuccaccucagcauuccgaauuuuaaccaguaugaagcuaugucuugcgacuucaauggaggcaaaaucaccgugcaguacaaccugucccacagcuuugccgucgaugccgcuggccauugugggacacuugccaauggagugcugcaaaccuucaugagaauggcuuggggcgggucuuauauugcccucgacuccggacggggcaacugggauugcaucaugacgagcuaccaguaccugaucauucagaacacaaccugggacgaucacugucaguuuucucgccccuccccuaucggguaucuuggacugcucagccaaagaacacgggacauuuacaucucccgcagacugcugggcaccuucaccuggacacucucugauagcgagggcaaugaaacgcccgggggauauugccugacccgguggaugcuuauugaggcggagcugaaguguuuuggcaacacagccguugcuaagugcaaugaaaaacaugacgaggaguucugugauaugcuccgccuguuugacuucaacaagcaggccaucagacggcuuaaaaccgaagcucagauguccauccagcugauuaauaaggccgugaacgcgcucaucaaugaucaacugauuaugaaaaaccaucugcgcgacaucauggggauuccuuacugcaauuauagcagauacugguaucucaaccacacaucuaccggaaagacgucccugccccggugcuggcuuaucagcaauggcucuuaccugaacgaaacaaaguucagcgacgauaucgagcagcaggccgacaauaugauuaccgagaugcuccaaaaagaauacaucgaucgccaggggaagaccccucugggacuggucgaccuuuuuguguucuccacaucuuuuuaucucauuagcaucuuccugcaccuggugaaaauuccgacccacagacauaucgucggcaagcccuguccuaaaccccaccggcucaaccauaugggcauuugcuccugugggcuguacaagcagccuggaguucccgugagauggaaacgcugaggacuagucccuguucccagagcccacuuuuuuuucuuuuuuugaaauaaaauagccugucuuucagaucuaaaaaaaaaaaaaaaaaaaaaaaaaaaaaaaaaaaaaaaaaaaaaaaaaaaaaaaaaaaaaaaaugcaucccccccccccccccccccccccccccccccaaaggcucuuuucagagccaccagaauu

SEQ ID NO: 2707 - RNA, 1771 nt, Artificial Sequence
  mRNA product Design a-2 comprising derived and/or modified sequence from LASV(AV;Clade V)__CCA30314__GPC (opt5)
gggagaguccgcucagccagguugcagaagcggcuuagcguguguccuaaucuucucucugcguguagguaggccugugccgcaaacaagcuuaccaugggccagaucgugaccuucuuucaagaggucccccacguuauugaagaggugaugaacaucgugcugauugcccucagcauccuggcuguccuuaaggggcuguacaauauugccacaugcggacucaucggccugaucacguuccuucugcucugugggagauccugcucuagcaaccuguauaaaggaguguacgaacugcagucccucgaccugaauauggagacccuuaacaugacaaugccucugucuuguaccaagaauaacagccaucacuauauucggguuggcaaugauacagggcucgaacugacccuuacaaacaccuccauccugaaucauaaauuuugcaaccucucugacgcgcacaagaaagaucuguacgaccaugcucugaugagcauuaucuccacguuccaccucagcauuccgaauuuuaaccaguaugaggccaugucuugugauuucaauggaggcaagaucuccgugcaguacaaccugagccacucuuaugccauugacgcugccaaucauugcggcaccgucgcuaacgggauccuucaaacauuuaugcgcauggccuggggaggcuccuacaucgcgcuggauagcgggagaggaaacugggacuguauuaugaccucuuaccaguaucucaucauucagaauacaaccugggagaaccacugccaguucucccggcccagcccuaucggcuaccuggggcuucugucccaacgcacgagagauauuuauaucucucggcgccuccugggaacauuuaccuggacacugagcgacuccgaaggcaaugccacccccggcggguacugucucaccagauggaugcugaucgaggcugaacuuaagugcuucggaaacacagccguggcuaaauguaaugagaagcaugaugaggaauuuugcgacaugcugcgccucuucgauuuuaacaaacaggccauuagccggcugaagucugaggcgcagauguccauccagcuuauuaauaaagccguuaacgcucugaucaaugaccaacucauuaugaagaaccaccugagagacaucaugggcaucccuuauugcaauuacagcaaguauugguaccugaaccacacgauuaccgggaaaacaucucuccccaaguguuggcuggugagcaauggauccuaccuuaacgaaacccauuucucugaugacaucgagcagcaggccgauaauaugauuacagaaaugcugcaaaaagaguauauggagcggcagggcaagaccccucucgggcuggucgaccuguucguguuuagcacguccuucuaccuuaucagcauuuuucuccgccuggugaaaaucccgacacacagacauauugucggaaagcccugcccuaaaccccaccggcugaaccauaugggcaucuguucuugcggccucuauaagcagccugggguucccgugcgcuggaagagaugaggacuagucccuguucccagagcccacuuuuuuuucuuuuuuugaaauaaaauagccugucuuucagaucuaaaaaaaaaaaaaaaaaaaaaaaaaaaaaaaaaaaaaaaaaaaaaaaaaaaaaaaaaaaaaaaaugcaucccccccccccccccccccccccccccccccaaaggcucuuuucagagccaccagaauu

SEQ ID NO: 2708 - RNA, 1768 nt, Artificial Sequence
  mRNA product Design a-2 comprising derived and/or modified sequence from LASV(Togo/2016/7082;Clade VI)__AMR44577__GPC (opt5)
gggagaguccgcucagccagguugcagaagcggcuuagcguguguccuaaucuucucucugcguguagguaggccugugccgcaaacaagcuuaccaugggccagaucauuaccuucuuucaagaggugccccacgucaucgaagagguuaugaacauugugcugaucgcccucagccugcuugcuauucugaaggggguguacaaugucgccacaugcggaaucaucggccucgugacguuccuguuucuuugugggagauccugcucucugauuuauaaaggaagcuacgaacuccagacccuggagcugaacauggaaacacucaauaugaccaugccucuguccuguacaaagaacucuagccaucacuauauccggguuggcaaugagaccgggcuugagcugacacucaccaacacguccauuaucaaucauaaauucugcaaccugucugacgcgcacaagcgcaaucuuuacgaucaugcucugaugagcauucucuccaccuuucaccugagcaucccgaacuucaaucaguaugaagccaugucuugugacuuuaacggaggcaaaauuuccgugcaguacaaucugagccacgccuaugcugucgaugccgcugagcauugcggcacaguggccaacgggguucuccaaaccuucaugagaauggcguggggaggcucuuacaucgcccuggacuccgggcggggaaauugggauuguaucaugacaagcuaccaguaucuuauuauccagaacaccacgugggaagaccacugccaguuuucucgccccuccccuauuggcuaccuggggcuccugagccaaagaacacgggauaucuauauuucccgcagacuucugggaaccuucacauggacccucucugacagcgagggcaacgagacccccggcggguacugucugacacgguggaugcugaucgaagcugagcucaagugcuuuggaaauacggccguggcuaaguguaacgaaaaacaugaugaggaguucugcgacaugcugcgccuuuuugauuucaauaagcaggccauccagagacugaaauccgaagcgcagaugagcauucaacucaucaacaaggccgucaaugcucugauuaacgaccagcuuaucaugaaaaaucaucugcgggauaugaugggcauuccuuauugcaacuacucuaaguauugguaccucaaucacaccuccagcgggcgcacaucucugcccaaguguuggcuggugagcaacggauccuaccucaaugagacccacuucucugacgacaucgaacagcaagccgauaacaugaucacagagaugcugcagaaagaauauauugacagacagggcaagaccccucuugggcugguggaucucuuugucuucagcacguccuuuuaccugaucagcauuuuccugcaccuuaucaaaauuccgacacaucggcacaucguuggaaagcccugcccuaaaccccaucgccucaaucacaugggcauuuguucuugcggccuguauaagcagccuggggugcccaccagauggaaacggugaggacuagucccuguucccagagcccacuuuuuuuucuuuuuuugaaauaaaauagccugucuuucagaucuaaaaaaaaaaaaaaaaaaaaaaaaaaaaaaaaaaaaaaaaaaaaaaaaaaaaaaaaaaaaaaaaugcaucccccccccccccccccccccccccccccccaaaggcucuuuucagagccaccagaauu

SEQ ID NO: 2709 - RNA, 1768 nt, Artificial Sequence
  mRNA product Design a-2 comprising derived and/or modified sequence from LASV(KAK-428;Clade n.d. (VII))__ANH09740__GPC (opt5)
gggagaguccgcucagccagguugcagaagcggcuuagcguguguccuaaucuucucucugcguguagguaggccugugccgcaaacaagcuuaccaugggccagaucgugaccuucuuucaagaggucccccacguuauugaagaggugaugaacaucgugcugauugcccucagccugcuugcuauccugaaggggcucuacaauuucgccacaugcggagucauuggccugaucacguuucuucugcucugugggagauccugcucugcgaccuauaaaggacaguacgaacugcagacacuggagcucaacauggaaagccugaauaugaccaugccucuuuccuguacaaagaacaauucucaucacuauauccgggcuggcaacaauaccgggcuggagcucacacugaccaacacgagcauuaucucccauaaauucugcaaucuuucugacgcccacaagaaaaaccuguacgaucauacccucaugagcauuaucacaaccuuucaccuguccauuccgaauuucaaccaguaugaggccaugagcugugacuuuaauggaggcaagaucucuauucaauacaaccugucccacagcuaugcuggcgaugccgcucagcauugcgggacaguggccaauggaguucuccagaccuucaugcgcauggcguggggcgggucuuaccuggcccuugacuccggaagacggggcugggauuguaucaucagcucuuaccaguaucugauuauccaaaacacgacaugggacgaucacugccaguuuucccgccccagcccuauuggguaccucggauucgugucccagaagaccagagacaucuauauuucucggcgccugcuuggcacauuuaccuggacccugagcgauuccgaaggccaugacaugcccgggggauacugucucacaagauggaugcugaucgaggcugaucugaaaugcuucggcaacacggccgucgcuaaguguaaugaaaaacacgacgaggaguuuugcgauauguggcgccucuucgacuucaacaagcaggccauccaacggcugaaagcggaagcccagaugaauauucagcuuaucaacaaggcugugaaugcccugauuaacgaccaacucaugaugaagaaucaccugagagauaucauggggauuccuuauugcaacuacagcaaauuuugguaucuuaauaacaccacaaccggacggacaucucugccccgcuguuggcucaucuccaauggcagcuaccugaacgagacccauuucucugacgauaucgaacagcaggcugacaauaugauuacggagaugcugcagaaggaauacauggauagacaagggaaaacaccucucggacugguugaccuuuuuguguucagcaccuccuuuuaucugaucaccauuuuccuccaccuggucaagaucccgacacaucggcacauugugggcaaacccugcccuaagccccaucgccugaaccacaugggcaucuguucuugcgggcuuuacaaacagccuggagugcccgucagauggaagcggugaggacuagucccuguucccagagcccacuuuuuuuucuuuuuuugaaauaaaauagccugucuuucagaucuaaaaaaaaaaaaaaaaaaaaaaaaaaaaaaaaaaaaaaaaaaaaaaaaaaaaaaaaaaaaaaaaugcaucccccccccccccccccccccccccccccccaaaggcucuuuucagagccaccagaauu

SEQ ID NO: 2710 - RNA, 1768 nt, Artificial Sequence; identical to SEQ ID NO: 2704
  mRNA product Design a-2 comprising derived and/or modified sequence from LASV(Pinneo-NIG-1969;Clade I)__AIT17836__GPC (opt5)

SEQ ID NO: 2711 - RNA, 1768 nt, Artificial Sequence
  mRNA product Design a-2 comprising derived and/or modified sequence from LASV(ISTH0009-NIG-2011;Clade II)__AIT17404__GPC (opt5)
gggagaguccgcucagccagguugcagaagcggcuuagcguguguccuaaucuucucucugcguguagguaggccugugccgcaaacaagcuuaccaugggccagaucauuaccuucuuucaagaggugccccacgucaucgaagagguuaugaacauugugcugaucgcccucagccugcuugcuauucugaaggggaucuacaauguggccacaugcggacucuucggccuggucuccuuucuucugcucugugggagaucuugcagcacgaccuauaaaggaguguacgaacugcagacacuggagcucgacauggcgucccugaacaugaccaugccucuuucuuguacaaagaauaacagccaucacuauaucaugguuggcaaugaaaccgggcuggagcucacacugaccaacacguccauuaucaaucauaaauucugcaaccuuucugaugcucacaagaaaaaucuguacgaccaugcccucaugagcauuaucuccaccuuucaccugagcauuccgaacuucaaucaguaugaggccaugucuugugauuuuaacggaggcaagaucuccgugcaguacaaucugagccacgcuuaugccgucgacgcugccaaccauugcggcacaauugcgaauggggugcuccaaaccuucaugcggauggccuggggaggcucuuacaucgcucuggauuccgggaagggaagcugggacuguaucaugacaucuuaccaguaucuuauuauccagaacaccacgugggaagaucacugccaguuuucccgccccagcccuauuggcuaccuggggcuccugucccaaagaacacgggacaucuauauuucucgcagacuucugggaaccuucacauggacccucagcgauuccgagggcaacgaaacccccggcggguacugucugacacgguggaugcugaucgaggccgagcucaaaugcuuuggaaauacggcuguugccaaguguaacgaaaaacaugacgaggaguucugcgauaugcugcgccuuuuugacuucaauaagcaggcgaucagacggcugaaaaccgaagcccagaugagcauucagcucaucaacaaggcugugaaugcccugauuaacgaucaacuuaucaugaagaaucaucugcgcgacauuaugggcaucccuuauugcaacuacucuaaauauugguaccucaaucacacagucaccgggaagacaucccugcccagauguuggcuggugagcaacggaucuuaccucaaugaaacccacuucagcgacgauaucgagcagcaggcugacaacaugauuacggagcugcuucaaaaagaauauauggaucggcagggcaagacaccucuggggcucguggaccuguuugucuucuccaccucuuuuuaccugaucagcauuuuccuucaccucaucaaaauuccgacccaucgccacaucacaggaaagcccugcccuaaaccccauagacugaaucacaugggcauuuguuccugcggccuguauaagcacccugggguucccgugaaguggaaacggugaggacuagucccuguucccagagcccacuuuuuuuucuuuuuuugaaauaaaauagccugucuuucagaucuaaaaaaaaaaaaaaaaaaaaaaaaaaaaaaaaaaaaaaaaaaaaaaaaaaaaaaaaaaaaaaaaugcaucccccccccccccccccccccccccccccccaaaggcucuuuucagagccaccagaauu

SEQ ID NO: 2712 - RNA, 1768 nt, Artificial Sequence
  mRNA product Design a-2 comprising derived and/or modified sequence from LASV(ISTH2010-NIG-2012;Clade II)__AIT17482__GPC (opt5)
gggagaguccgcucagccagguugcagaagcggcuuagcguguguccuaaucuucucucugcguguagguaggccugugccgcaaacaagcuuaccaugggccagaucauuaccuucuuucaagaggugccccacgucaucgaagagguuaugaacauugugcugaucgcccucagccugcuugcuauucugaaggggaucuacaauguggccacaugcggacucuucggccuggucuccuuucuucugcucugugggagaucuugcagcacgaccuauaaaggaguguacgaacugcagacacuggagcucgacauggcgucccugaacaugaccaugccucuuucuuguacaaagaauaacagccaucacuauaucaugguuggcaaugaaaccgggcuggagcucacacugaccaacacguccauuaucaaucauaaauucugcaaccuuucugaugcucacaagaaaaaucuguacgaccaugcccucaugagcauuaucuccaccuuucaccugagcauuccgaacuucaaucaguaugaggccaugucuugugauuuuaacggaggcaagaucuccgugcaguacaaucugagccacgcuuaugccgucgacgcugccaaccauugcggcacaauugcgaauggggugcuccaaaccuucaugcggauggccuggggaggcucuuacaucgcucuggauuccgggaagggaagcugggacuguaucaugacaucuuaccaguaucuuauuauccagaacauuaccugggaagaucacugccaguuuucccgccccagcccuaucggcuaccuggggcuccugucccaaagaacgcgggacauuuauaucucucgcagacuucugggaacauucaccuggacacucagcgauuccgagggcaacgaaacccccggcggguacugucugacccgguggaugcugaucgaggccgagcucaaaugcuuuggaaauacagcuguugccaaguguaacgaaaaacaugacgaggaguucugcgauaugcugcgccuuuuugacuucaauaagcaggcgauuagacggcugaaaacggaagcccagaugagcauccagcucauuaacaaggcugugaaugcccugaucaacgaucaacuuauuaugaagaaucaucugcgcgacaucaugggcaucccuuauugcaacuacucuaaauauugguaccucaaucacaccgucacagggaagaccucccugcccagauguuggcuggugagcaacggaucuuaccucaaugaaacacacuucagcgacgauauugagcagcaggcugacaacaugaucaccgagcugcuucaaaaagaauauauugaucggcagggcaagacgccucuggggcucguggaccuguuugucuucuccacaucuuuuuaccugaucagcauuuuccuucaccucguuaaaaucccgacccaucgccacguggugggaaagcccugcccuaaaccccauagacugaaucacaugggcauuuguuccugcggccuguauaagcacccugggguccccgugaaguggaaacggugaggacuagucccuguucccagagcccacuuuuuuuucuuuuuuugaaauaaaauagccugucuuucagaucuaaaaaaaaaaaaaaaaaaaaaaaaaaaaaaaaaaaaaaaaaaaaaaaaaaaaaaaaaaaaaaaaugcaucccccccccccccccccccccccccccccccaaaggcucuuuucagagccaccagaauu

SEQ ID NO: 2713 - RNA, 1768 nt, Artificial Sequence
  mRNA product Design a-2 comprising derived and/or modified sequence from LASV(Lassa virus/H.sapiens-wt/NGA/2015/ISTH_0543;Clade II)__AVO03639__GPC (opt5)
gggagaguccgcucagccagguugcagaagcggcuuagcguguguccuaaucuucucucugcguguagguaggccugugccgcaaacaagcuuaccaugggccagaucauuaccuucuuucaagaggugccccacgucaucgaagagguuaugaacauugugcugaucgcccucagccugcuugcuauucugaaggggaucuacaauguggccacaugcggacucuucggccuggucuccuuucuucugcucugugggagaucuugcagcacgaccuauaaaggaguguacgaacugcagacacuggagcucgacauggcgaaccugaauaugaccaugccucuuuccuguacaaagaacaauucucaucacuauaucaugguuggcaacgaaaccgggcuggagcucacacugaccaauacgagcauuaucaaccauaaauucugcaaucuuuccgaugcucacaagaaaaaccuguacgaccaugcccucaugucuauuaucagcaccuuucaccuguccauuccgaauuucaaccaguaugaggccaugagcugugauuuuaauggaggcaagaucucugugcaguacaaccugucccacacauaugcugucgacgccgcuaaucauugcggcaccauugccaacggggugcuccaaacauucaugcggauggcguggggaggcagcuacaucgcccuggauucugggaagggauccugggacuguaucaugaccagcuaccaguaucuuguuauucagaacacgacaugggaagaucacugccaguuuucucgccccuccccuaucggcuaccuggggcuccugagccaaagaacccgggacauuuauaucucccgcagacuucugggaacauucaccuggacccucucugauagcgagggcaaugaaacacccggcggguacugucugacgcgguggaugcugauugaggcugagcucaaaugcuuuggaaacaccgccguggcuaaguguaaugaaaaacaugacgaggaguucugcgauaugcugcgccuuuuugacuucaacaagcaggccaucagacggcugaaaacagaagcgcagauguccauccagcucauuaauaaggccgucaacgcucugaucaaugaucaacuuauuaugaagaaccaucugcgcgacaucaugggcauuccuuauugcaauuacagcaaauauugguaccucaaccacaccgugacagggaagaccucucugcccagauguuggcugguguccaauggaagcuaccucaacgaaacgcacuucucugacgauaucgagcagcaggccgacaauaugaucacagagcugcuucaaaaagaauauauugaucggcagggcaagaccccucuggggcucgucgaccuguuuguuuucagcaccuccuuuuaccugaucucuauuuuccuucaccucgugaaaaucccgacacaucgccacauuaccggaaagcccugcccuaaaccccauagacugaaccacaugggcaucuguagcugcggccuguauaagcacccuggggugcccgucaaguggaaacggugaggacuagucccuguucccagagcccacuuuuuuuucuuuuuuugaaauaaaauagccugucuuucagaucuaaaaaaaaaaaaaaaaaaaaaaaaaaaaaaaaaaaaaaaaaaaaaaaaaaaaaaaaaaaaaaaaugcaucccccccccccccccccccccccccccccccaaaggcucuuuucagagccaccagaauu

SEQ ID NO: 2714 - RNA, 1768 nt, Artificial Sequence
  mRNA product Design a-2 comprising derived and/or modified sequence from LASV(Lassa virus/H.sapiens-wt/NGA/2016/ISTH_0009;Clade II)__AVO03571__GPC (opt5)
gggagaguccgcucagccagguugcagaagcggcuuagcguguguccuaaucuucucucugcguguagguaggccugugccgcaaacaagcuuaccaugggccagaucauuaccuucuuucaagaggugccccacgucaucgaagagguuaugaacauugugcugaucgcccucagccugcuugcuauucugaaggggaucuacaauguggccacaugcggacuccugggccuugucuccuuccugcuccugugugggagaucuugcagcacgaccuauaaaggaguguacgaacugcagacacucgagcuggacauggcgucccuuaacaugaccaugccucugucuuguacaaagaauaacagccaucacuauaucaugguuggcaaugaaaccgggcucgagcugacacuuaccaacacguccauuaucaaucauaaauuuugcaaccugucugaugcucacaagaaaaaucucuacgaccaugcccugaugagcauuaucuccaccuuccaccugagcauuccgaacuuuaaucaguaugaggccaugucuugugauuucaacggaggccggaucuccgugcaguacaaucucagccacucuuaugcugucgacgccgcuaaccauugcggcacaauugccaauggggugcugcaaaccuuuaugcgcauggcguggggaggcuccuacaucgcccuugauagcgggaagggaucuugggacuguaucaugacauccuaccaguaucugauuauccagaacaccacgugggaagaucacugccaguucagcagacccuccccuauuggcuaccucgggcugcuuucucaacggacacgcgacaucuauauuagcagacggcugcucggaaccuuuacauggacccuguccgauagcgagggcaacgaaacccccggcggguacugucugacacgcuggaugcucaucgaggcugagcugaagugcuucggaaauacggccguugcuaaauguaacgaaaagcaugacgaggaauuuugcgauaugcuuagacuguucgacuuuaauaaacaggccauccggcgccucaagaccgaggcgcagaugucuauucagcugaucaacaaagccgugaaugcucuuauuaacgaucaacugaucaugaagaaucaccucagagacauuaugggcaucccuuauugcaacuacuccaaguauugguaccugaaucacacagucaccgggaaaacaagccugccccgguguuggcucgugucuaacggaagcuaccugaaugaaacccauuucuccgacgauaucgagcagcaggccgacaacaugauuacggagcuucugcaaaaggaauauaucgaucgccagggcaaaacaccucucgggcugguggaccuguucgucuuuucuaccagcuucuaccuuauuuccaucuuucuccaccugguuaagauuccgacccauagacacaucacaggaaaacccugcccuaagccccaucggcugaaucacaugggcauuuguagcugcggccucuauaaccacccuggggugcccgugaaauggaagcgcugaggacuagucccuguucccagagcccacuuuuuuuucuuuuuuugaaauaaaauagccugucuuucagaucuaaaaaaaaaaaaaaaaaaaaaaaaaaaaaaaaaaaaaaaaaaaaaaaaaaaaaaaaaaaaaaaaugcaucccccccccccccccccccccccccccccccaaaggcucuuuucagagccaccagaauu

SEQ ID NO: 2715 - RNA, 1768 nt, Artificial Sequence
  mRNA product Design a-2 comprising derived and/or modified sequence from LASV(Lassa virus/H.sapiens-wt/NGA/2016/ISTH_0017;Clade II)__AVO03567__GPC (opt5)
gggagaguccgcucagccagguugcagaagcggcuuagcguguguccuaaucuucucucugcguguagguaggccugugccgcaaacaagcuuaccaugggccagaucauuaccuucuuucaagaggugccccacgucaucgaagagguuaugaacauugugcugaucgcccucagccugcuugcuauucugaaggggaucuacaauguggccacaugcggacucuucggccuggucuccuuucuucugcucugugggagaucuugcagcacgaccuauaaaggaguguacgaacugcagacacuggagcucgacauggcgucccugaacaugaccaugccucuuucuuguacaaagaauaacagccaucacuauaucaugguuggcaaugaaaccgggcuggagcucacacugaccaacacguccauuaucaaucauaaauucugcaaccuuucugaugcucacaagaaaaaucuguacgaccaugcccucaugagcauuaucuccaccuuucaccugagcauuccgaacuucaaucaguaugaggccaugucuugugauuuuaacggaggcaagaucuccgugcaguacaaucugagccacacauaugcuauugacgccgcuaaccauugcggcaccaucgccaaugggguccuccaaacauucaugcggauggcguggggaggcucuuacaucgcccuggauuccgggaagggaagcugggacuguauuaugaccucuuaccaguaucuuaucauucagaacacgacaugggaagaucacugccaguuuucccgccccagcccuaucggcuaccuggggcuccugucccaaagaacccgggacauuuauaucucucgcagacuucugggaacauucaccuggacccucagcgauuccgagggcaacgaaacacccggcggguacugucugacgcgguggaugcugaucgaggcugagcucaaaugcuuuggaaauaccgccguggcuaaguguaacgaaaaacaugacgaggaguucugcgauaugcugcgccuuuuugacuucaauaagcaggccauuagacggcugaaaacagaagcgcagaugagcauccagcucauuaacaaggccguuaaugcucugaucaacgaucaacuuauuaugaagaaucaucugcgcgacaucaugggcaucccuuauugcaacuacucuaaauauugguaccucaaucacaccgugacagggaagaccucccugcccagauguuggcuggucagcaacggaucuuaccucaaugaaacgcacuucagcgacgauauugagcagcaggccgacaacaugaucacagagcugcuucaaaaagaauauauggaucggcagggcaagaccccucuggggcucguggaccuguuuguguucuccaccucuuuuuaccugauuagcaucuuccuucaccucguccgcauuccgacacauagacacguuaucggaaaacccugcccuaagccccaucggcugaaucacaugggcauuuguuccugcggccuguauaaacacccuggggugcccgugaaguggaagcgcugaggacuagucccuguucccagagcccacuuuuuuuucuuuuuuugaaauaaaauagccugucuuucagaucuaaaaaaaaaaaaaaaaaaaaaaaaaaaaaaaaaaaaaaaaaaaaaaaaaaaaaaaaaaaaaaaaugcaucccccccccccccccccccccccccccccccaaaggcucuuuucagagccaccagaauu

SEQ ID NO: 2716 - RNA, 1768 nt, Artificial Sequence
  mRNA product Design a-2 comprising derived and/or modified sequence from LASV(Lassa virus/H.sapiens-wt/NGA/2018/ISTH_0959;Clade II)__AVV65099__GPC (opt5)
gggagaguccgcucagccagguugcagaagcggcuuagcguguguccuaaucuucucucugcguguagguaggccugugccgcaaacaagcuuaccaugggccagaucauuaccuucuuucaagaggugccccacgucaucgaagagguuaugaacauugugcugaucgcccucagccugcuugcuauucugaaggggaucuacaauguggucacaugcggacucuucggccugguguccuuucuucugcucugugggagaucuugcagcacgaccuauaaaggaguuuacgaacugcagacacuggagcucgacauggccucccugaacaugaccaugccucuuucuuguacaaagaauaacagccaucacuauaucauggugggcaaugaaaccgggcuggagcucacacugaccaacacguccauuaucaaucauaaauucugcaaccuuucugaugcgcacaagaaaaaucuguacgaccaugcucucaugagcauuaucuccaccuuucaccugagcauuccgaacuucaaucaguaugaggccaugucuugugauuuuaacggaggcaagaucuccguccaguacaaucugagccacgccuaugcuauugacgccgcuaaccauugcggcacaaucgccaauggggugcuccaaaccuucaugcggauggcguggggaggcucuuacaucgcccuggauuccgggaagggaagcugggacuguauuaugacaucuuaccaguaucuuaucauucagaacaccacgugggaagaucacugccaguuuucccgccccagcccuaucggcuaccuggggcuccugucccaaagaacacgggacauuuauaucucucgcagacuucugggaaccuucacauggacccucagcgauuccgagggcaacgaaacccccggcggguacugucugacacgguggaugcugaucgaggcugagcucaaaugcuuuggaaauacggccguugcuaaguguaacgaaaaacaugacgaggaguucugcgauaugcugcgccuuuuugacuucaauaagcaggccauuagacggcugaaaaccgaagcgcagaugagcauccagcucauuaacaaggccgugaaugcucugaucaacgaucaacuuauuaugaagaaucaucugcgcgacaucaugggcaucccuuauugcaacuacucuaaauauugguaccucaaucacacagucaccgggaagacaucccugcccagauguuggcuggugagcaacggaucuuaccucaaugaaacccacuucagcgacgauauugagcagcaggccgacaacaugaucacggagcugcuucaaaaagaauauauugaucggcagggcaagacaccucuggggcucguggaccuguuugucuucuccaccucuuuuuaccugaucagcauuuuccuucaccucguuaaaaucccgacccaucgccacgugauuggaaagcccugcccuaaaccccauagacugaaucacaugggcaucuguuccugcggccuguauaagcacccuggggugcccgucaaguggaaacggugaggacuagucccuguucccagagcccacuuuuuuuucuuuuuuugaaauaaaauagccugucuuucagaucuaaaaaaaaaaaaaaaaaaaaaaaaaaaaaaaaaaaaaaaaaaaaaaaaaaaaaaaaaaaaaaaaugcaucccccccccccccccccccccccccccccccaaaggcucuuuucagagccaccagaauu

SEQ ID NO: 2717 - RNA, 1768 nt, Artificial Sequence
  mRNA product Design a-2 comprising derived and/or modified sequence from LASV(LASV003-NIG-2008;Clade II)__AIT17580__GPC (opt5)
gggagaguccgcucagccagguugcagaagcggcuuagcguguguccuaaucuucucucugcguguagguaggccugugccgcaaacaagcuuaccaugggccagaucauuaccuucuuucaagaggugccccacgucaucgaagagguuaugaacauugugcugaucgcccucagccugcuugcuauucugaaggggaucuacaauguggccacaugcggacucuucggccuggucuccuuucuucugcucugugggagaucuugcagcacgaccuauaaaggaguguacgaacugcagacacuggagcucgacauggcgucccugaacaugaccaugccucuuucuuguacaaagaauaacagccaucacuauaucaugguuggcaaugaaaccgggcuggagcucacacugaccaacacguccauuaucaaucauaaauucugcaaccuuucugaugcucacaagaaaaaucuguacgaccaugcccucaugagcauuaucuccaccuuucaccugagcauuccgaacuucaaucaguaugaggccaugucuugugauuuuaacggaggcaagaucuccgugcaguacaaucugagccacacauaugcugucgacgccgcuaaccauugcggcaccauugccaauggggugcuccaaacauucaugcggauggcguggggaggcucuuacaucgcccuggauuccgggaagggaagcugggacuguaucaugaccucuuaccaguaucuuauuauccagaacacgacaugggaagaucacugccaguuuucccgccccagcccuauuggcuaccuggggcuccugucccaaagaacccgggacaucuauauuucucgcagacuucugggaacauucaccuggacccucagcgauuccgagagcaacgaaacacccggcggcuacugucugacgcgguggaugcugaucgaggcugagcucaaaugcuuugggaauaccgccguugcuaaguguaacgaaaaacaugacgaggaguucugcgauaugcugcgccuuuuugacuucaauaagcaggccaucagacggcugaaagcggaagcccagaugucuauucagcucaucaacaaggcugugaaugcccugauuaacgaucaacuuaucaugaagaaucaucugcgcgacauuaugggaaucccuuauugcaacuacuccaaauauugguaccucaaucacacagucaccggcagaacaagccugccccgguguuggcuggugucuaacgggagcuaccucaaugaaacccacuucuccgacgauaucgagcagcaggcugacaacaugauuacggagcugcuucaaaaggaauauauggaucgccagggaaaaacaccucugggccucguggaccuguuugucuucucuaccagcuuuuaccugaucuccauuuuccuucaccucguuaagaucccgacccauagacacgugauugggaaacccugcccuaagccccaucggcugaaucacaugggaaucuguagcugcggccuguauaaacacccuggcgugcccgucaaguggaagcgcugaggacuagucccuguucccagagcccacuuuuuuuucuuuuuuugaaauaaaauagccugucuuucagaucuaaaaaaaaaaaaaaaaaaaaaaaaaaaaaaaaaaaaaaaaaaaaaaaaaaaaaaaaaaaaaaaaugcaucccccccccccccccccccccccccccccccaaaggcucuuuucagagccaccagaauu

SEQ ID NO: 2718 - RNA, 1768 nt, Artificial Sequence
  mRNA product Design a-2 comprising derived and/or modified sequence from LASV(LASV035-NIG-2009;Clade II)__AIT17588__GPC (opt5)
gggagaguccgcucagccagguugcagaagcggcuuagcguguguccuaaucuucucucugcguguagguaggccugugccgcaaacaagcuuaccaugggccagaucauuaccuucuuucaagaggugccccacgucaucgaagagguuaugaacauugugcugaucgcccucagccugcuugcuauucugaaggggaucuacaauguggccacaugcggacucuucggccuggucuccuuucuucugcucugugggagaucuugcagcacgaccuauaaaggaguguacgaacugcagacacuggagcucgacauggcgucccugaacaugaccaugccucuuucuuguacaaagaauaacagccaucacuauaucaugguuggcaaugaaaccgggcuggagcucacacugaccaacacguccauuaucaaucauaaauucugcaaccuuucugaugcucacaagaaaaaucuguacgaccaugcccucaugagcauuaucuccaccuuucaccugagcauuccgaacuucaaucaguaugaggccaugucuugugauuuuaacggaggcaagaucuccgugcaguacaaucugagccacgcuuaugccgucgacgcugccaaccauugcggcacaauugcgaauggggugcuccaaaccuucaugcggauggccuggggaggcucuuacaucgcucuggauuccgggaagggaagcugggacuguaucaugacaucuuaccaguaucuuauuauccagaacaccacgugggaagaucacugccaguuuucccgccccagcccuauuggcuaccuggggcuccugucccaaagaacacgggacaucuauauuucucgcagacuucugggaaccuucacauggacccucagcgauuccgagggcaacgaaacccccggcggguacugucugacacgguggaugcugaucgaggccgagcucaaaugcuuuggaaauacggcuguugccaaguguaacgaaaaacaugacgaggaguucugcgauaugcugcgccuuuuugacuucaauaagcaggcgaucagacggcugaaagccgaagcucagaugagcauucagcucaucaacaaggccgugaaugcucugauuaacgaucaacuuaucaugaagaaucaucugcgcgacauuaugggcaucccuuauugcaacuacucuaaauauugguaccucaaucacaccgucacagggaagaccucccugcccagauguuggcuggugagcaacggaucuuaccucaaugaaacacacuucagcgacgauaucgagcagcaggccgacaacaugauuaccgagcugcuucaaaaagaauauaucgaucggcagggcaagacgccucuggggcucguggaccuguuugucuucuccacaucuuuuuaccugauuagcaucuuccuucaccucguuaaaauuccgacccaucgccacgugaucggaaagcccugcccuaaaccccauagacugaaucacaugggcauuuguuccugcggccuguauaagcacccuggggugcccgucaaguggaaacggugaggacuagucccuguucccagagcccacuuuuuuuucuuuuuuugaaauaaaauagccugucuuucagaucuaaaaaaaaaaaaaaaaaaaaaaaaaaaaaaaaaaaaaaaaaaaaaaaaaaaaaaaaaaaaaaaaugcaucccccccccccccccccccccccccccccccaaaggcucuuuucagagccaccagaauu

SEQ ID NO: 2719 - RNA, 1768 nt, Artificial Sequence
  mRNA product Design a-2 comprising derived and/or modified sequence from LASV(LASV1000-NIG-2009;Clade II)__AIT17782__GPC (opt5)
gggagaguccgcucagccagguugcagaagcggcuuagcguguguccuaaucuucucucugcguguagguaggccugugccgcaaacaagcuuaccaugggccagaucauuaccuucuuucaagaggugccccacgucaucgaagagguuaugaacauugugcugaucgcccucagccugcuugcuauucugaaggggaucuacaauguggccacaugcggacucuucggccuggucuccuuucuucugcucugugggagaucuugcagcacgaccuauaaaggaguguacgaacugcagacacuggagcucgacauggcgucccugaacaugaccaugccucuuucuuguacaaagaauaacagccaucacuauaucaugguuggcaaugaaaccgggcuggagcucacacugaccaacacguccauuaucaaucauaaauucugcaaccuuucugaugcucacaagaaaaaucuguacgaccaugcccucaugagcauuaucuccaccuuucaccugagcauuccgaacuucaaucaguaugaggccaugucuugugauuuuaacggaggcaagaucuccgugcaguacaaucugagccacacauaugcugucgacgccgcuaaccauugcggcaccauugccaauggggugcuccaaacauucaugcggauggcguggggaggcucuuacaucgcccuggauuccgggaagggaagcugggacuguaucaugaccucuuaccaguaucuuauuauccagaacacgacaugggaagaucacugccaguuuucccgccccagcccuauuggcuaccuggggcuccugucccaaagaacccgggacaucuauauuucucgcagacuucugggaacauucaccuggacccucagcgauuccgagggcaacgaaacacccggcggguacugucugacgcgguggaugcugaucgaggcugagcucaaaugcuuuggaaauaccgccguugcuaaguguaacgaaaaacaugacgaggaguucugcgauaugcugcgccuuuuugacuucaauaagcaggccaucaaaagacugaagacagaagcgcagaugagcauucagcucaucaacaaggccgugaaugcucugauuaacgaucaacuuaucaugaaaaaucaucugcgggacauuaugggcaucccuuauugcaacuacucuaaguauugguaccucaaucacaccgucacagggaaaaccucccugccccgcuguuggcuggugagcaacggaucuuaccucaaugaaacgcacuucagcgacgauaucgagcagcaggccgacaacaugauuacagagcugcuucaaaaggaauauaucgauagacagggcaaaaccccucuggggcucguggaccuguuugucuucuccaccucuuuuuaccugauuagcaucuuccuucaccucguuaagauuccgacacaucggcacguggugggaaaacccugcccuaagccccaucgccugaaucacaugggcaucuguuccugcggccuguauaagcacccugggguccccgugaaauggaagagaugaggacuagucccuguucccagagcccacuuuuuuuucuuuuuuugaaauaaaauagccugucuuucagaucuaaaaaaaaaaaaaaaaaaaaaaaaaaaaaaaaaaaaaaaaaaaaaaaaaaaaaaaaaaaaaaaaugcaucccccccccccccccccccccccccccccccaaaggcucuuuucagagccaccagaauu

SEQ ID NO: 2720 - RNA, 1768 nt, Artificial Sequence
  mRNA product Design a-2 comprising derived and/or modified sequence from LASV(LASV221-NIG-2010;Clade II)__AIT17624__GPC (opt5)
gggagaguccgcucagccagguugcagaagcggcuuagcguguguccuaaucuucucucugcguguagguaggccugugccgcaaacaagcuuaccaugggccagaucauuaccuucuuucaagaggugccccacgucaucgaagagguuaugaacauugugcugaucgcccucagccugcuugcuauucugaaggggaucuacaauguggccacaugcggacucuucggccuggucuccuuucuucugcucugugggagaucuugcagcacgaccuauaaaggaguguacgaacugcagacacuggagcucgacauggcgucccugaacaugaccaugccucuuucuuguacaaagaauaacagccaucacuauaucaugguuggcaaugaaaccgggcuggagcucacacugaccaacacguccauuaucaaucauaaauucugcaaccuuucugaugcucacaagaaaaaucuguacgaccaugcccucaugagcauuaucuccaccuuucaccugagcauuccgaacuucaaucaguaugaggccaugucuugugauuuuaacggaggcaagaucuccgugcaguacaaucugagccacacauaugcuauugacgccgcuaaccauugcggcaccaucgccaaugggguccuccaaacauucaugcggauggcguggggaggcucuuacaucgcccuggauuccgggaagggaagcugggacuguauuaugaccucuuaccaguaucuuaucauucagaacacgacaugggaagaucacugccaguuuucccgccccagcccuaucggcuaccuggggcuccugucccaaagaacccgggacauuuauaucucucgcagacuucugggaacauucaccuggacccucagcgauuccgagggcaacgaaacacccggcggguacugucugacgcgguggaugcugaucgaggcugagcucaaaugcuuuggaaauaccgccguggcuaaguguaacgaaaaacaugacgaggaguucugcgauaugcugcgccuuuuugacuucaauaagcaggccauuagacggcugaaaacagaagcgcagaugagcauccagcucauuaacaaggccguuaaugcucugaucaacgaucaacuuauuaugaagaaucaucugcgcgacaucaugggcaucccuuauugcaacuacucuaaauauugguaccucaaucacaccgugacagggaagaccucccugcccagauguuggcuggucagcaacggaucuuaccucaaugaaacgcacuucagcgacgauauugagcagcaggccgacaacaugaucacagagaugcugcaaaaagaauauauggaucggcagggcaagaccccucuugggcugguggaccucuuuguguucuccaccucuuuuuaccugauuagcaucuuccugcaccuugucaaaauuccgacacaucgccacguuaucggaaagcccugcccuaaaccccauagacucaaucacaugggcauuuguuccugcggccuguauaagcacccuggggugcccgugaaguggaaacggugaggacuagucccuguucccagagcccacuuuuuuuucuuuuuuugaaauaaaauagccugucuuucagaucuaaaaaaaaaaaaaaaaaaaaaaaaaaaaaaaaaaaaaaaaaaaaaaaaaaaaaaaaaaaaaaaaugcaucccccccccccccccccccccccccccccccaaaggcucuuuucagagccaccagaauu

SEQ ID NO: 2721 - RNA, 1768 nt, Artificial Sequence
  mRNA product Design a-2 comprising derived and/or modified sequence from LASV(LASV237-NIG-2010;Clade II)__AIT17638__GPC (opt5)
gggagaguccgcucagccagguugcagaagcggcuuagcguguguccuaaucuucucucugcguguagguaggccugugccgcaaacaagcuuaccaugggccagaucauuaccuucuuucaagaggugccccacgucaucgaagagguuaugaacauugugcugaucgcccucagccugcuugcuauucugaaggggaucuacaauguggccacaugcggacucuucggccuggucuccuuucuucugcucugugggagaucuugcagcacgaccuauaaaggaguguacgaacugcagacacuggagcucgacauggcgucccugaacaugaccaugccucuuucuuguacaaagaauaacagccaucacuauaucaugguuggcaaugaaaccgggcuggagcucacacugaccaacacguccauuaucaaucauaaauucugcaaccuuucugaugcucacaagaaagaccuguacgaucaugcccucaugagcauuaucuccaccuuucaccugagcauuccgaauuucaaccaguaugaggccaugucuugugacuuuaauggaggcaagaucuccgugcaguacaaccugagccacacauaugcugucgaugccgcuaaucauugcggcaccauugccaacggggugcuccaaacauucaugcggauggcguggggaggcucuuacaucgcccuggacuccgggaagggaagcugggauuguaucaugaccucuuaccaguaucuuauuauccagaauacgacaugggaagaccacugccaguuuucccgccccagcccuauuggcuaccuggggcuccugucccaaagaacccgggauaucuauauuucucgcagacuucugggaacauucaccuggacccucagcgacuccgagggcaacgaaacacccggcggguacugucugacgcgguggaugcugaucgaggcugagcucaaaugcuuuggaaacaccgccguugcuaaguguaaugaaaaacaugaugaggaguucugcgacaugcugcgccuuuuugauuucaacaagcaggccaucagacggcugaaaacagaagcgcagaugagcauucagcucaucaauaaggccgugaacgcucugauuaaugaccaacuuaucaugaagaaccaucugcgcgacauuaugggcaucccuuauugcaauuacucuaaauauugguaccucaaccacaccgucacagggaagaccucccugcccagauguuggcuggugagcaauggaucuuaccucaacgaaacgcacuucagcgaugacaucgagcagcaggccgauaauaugauuacagagcugcuucaaaaagaauauauggaccggcagggcaagaccccucuggggcucguggaucuguuugucuucuccaccucuuuuuaccugaucagcauuuuccuucaccucaucaaaauuccgacacaucgccacaucaccggaaagcccugcccuaaaccccauagacugaaccacaugggcauuuguuccugcggccuguauaagcacccugggguucccgugaaguggaaacggugaggacuagucccuguucccagagcccacuuuuuuuucuuuuuuugaaauaaaauagccugucuuucagaucuaaaaaaaaaaaaaaaaaaaaaaaaaaaaaaaaaaaaaaaaaaaaaaaaaaaaaaaaaaaaaaaaugcaucccccccccccccccccccccccccccccccaaaggcucuuuucagagccaccagaauu

SEQ ID NO: 2722 - RNA, 1768 nt, Artificial Sequence
  mRNA product Design a-2 comprising derived and/or modified sequence from LASV(LASV253-NIG-2011;Clade II)__AIT17670__GPC (opt5)
gggagaguccgcucagccagguugcagaagcggcuuagcguguguccuaaucuucucucugcguguagguaggccugugccgcaaacaagcuuaccaugggccagaucauuaccuucuuucaagaggugccccacgucaucgaagagguuaugaacauugugcugaucgcccucagccugcuugcuauucugaaggggaucuacaauguggccacaugcggacucuucggccuggucuccuuucuucugcucugugggagaucuugcagcacgaccuauaaaggaguguacgaacugcagacacuggagcucgacauggcgucccugaacaugaccaugccucuuucuuguacaaagaauaacagccaucacuauaucaugguuggcaaugaaaccgggcuggagcucacacugaccaacacguccauuaucaaucauaaauucugcaaccuuucugaugcucacaagaaaaaucuguacgaccaugcccucaugagcauuaucuccaccuuucaccugagcauuccgaacuucaaucaguaugaggccaugucuugugauuuuaacggaggcaagaucuccgugcaguacaaucugagccacacauaugcugucgacgccgcuaaccauugcggcaccauugccaauggggugcuccaaacauucaugcggauggcguggggaggcucuuacaucgcccuggauuccgggaagggaagcugggacuguaucaugaccucuuaccaguaucuuauuauccagaacacgacaugggaagaucacugccaguuuucccgccccagcccuauuggcuaccuggggcuccugucccaaagaacccgggacaucuauauuucucgcagacuucugggaacauucaccuggacccucagcgauuccgagggcaacgaaacacccggcggguacugucugacgcgguggaugcugaucgaggcugagcucaaaugcuuuggaaauaccgccguugcuaaguguaacgaaaaacaugacgaggaguucugcgauaugcugcgccuuuuugacuucaauaagcaggccaucagacggcugaaagcggaagcccagaugagcauucagcucaucaacaaggcugugaaugcccugauuaacgaucaacuuaucaugaagaaucaucugcgcgacauuaugggcaucccuuauugcaacuacucuaaauauugguaccucaaucacacagucaccgggagaacaucccugccccgguguuggcuggugagcaacggaucuuaccucaaugaaacccacuucagcgacgauaucgagcagcaggcugacaacaugauuacggagcugcuucaaaaggaauauaucgaucgccagggcaaaacaccucuggggcucguggaccuguuugucuucuccaccucuuuuuaccugauuagcaucuuccuucaccucguuaagauuccgacccauagacacaucauuggaaaacccugcccuaagccccaucggcugaaucacaugggcaucuguuccugcggccuguauaaacacccuggggugcccgugaaguggaagcgcugaggacuagucccuguucccagagcccacuuuuuuuucuuuuuuugaaauaaaauagccugucuuucagaucuaaaaaaaaaaaaaaaaaaaaaaaaaaaaaaaaaaaaaaaaaaaaaaaaaaaaaaaaaaaaaaaaugcaucccccccccccccccccccccccccccccccaaaggcucuuuucagagccaccagaauu

SEQ ID NO: 2723 - RNA, 1768 nt, Artificial Sequence
  mRNA product Design a-2 comprising derived and/or modified sequence from LASV(LASV254-NIG-2011;Clade II)__AIT17674__GPC (opt5)
gggagaguccgcucagccagguugcagaagcggcuuagcguguguccuaaucuucucucugcguguagguaggccugugccgcaaacaagcuuaccaugggccagaucauuaccuucuuucaagaggugccccacgucaucgaagagguuaugaacauugugcugaucgcccucagccugcuugcuauucugaaggggaucuacaauguggccacaugcggacucuucggccuggucuccuuucuucugcucugugggagaucuugcagcacgaccuauaaaggaguguacgaacugcagacacuggagcucgacaugaccaaccugaauaugacaaugccucuuuccuguaccaagaacaauucucaucacuauaucaugguuggcaacgaaacagggcuggagcucacccugacgaauaccagcauuaucaaccauaaauucugcaaucuuuccgaugcgcacaagaaaaaccuguacaaucaugcucucaugucuauuaucagcacauuucaccuguccauuccgaacuucaaucaguaugaggccaugagcugugacuuuaacggaggcaagaucucugugcaguacaaucugucccacagcuaugccgucgaugcugccaaccauugcggcaccauugcuaacggggugcuccaaacauucaugcggauggccuggggaggcucuuacaucgcgcuggacuccgggaagggaaauugggauuguaucaugaccagcuaccaguaucuuauuauccagaacacgacaugggaagaccacugccaguuuucucgccccuccccuauuggcuaccuggggcuccugagccaaagaacccgggauaucuauauuucccgcagacuucugggaacauucaccuggacccucucugacagcgagggcaaugaaacacccggcggguacugucugacgcgguggaugcugaucgaggccgagcucaaaugcuuuggaaacaccgcuguugccaaguguaaugaaaaacaugaugaggaguucugcgacaugcugcgccuuuuugauuucaacaagcaggcuaucagacggcugaaaacagaagcccaggcgaauauucagcucaucaacaaggccgugaaugcucugauuaacgaccaacuuaucaugaagaaucaucugcgcgauauuaugggcaucccuuauugcaacuacuccaaauauugguaccucaaucacaccgucacagggaagaccagccugcccagauguuggcuggugucuaacggauccuaccucaaugaaacgcacuucagcgacgacaucgagcagcaggccgauaacaugauuacagagcugcuucaaaaagaauauauggaccggcagggcaagaccccucuggggcucguggaucuguuugucuucucuaccagcuuuuaccugaucuccauuuuccuucaccucguuaaaaucccgacacaucgccacgugauuggaaagcccugcccuaaaccccauagacugaaccacaugggcaucuguucuugcggccuguauaagcacccuggggugcccgucaaguggaaacggugaggacuagucccuguucccagagcccacuuuuuuuucuuuuuuugaaauaaaauagccugucuuucagaucuaaaaaaaaaaaaaaaaaaaaaaaaaaaaaaaaaaaaaaaaaaaaaaaaaaaaaaaaaaaaaaaaugcaucccccccccccccccccccccccccccccccaaaggcucuuuucagagccaccagaauu

SEQ ID NO: 2724 - RNA, 1768 nt, Artificial Sequence
  mRNA product Design a-2 comprising derived and/or modified sequence from LASV(Nig08-A19;Clade III)__ADU56618__GPC (opt5)
gggagaguccgcucagccagguugcagaagcggcuuagcguguguccuaaucuucucucugcguguagguaggccugugccgcaaacaagcuuaccaugggccagaucgugaccuucuuucaagaggucccccacguuauugaagaggugaugaacaucgugcugauugcccucagcauccuggcuauucuuaaggggcuguacaauaucgccacaugcggacucaucggccuggucacguuccuucugcucuccgggagaucuuguagcaugaccuauaaaggaguguacgaacugcagacacuggagcucaacaugaauacccugaacaugacaaugccucuuuccugcaccaagaauaacucucaucacuauauuaugguuggcaaugaaacagggcuggagcucacccugacgaacaccagccuucugcaucacaaauuuuguaaucucuccgacgcgcauaagaaaaaccuguacgaucacacacugaugucuaucauuagcaccuuccaccucuccaucccgaauuuuaaccaguaugaggcuaugagcugcgacuucaauggaggcaagauuacagugcaguacaaccugucucauuccuaugccaucgaugccgcuaaucacuguggcaccgucgccaacggggugcuucaaacguuuaugcggauggcuuggggaggcagcuacauugcccuggacucugggcgcggaaagugggauugcaucaugacauccuaccaguaucucaucauucagaacaccacaugggaagaccauugucaguucagcagacccucuccuaucggcuaccuggggcuucugucccaacggacccgcgauauuuauaucagcagacggcuccugggaaccuuuacauggacgcuguccgacucugagggcaaugaaacccccggcggguacugccucacacgcuggaugcugauugaggcggagcuuaaauguuucggaaacaccgccguugcuaagugcaaugaaaaacacgaugaggaauuuugugacaugcugagacucuucgauuuuaacaagcaggccauccggcgccugaaagcugaggcccagaugagcauccagcuuauuaauaaggcggugaacgcccugaucaaugaccaacucauuaugaagaaccaccugagagauaucaugggcauuccuuauugcaauuacuccaaauauugguaccugaaccauacaagcaccgggcggacgucucucccccgcugcuggcuggucuccaauggaagcuaccuuaacgaaacacacuucucugacgacaucgagcagcaggcugauaauaugaucaccgagaugcugcaaaaggaauaucucgacagacagggcaaaaccccucuggggcugguggaucuuuucguguuuagcacauccuucuaccucauuucuaucuuucugcaucuggucaagauuccgacccaccggcauaucguuggaaaacccuguccuaagccccaccgccucaaccacaugggcauuugcagcuguggccuguauaaacagccuggggugcccgugagauggaagcggugaggacuagucccuguucccagagcccacuuuuuuuucuuuuuuugaaauaaaauagccugucuuucagaucuaaaaaaaaaaaaaaaaaaaaaaaaaaaaaaaaaaaaaaaaaaaaaaaaaaaaaaaaaaaaaaaaugcaucccccccccccccccccccccccccccccccaaaggcucuuuucagagccaccagaauu

SEQ ID NO: 2725 - RNA, 1771 nt, Artificial Sequence
  mRNA product Design a-2 comprising derived and/or modified sequence from LASV(G1180-SLE-2010;Clade IV)__AIT17168__GPC (opt5)
gggagaguccgcucagccagguugcagaagcggcuuagcguguguccuaaucuucucucugcguguagguaggccugugccgcaaacaagcuuaccaugggccagaucgugaccuucuuucaagaggucccccacguuauugaagaggugaugaacaucgugcugauugcccucagcauccuggcuguccuuaaggggcuguacaauuucgccacaugcggacucgugggccugcuuacguuucugcuccugugugggagauccugcaccgcgucucgguauaaaggaguuuacgaacugcagacacucgagcugaacauggaaacccuuaauaugacaaugccucugagcuguaccaagaacaauucccaucacuauauuauggugggcaacgagacagggcucgagcugacccuuacgaauaccucuaucaucaaccauaaauucugcaaucugagcgacgcucacaagaaaaaccucuacgaucaugcccugauguccauuaucucuacauuucaccugagcauuccgaauuucaaccaguaugaagccauguccugugacuuuaauggaggcaagaucagcguccaguacaaccucucucacuccuaugcuggcgaugccgcuaaucauugcgggaccguggccaacggaguucugcaaacauucaugcgcauggcguggggcgggagcuacauugcccuugacucuggacacggcuccugggauuguaucaugaccagcuaccaguaucugauuauccagaacacgacaugggaggaccauugccaguuuucuagacccuccccuaucggguaccucggacugcuuagccaacggacccgcgauauuuauaucuccagacggcugcucggcacauucaccuggacccugucugacagcgaaggcaaggauacacccgggggauacugucugacgcgcuggaugcucauugaggcugagcugaaaugcuuuggcaauaccgccguggcuaaguguaacgaaaaacacgacgaggaguucugcgauaugcuuagacuguuugacuucaauaagcaggccauccagcggcucaaagcggaagcccagauguccauucaacugaucaacaaggcugucaaugcccuuaucaacgaucagcugauuaugaagaaucaccuccgcgacaucauggggauuccuuauugcaacuacagcaaauauugguaccugaaucauacaaccacaggaaagaccucucugcccaaauguuggcucguguccaacggcagcuaccugaaugaaacgcacuucucugacgauaucgagcagcaagcugacaacaugauuacagagaugcuucagaaggaauauauggagagacaggggaaaaccccucugggacucguggaucuguuugucuucagcaccuccuuuuaccugaucucuaucuuccuucaucucguuaagauuccgacacaccggcauaucgugggcaaaagcugccccaagccucaccgccugaaucacaugggcauuuguuccugcgggcuguauaagcagcccggagugccugucaaauggaagagaugaggacuagucccuguucccagagcccacuuuuuuuucuuuuuuugaaauaaaauagccugucuuucagaucuaaaaaaaaaaaaaaaaaaaaaaaaaaaaaaaaaaaaaaaaaaaaaaaaaaaaaaaaaaaaaaaaugcaucccccccccccccccccccccccccccccccaaaggcucuuuucagagccaccagaauu

SEQ ID NO: 2726 - RNA, 1771 nt, Artificial Sequence
  mRNA product Design a-2 comprising derived and/or modified sequence from LASV(G1442-SLE-2011;Clade IV)__AIT17180__GPC (opt5)
gggagaguccgcucagccagguugcagaagcggcuuagcguguguccuaaucuucucucugcguguagguaggccugugccgcaaacaagcuuaccaugggccagaucgugaccuucuuucaagaggucccccacguuauugaagaggugaugaacaucgugcugauugcccucagcauccuggcuguccuuaaggggcuguacaauguggccacaugcggacucauuggccugguuacguuccuucugcucugugggagauccugcaccacaacccuguauaaaggaguguacgaacugcagacacucgagcugaacauggaaacccuuaauaugacaaugccucugucuuguaccaagaacaauagccaucacuauauccgggucggcaacgagacggggcucgagcugacccuuacaaauaccuccaucauuaaccauaaauuuugcaaucugucugacgcgcacaagaaaaaccucuacgaucaugcucugaugagcaucauuuccacauuccaccugucuaucccgaauuuuaaccaguaugaagccaugagcugugacuucaauggaggcaagauuuccgugcaguacaaccucagccacucuuaugccggcgaugcugccaaucauugcgggaccguugcuaacggagugcugcaaacguuuaugcgcauggccuggggcggguccuacaucgcgcuugacagcggaagaggcaacugggauuguauuaugacaucuuaccaguaucugaucauccagaauaccacaugggacgaucacugccaguucucccggcccagcccuauuggguaccucggacugcuuucucaacgcaccagagacgucuauaucucccggcgccugcucggcaccuuuacauggacgcugagcgauuccgagggcaaggacacccccgggggauacugucugacaagauggaugcucauugaagccgagcugaaaugcuucggcaacaccgcuguggccaaguguaaugagaaacaugaugaagaguuuugcgacaugcuucggcuguucgauuuuaacaagcaggcuauccagcgccucaaagccgaagcgcagaugucuauucaacugaucaauaaggccgugaacgcucuuaucaaugaccagcugauuaugaagaaccaccucagagacaucauggggauuccuuauugcaauuacagcaaauauugguaccugaacaauacagccaccggaaagacgucccugcccaaauguuggcucaucagcaacggcucuuaccugaaugagacacacuucuccgaugacauugaacaggaggcugauaacaugaucaccgagaugcuucaaaaggaauauauggagcggcaggggaaaaccccucugggacucgucgaccuguucguuuuuagcacaucuuucuaccugaucagcauuuuucuucaucucgugaagaucccgacccaccgccauauugugggcaaauccugccccaagccucacagacugaaucauaugggcaucuguucuugcgggcuguauaagcagcccggagucccugugcgguggaaacgcugaggacuagucccuguucccagagcccacuuuuuuuucuuuuuuugaaauaaaauagccugucuuucagaucuaaaaaaaaaaaaaaaaaaaaaaaaaaaaaaaaaaaaaaaaaaaaaaaaaaaaaaaaaaaaaaaaugcaucccccccccccccccccccccccccccccccaaaggcucuuuucagagccaccagaauu

SEQ ID NO: 2727 - RNA, 1771 nt, Artificial Sequence
  mRNA product Design a-2 comprising derived and/or modified sequence from LASV(G3010-SLE-2013;Clade IV)__AIT17344__GPC (opt5)
gggagaguccgcucagccagguugcagaagcggcuuagcguguguccuaaucuucucucugcguguagguaggccugugccgcaaacaagcuuaccaugggccagaucgugaccuucuuucaagaggucccccacguuauugaagaggugaugaacaucgugcugauugcccucagcauccuggcuguccuuaaggggcuguacaauuucgccacaugcggacucgugggccugguuacguuucuucugcucugugggagauccugcaccacaucucuguauaaaggaguguacgaacugcagacccucgagcugaacauggaaacacuuaauaugaccaugccucugagcuguacaaagaacaauucccaucacuauauuauggucggcaacgagaccgggcucgagcugacgcuuaccaauacaucuaucaucaaccauaaauucugcaaucugagcgacgcgcacaagaaaaaccucuacaaucaugcucugauguccauuaucucuaccuuucaccugagcauuccgaacuucaaucaguaugaagccauguccugugauuuuaacggaggcaagaucagcgugcaguacaaucucucucacuccuaugccggcgacgcugccagccauugcgggacaguugcuaacggagugcugcaaaccuucaugcggauggccuggggcgggucuuacauugcgcuugauuccggauacggcaagugggacuguaucaugacgagcuaucaguaccugauuauccagaacacaaccugggaggaucacugccaguuuucucgccccuccccuaucggguaucucggacugcuuagccaaagaacacgggacauuuacaucucccgcagacugcucggcaccuucaccuggacacugucugauagcgaaggcaaagacacgcccgggggauauugucugacccgguggaugcucauugaggccgagcugaagugcuuuggcaauacagcugucgccaaauguaacgaaaagcaugaugaggaguucugcgacaugcuucgccuguuugauuucaauaaacaggcuauccagagacucaagaccgaagcccagauguccauucaacugaucaacaaggcggugaaugcccuuaucaacgaccagcugauuaugaaaaaucaccuccgggauaucauggggauuccuuacugcaacuauagcaaguacugguaccugaaucacacaaccacgggaaaaacaucucugcccaaguguuggcucguguccaacggcagcuaucugaaugaaacccauuucucugacgacaucgagcagcaagcugauaacaugauuaccgagaugcuucagaaagaauacauggagcgccaggggaagacaccucugggacucgucgaccuguuuguuuucagcaccuccuuuuaucugaucucuaucuuccuucaccucgugaaaauuccgacacauagacacaucgugggcaagagcugccccaagccucaucggcugaaucacaugggcauuuguuccugcgggcuguacaaacagcccggagucccugugcgcuggaagagaugaggacuagucccuguucccagagcccacuuuuuuuucuuuuuuugaaauaaaauagccugucuuucagaucuaaaaaaaaaaaaaaaaaaaaaaaaaaaaaaaaaaaaaaaaaaaaaaaaaaaaaaaaaaaaaaaaugcaucccccccccccccccccccccccccccccccaaaggcucuuuucagagccaccagaauu

SEQ ID NO: 2728 - RNA, 1771 nt, Artificial Sequence
  mRNA product Design a-2 comprising derived and/or modified sequence from LASV(G502-SLE-2009;Clade IV)__AIT17126__GPC (opt5)
gggagaguccgcucagccagguugcagaagcggcuuagcguguguccuaaucuucucucugcguguagguaggccugugccgcaaacaagcuuaccaugggccagaucgugaccuucuuucaagaggucccccacguuauugaagaggugaugaacaucgugcugauugcccucagcauccuggcuguccuuaaggggcuguacaauuucgccacaugcggacucgugggccugcuuacguuucugcuccugugugggagauccugcaccacaggacuguauaaaggcguuuacgaacuccagacccuggagcuuaacauggaaacacugaauaugaccaugccucucucuuguacaaagaacaauagccaucacuauauuaugguggggaacgagaccggacuggagcuuacgcugaccaauacauccaucaucaaccauaaauucugcaaucucucugacgcgcacaagaaaaaccuguacgaucaugcucugaugagcauuaucuccaccuuucaccucucuauuccgaauuucaaccaguaugaagccaugagcugugacuuuaauggcggcaagaucuccguccaguacaaccugagccacucuuaugccggggaugcugccgaccauugcggaacaguggcuaauggcguucuucaaaccuucaugcggauggccuggggaggguccuacauugcgcuggauagcggccgcgggagaugggacuguaucaugacgucuuaccaguaucucauuauccagaacacaaccugggaggaucacugccaguuuucccggcccagcccuaucggauaccugggccuucugucucaacgcacaagagacauuuauaucucccggcgccuccugggcaccuucaccuggacacugagcgauuccgaagggaaggacacgcccggaggcuacugucucaccagauggaugcugauugaggccgagcuuaaaugcuuugggaacacagcuguggccaaguguaaugaaaaacaugaugaggaguucugcgacaugcugcggcucuuugauuucaacaagcaggcuauccagcgccugaaagccgaagcgcagaugucuauucaacuuaucaauaaggccgucaacgcucugaucaaugaccagcucgugaugaagaaccaccugagagacauuaugggaaucccuuauugcaauuacagccgguauugguaccugaaccacaccacaaccggccgcacgucccuccccaaauguuggcuggugagcaaugggucuuaccuuaacgaaacacauuucuccgaugacauugagcagcaagccgauaauaugaucaccgagaugcugcagaaggaauauauggagagacagggaaaaaccccucucggccuggucgaccuguuuguuuucagcacaucuuuuuaccuuauuagcaucuuccuccaccuggugaagaucccgacccaucggcacauugugggcaaauccugccccaagccucaucgccugaaccacauggggaucuguucuugcggacucuauaaacagcccggcgucccugugaaguggaagagaugaggacuagucccuguucccagagcccacuuuuuuuucuuuuuuugaaauaaaauagccugucuuucagaucuaaaaaaaaaaaaaaaaaaaaaaaaaaaaaaaaaaaaaaaaaaaaaaaaaaaaaaaaaaaaaaaaugcaucccccccccccccccccccccccccccccccaaaggcucuuuucagagccaccagaauu

SEQ ID NO: 2729 - RNA, 1771 nt, Artificial Sequence
  mRNA product Design a-2 comprising derived and/or modified sequence from LASV(G733-SLE-2010;Clade IV)__AIT17154__GPC (opt5)
gggagaguccgcucagccagguugcagaagcggcuuagcguguguccuaaucuucucucugcguguagguaggccugugccgcaaacaagcuuaccaugggccagaucgugaccuucuuucaagaggucccccacguuauugaagaggugaugaacaucgugcugauugcccucagcauccuggcuguccuuaaggggcuguacaauuucgccacaugcggaauugugggccucguuuccuuucugcuucugugugggagaucuugcacgaccagccucuauaaaggaguguacgaacugcagacacuggagcucaacauggaaacccugaauaugacaaugccucuuuccuguaccaagaacaauucucaucacuauaucauggucggcaacgagacagggcuggagcucacccugacgaauaccagcaucauuaaccauaaauucugcaaucuuuccgacgcgcacaagaaaaaccuguacgaucaugcucucaugucuaucauuagcacauuucaccuguccaucccgaauuucaaccaguaugaagccaugagcugugacuuuaauggaggcaagauuucugugcaguacaaccugucccacagcuaugccggcgaugcugccaaucauugcgggaccaucgcuaacggaguucuccaaacauucaugcggauggccuggggcgggucuuacauugcgcuggacuccggacgcgauagaugggacuguaucaugaccagcuaccaguaucuuaucauucagaacacgacaugggaggaucacugccaguuuucucggcccuccccuaucggcuaccuggggcuccugagccaacgcaccagagacauuuauaucucccggcgccuucugggaacauucaccuggacccucucugauagcgaaggcaaggacacacccggcggguacugucugacgagauggaugcugauugaggccgagcucaaaugcuuuggaaauaccgcuguggccaaguguaacgaaaaacaugaugaggaguucugcgacaugcugcggcuuuuugauuucaauaagcaggcuauccagcgccugaaagccgaagcgcagauguccauccaacucauuaacaaggccgucaaugcucugaucaacgaccagcuuauuaugaagaaucaccugagagacaucaugggcauuccuuauugcaacuacagcaaauauugguaccucaaucacacaaccacagggaagaccucucugcccaaauguuggcugguguccaacggaagcuaccucaaugaaacgcauuucucugaugacaucgagcagcaagccgauaacaugaucacagagaugcugcagaaggaauauauggagcggcagggcaaaaccccucuugggcugguggaccucuuugucuucagcaccuccuuuuaccugauuucuaucuuccugcaccuuguuaagauuccgacacaucgccacguggugggaaaaagcugccccaagccucauagacucaaucacaugggcaucuguuccugcggccuguaugggcagcccggagucccugugaaguggaaacggugaggacuagucccuguucccagagcccacuuuuuuuucuuuuuuugaaauaaaauagccugucuuucagaucuaaaaaaaaaaaaaaaaaaaaaaaaaaaaaaaaaaaaaaaaaaaaaaaaaaaaaaaaaaaaaaaaugcaucccccccccccccccccccccccccccccccaaaggcucuuuucagagccaccagaauu

SEQ ID NO: 2730 - RNA, 1771 nt, Artificial Sequence
  mRNA product Design a-2 comprising derived and/or modified sequence from MOPV/LASV reassortant(IGS-1;Clade IV)__AFY05576__GPC (opt5)
gggagaguccgcucagccagguugcagaagcggcuuagcguguguccuaaucuucucucugcguguagguaggccugugccgcaaacaagcuuaccaugggccagaucgugaccuucuuucaagaggucccccacguuauugaagaggugaugaacaucgugcugauugcccucagcguccuggcugugcuuaaggggcuguacaauuucgccacaugcggacucguuggccuggugacguuucuucugcucugugggagauccugcaccacaucucuguauaaaggagucuacgaacugcagacccucgagcugaacauggaaacacuuaauaugaccaugccucugagcuguacaaagaacaauucccaucacuauaucauggugggcaacgagaccgggcucgagcugacgcuuaccaauacaucuauuaucaaccauaaauucugcaaucugagcgacgcgcacaagaaaaaccucuacgaucaugcucugauguccaucauuucuaccuuucaccugagcaucccgaauuucaaccaguaugaagccauguccugugacuuuaauggaggcaagauuagcguucaguacaaccucucucacuccuaugccggcgaugcugccaaucauugcgggacaguggcuaacggaguccugcaaaccuucaugcggauggccuggggcgggagcuacaucgcgcuugacucuggacgcggcaacugggauuguauuaugacguccuaccaguaucugaucauucagaauacaaccugggaggaccacugccaguuuagcagacccucuccuaucggguaccucggacugcuuucccaacggacacgcgauaucuauauuagcagacggcugcucggcaccuucaccuggacacuguccgacucugaaggcgaggauacgcccgggggauacugucugacccgcuggaugcucaucgaggccgaacugaagugcuuuggcaacacagcuguggccaaauguaaugagaagcaugacgaagaguucugcgauaugcuuagacuguuugacuucaacaaacaggcuauucagcggcucaaggccgaagcgcagaugagcauccaacugauuaauaaagccgugaacgcucuuaucaaugaucagcugaucaugaagaaccaccuccgcgacauuauggggaucccuuauugcaauuacuccaaguauugguaccugaaccacaccacaaccggaagaacgagccugcccaaauguuggcucgucucuaauggcuccuaccugaacgagacacauuucagcgacgauauugagcagcaagccgacaauaugaucaccgaaaugcuucagaaggaguauauggaacggcaggggaaaaccccucugggacucguugaucuguuuguguucucuaccagcuuuuaccugauuuccaucuuccuucaccucgugaagaucccgacacaucgccacauugucggcaaaucuugccccaagccucauagacugaaccacaugggcaucuguagcugcgggcuguauaaacagcccggagugccuguuaaguggaagcggugaggacuagucccuguucccagagcccacuuuuuuuucuuuuuuugaaauaaaauagccugucuuucagaucuaaaaaaaaaaaaaaaaaaaaaaaaaaaaaaaaaaaaaaaaaaaaaaaaaaaaaaaaaaaaaaaaugcaucccccccccccccccccccccccccccccccaaaggcucuuuucagagccaccagaauu

SEQ ID NO: 2731 - RNA, 1771 nt, Artificial Sequence
  mRNA product Design a-2 comprising derived and/or modified sequence from LASV(LM765-SLE-2012;Clade IV)__AIT17814__GPC (opt5)
gggagaguccgcucagccagguugcagaagcggcuuagcguguguccuaaucuucucucugcguguagguaggccugugccgcaaacaagcuuaccaugggccagaucgugaccuucuuucaagaggucccccacguuauugaagaggugaugaacaucgugcugauugcccucagcauccuggcuguccuuaaggggcuguacaauuucgccacaugcggacucgugggccugguuacguuucuucugcucugugggagauccugcaccacaucucuguauaaaggaguguacgaacugcagacccucgagcugaacauggaaacacuuaauaugaccaugccucugagcuguacaaagaacaauucccaucacuauauuauggucggcaacgagaccgggcucgagcugacgcuuaccaauacaucuaucaucgaccauaaauucugcaaccugagcgaugcgcaccggaagaaucucuacgaccaugcucugauguccauuaucucuaccuuucaccugagcauuccgaacuucaaucaguaugaagccauguccugugauuuuaacggaggcaaaaucagcgugcaguacaaucucucucacuccuaugccaaggacgcugccgaucauugcggcacaguugcuaacggggugcugcaaaccuucaugcgcauggccuggggaggcagcuacauugcgcuugacucugggagaggacggugggauuguaucaugacguccuaccaguaucugauuauccagaauacaaccugggaggaccacugccaguuuagccgccccucuccuaucggcuaccucgggcugcuuucccaaagaacacgggauauuuauaucagccgcagacugcucggaaccuucaccuggacacuguccgacucugaaggcaaggauacgcccggcggguacugucugacccgguggaugcucauugaggccgagcugaaaugcuuuggaaacacagcugucgccaaguguaacgaaaaacaugacgaggaguucugcgauaugcuucgccuguuugacuucaauaagcaggcuauccagagacucaaagccgaagcgcagaugagcauucaacugaucaacaaggccgugaaugcucuuaucaacgaccagcugauuaugaagaaucaccuccgggauaucaugggcauuccuuauugcaacuacuccaaauauugguaccugaaucacaccacaaccgggaagacgagccugcccaaauguuggcucgugucuaacggauccuaccugaaugaaacacauuucagcgacgauaucgagcagcaagccgacaacaugauuaccgagaugcuucagaaggaauauauggagcgccagggcaaaaccccucuggggcucgucgaucuguuuguuuucucuaccagcuuuuaccugaucuccaucuuccuucaccucgugaagauuccgacacauagacacaucgugggaaaacccugcccuaagccccaucggcugaaucacaugggcauuuguucuugcggccuguauaagcagccugggguccccgugaaauggaagcgcugaggacuagucccuguucccagagcccacuuuuuuuucuuuuuuugaaauaaaauagccugucuuucagaucuaaaaaaaaaaaaaaaaaaaaaaaaaaaaaaaaaaaaaaaaaaaaaaaaaaaaaaaaaaaaaaaaugcaucccccccccccccccccccccccccccccccaaaggcucuuuucagagccaccagaauu

SEQ ID NO: 2732 - RNA, 1771 nt, Artificial Sequence
  mRNA product Design a-2 comprising derived and/or modified sequence from LASV(LM776-SLE-2012;Clade IV)__AIT17824__GPC (opt5)
gggagaguccgcucagccagguugcagaagcggcuuagcguguguccuaaucuucucucugcguguagguaggccugugccgcaaacaagcuuaccaugggccagaucgugaccuucuuucaagaggucccccacguuauugaagaggugaugaacaucgugcugauugcccucagcauccuggcuguccuuaaggggcuguacaauuucgccacaugcggacucgugggccugguuacguuucuucugcucugugggagauccugcaccacaucuguguauaaaggagucuacgaacugcagacccuggagcucaacauggaaacacugaauaugaccaugccucuuagcuguacaaagaacaauucccaucacuauauuauggugggcaacgagaccgggcuggagcucacgcugaccaauacaucuaucaucaaccauaaauucugcaaucuuagcgacgcgcacaagaaaaaccuguacgaucaugcucucauguccauuaucucuaccuuucaccugagcauuccgaauuucaaccaguaugaagccauguccugugacuuuaauggaggcaagaucagcguucaguacaaccugucucacuccuaugccggcgaugcugccaaucauugcgggacaguggcuaacggaguccuccaaaccuucaugcggauggccuggggcgggagcuacauugcgcuggacucuggacacggcaagugggauuguaucaugacguccuaccaguaucuuauuauccagaacacaaccugggaggaccauugccaguuuagccgccccucuccuaucggguaccugggacuccugucccaaagaacacgggauauuuauaucagccgcagacuucugggcaccuucaccuggacacucuccgacucugaaggcaaagauacgcccgggggauacugucugacccgguggaugcugauugaggccgagcucaagugcuuuggcaauacagcuguggccaaauguaacgaaaagcacgacgaggaguucugcgauaugcugcgccuuuuugacuucaauaaacaggcuauccagagacugaaggccgaagcgcagaugagcauucaacucaucaacaaggccgugaaugcucugaucaacgaucagcuuauuaugaaaaaucaucugcgggacaucauggggauuccuuauugcaacuacuccaaguauugguaccucaaucacaccacaaccggaaaaacgagccugcccaaguguuggcuggucucuaacggcuccuaccucaaugaaacacacuucagcgacgauaucgagcagcaagccgacaacaugauuaccgagaugcugcagaaagaauauauggagcgccaggggaagaccccucuuggacugguugaucucuuuguguucucuaccagcuuuuaccugaucuccaucuuccugcaucuugugaaaauuccgacacacagacauaucgucggcaagucuugccccaagccucaccggcucaaucacaugggcauuuguagcugcgggcuguauaaacagcccggagugccuguucgcuggaagagaugaggacuagucccuguucccagagcccacuuuuuuuucuuuuuuugaaauaaaauagccugucuuucagaucuaaaaaaaaaaaaaaaaaaaaaaaaaaaaaaaaaaaaaaaaaaaaaaaaaaaaaaaaaaaaaaaaugcaucccccccccccccccccccccccccccccccaaaggcucuuuucagagccaccagaauu

SEQ ID NO: 2733 - RNA, 1771 nt, Artificial Sequence
  mRNA product Design a-2 comprising derived and/or modified sequence from LASV(Mad39;Clade IV)__ANH09722__GPC (opt5)
gggagaguccgcucagccagguugcagaagcggcuuagcguguguccuaaucuucucucugcguguagguaggccugugccgcaaacaagcuuaccaugggccagaucgugaccuucuuucaagaggucccccacguuauugaagaggugaugaacaucgugcugauugcccucagcauccuggcuguccuuaaggggcuguacaauguggccacaugcggacucauuggccugguuacguuccuucugcucugugggagauccugcaccacaacccuguauaaaggaguguacgaacugcaggcgcucgagcugaacauggaaacacuuaauaugaccaugccucugucuuguacaaagaacaauagccaucacuauauccgggucggcaacgagaccgggcucgagcugacgcuuaccaauacaucccugaucaaccauaaauuuugcaaucucucugacgcucacaagaaaaaccuguacgaucaugcccugaugagcauuaucuccaccuuccaccucucuauuccgaauuuuaaccaguaugaagccaugagcugugacuucaaugauggaaagaucuccgugcaguacaaccugagccacacauaugcuggcgacaccgccaaucauugcggcacgguugcuaacggggugcuucaaacauuuaugcgcauggccuggggaggcucuuacauugcgcuggauuccgggagaggaggcugggacuguaucaugaccagcuaccaguaucucauuauccagaacacaaccugggaggaucacugccaguucucucggcccuccccuaucggguaccugggacuucugagccaacgcaccagagacauuuauaucucucggcgccuccugggcacauuuacguggacccuguccgauagcgaaggcaaggacacacccgggggauacugucucaccagauggaugcugauugaggccgagcuuaaaugcuucggcaauacagcugucgccaaguguaacgaaaaacaugaugaggaauuuugcgacaugcugcgccucuucgauuuuaauaagcaggcuauccagcggcugaaagccgaggcgcagauguccauucaacuuaucaacaaggccgugaaugcucugaucaacgaccagcucauuaugaagaaucaccugagagacaucauggggauuccuuauugcaacuacucuaaauauugguaccugaaucacaccgugacgggaaagacaagccuccccaaauguuggcuggucuccaacggcagcuaccuuaaugaaacccauuucucugaugacaucgagcagcaagccgauaacaugauuaccgagaugcugcagaaggaauauauggagcggcaggggaaaacaccucucggacugguugaccuguucguguuuuccaccagcuucuaccuuaucucuaucuuucuccaccuggugaagauuccgacacaucgccacgucgugggcaaacccugcccuaagccccauagacugaaucacaugggcaucuguagcugcggguucuauaagcagccuggaguucccgugcgguggaaacgcugaggacuagucccuguucccagagcccacuuuuuuuucuuuuuuugaaauaaaauagccugucuuucagaucuaaaaaaaaaaaaaaaaaaaaaaaaaaaaaaaaaaaaaaaaaaaaaaaaaaaaaaaaaaaaaaaaugcaucccccccccccccccccccccccccccccccaaaggcucuuuucagagccaccagaauu

SEQ ID NO: 2734 - RNA, 1771 nt, Artificial Sequence
  mRNA product Design a-2 comprising derived and/or modified sequence from LASV(Z0947-SLE-2011;Clade IV)__AIT17840__GPC (opt5)
gggagaguccgcucagccagguugcagaagcggcuuagcguguguccuaaucuucucucugcguguagguaggccugugccgcaaacaagcuuaccaugggccagaucgugaccuucuuucaagaggucccccacguuauugaagaggugaugaacaucgugcugauugcccucagcauccuggcuguccuuaaggggcuguacaauuucgccacaugcggacucgugggccugguuacguuucuucugcucugugggagauccugcaccauuucucuguauaaaggaguguacgaacugcagacacucgagcugaacauggaaacccuuaauaugacaaugccucugagcuguaccaagaacaauucccaucacuauaucauggucggcaacgagacagggcucgagcugacccuuacgaauaccucuaucauuaaccauaaauucugcaaucugagcgacgcgcacaagaaaaaccucuacgaucaugcucugauguccaucauuucuacauuucaccugagcaucccgaauuucaaccaguaugaagccauguccugugacuuuaauggaggcaagauuagcgugcaguacaaccucucucacuccuaugccggcgaugcugccaaucauugcgggaccguugcuaacggagugcugcaaacauucaugcggauggccuggggcgggagcuacaucgcgcuugacucuggacgcgauagaugggacuguauuaugaccuccuaccaguaucugaucauccagaacacgacaugggaggaucacugccaguuuagccggcccucuccuauuggcuaccucgggcugcuuucccaacgcaccagagacaucuauauuagccggcgccugcucggaacauucaccuggacccuguccgauucugaaggcaaggacacacccggcggguacugucugacgagauggaugcucaucgaggccgagcugaaaugcuuuggaaauaccgcugucgccaaguguaacgaaaaacaugaugaggaguucugcgacaugcuucggcuguuugauuucaauaagcaggcuauucagcgccucaaagccgaagcgcagaugagcauccaacugaucaacaaggccgugaaugcucuuauuaacgaccagcugaucaugaagaaucaccucagagacauuaugggcaucccuuauugcaacuacuccaaauauugguaccugaaucacacaaccacagggaagaccagccugcccaaauguuggcucgugucuaacggauccuaccugaaugaaacgcauuucagcgaugacauugagcagcaagccgauaacaugaucacagagaugcuucagaaggaauauauggagcggcagggcaaaaccccucuggggcucgucgaccuguuuguuuucucuaccagcuuuuaccugaucuccauuuuccuucaccucgugaagaucccgacacaucgccacauugugggaaaacccugcccuaagccccauagacugaaucacaugggcaucuguucuugcggccuguauaagcagccugggguccccgugaaauggaagcggugaggacuagucccuguucccagagcccacuuuuuuuucuuuuuuugaaauaaaauagccugucuuucagaucuaaaaaaaaaaaaaaaaaaaaaaaaaaaaaaaaaaaaaaaaaaaaaaaaaaaaaaaaaaaaaaaaugcaucccccccccccccccccccccccccccccccaaaggcucuuuucagagccaccagaauu

SEQ ID NO: 2735 - RNA, 1771 nt, Artificial Sequence
  mRNA product Design a-2 comprising derived and/or modified sequence from LASV(Josiah;Clade IV)__NP_694870__GPC (opt6)
gggagaguccgcucagccagguugcagaagcggcuuagcguguguccuaaucuucucucugcguguagguaggccugugccgcaaacaagcuuaccaugggccaaauaguaaccuucuuucaagaaguaccacacguaauagaagaaguaaugaauauaguacuaauagcucuaagcguucucgccgucuuaaaaggacuauacaacuucgcaacauguggccuaguaggauuaguaacauuucuacuccuaugcggacgaucaugcacaacaucacuauauaaaggaguauacgaacugcaaacacuagaacuaaacauggaaacacuaaauaugacaaugcccuuaaguugcacuaaaaacaacucccaccacuauauaauggucggaaacgaaacaggccucgaauuaacauuaacaaacacaaguauaauaaaucacaaauuuuguaaucuaagcgaugcacacaaaaagaauuuauaugaccacgcacuaaugucaauaauaaguaccuuucauuuaucaaucccuaacuuuaaccaauaugaagcaaugucuugcgauuucaacggaggaaaaauaucaguacaauauaacuuaucacacaguuacgcaggagaugcagccaaccacugcggcacuguagcaaacggaguacuccaaaccuucaugagaauggcauggggcggauccuauauugcacucgacaguggaagagguaacugggauugcaucaugaccucauaccaauauuuaauaauacagaauacaacaugggaagaccauugccaauuuucuagaccaucaccuauagguuacuuaggcuuauuaucacaaagaacacgagauauauacauauccagaagauuacuaggaacauuuacauggacacuaagugauagcgaaggcaaagacaccccaggagguuacugcuuaaccagauggauguuaauagaagcagaauuaaaauguuuuggcaauacagcaguagcaaaaugcaacgaaaaacacgaugaagaauuuugcgauaugcucagacuuuucgacuucaacaaacaagcaauccaaagauuaaaagcugaagcacaaaugagcauacaacuaaucaauaaagcaguuaaugccuuaauaaacgaccaacuaauaaugaaaaaccacuuaagagacauaaugggaauaccauacugcaacuauaguaaauacugguaucuaaaucacacaacuacaggccguacuucacugccaaaauguuggcuaguaagcaacggaucauauuuaaacgaaacacauuuuucagacgauauagaacaacaagcugauaacaugauaaccgaaaugcuucaaaaagaauacauggaaagacaaggcaaaacaccccucggucuaguagaccuauuugucuucagcacaaguuuuuacuuaauaucaauauucuuacaccuuguaaaaauaccaacacauagacacauaguaggaaaaucauguccaaaaccacauagacuaaaccacaugggaauauguagcugcggucuauauaaacaaccaggagucccaguaaaauggaaacgauaaggacuagucccuguucccagagcccacuuuuuuuucuuuuuuugaaauaaaauagccugucuuucagaucuaaaaaaaaaaaaaaaaaaaaaaaaaaaaaaaaaaaaaaaaaaaaaaaaaaaaaaaaaaaaaaaaugcaucccccccccccccccccccccccccccccccaaaggcucuuuucagagccaccagaauu

SEQ ID NO: 2736 - RNA, 1768 nt, Artificial Sequence
  mRNA product Design a-2 comprising derived and/or modified sequence from LASV(LP;Clade I)__AAF86701__GPC (opt6)
gggagaguccgcucagccagguugcagaagcggcuuagcguguguccuaaucuucucucugcguguagguaggccugugccgcaaacaagcuuaccaugggacaaauuauaacauucuuucaagaaguaccccauguaauagaagaagucaugaacauaguucuaauagcacuaucuuuauuagcaauucuaaaaggcuuauauaacauagcaaccugcggcauaaucggccuagucgcuuuccuauucuuaugcggaaaaaguugcucauuaacacuaaaaggaggauaugaacuacaaacucucgaauuaaacauggaaacauuaaacaugacaaugccuuuaucuugcacaaaaaauucaucacaucacuacauaagagucggaaaugaaacaggacuagaacuuacacuaacaaacacaucaauaauuaaccacaaauuuugcaaccucucugacgcacauaaaaaaaaccuauacgaccaugcacuaaugucaauaauaucgacauuccaccuaucaauaccaaacuuuaaccaauaugaagccaugucaugcgacuucaacggugguaaaauauccguccaauacaaucuaucccauuccuacgcaggagacgccgcagaacauugcggaacugucgcaaacggaguacuacaaacuuucaugagaauggcauggggaggaagauauauugcccuagauucaggaaaaggaaacugggacugcaucaugaccucauaccaauaccuuauaauacaaaauacuacaugggaagaccacugccaauucucacgaccaucuccuaucggauaucuaggacuacuaucacaacgaacucgagacauauacauaagcagacgauuauuaggcacauuuacuuggacuuuaucagacucagaaggcaaugaaacaccaggaggauacuguuuaacacgauggaugcucauagaagcagaauuaaaauguuucggaaauacagcaguagcaaaaugcaacgaaaaacacgacgaagaauucugcgacauguuaagauuauucgacuucaauaaacaagcaauacguagacuaaaagcagaagcucaaaugucaauacaacuuauaaacaaagccguaaacgcacuaaucaacgaccaauuaaucaugaaaaaucauuuacgagacauuauggguauaccauacugcaacuacucuaaauacugguaucuaaaucacacaucuucaggacgaacaucauuaccaaaaugcuggcuuauaaguaacggaucauacuuaaaugaaacacaauucucagacgacauagaacaacaagcagauaacaugauaacugaaaugcuacaaaaagaauacauagaacgucaaggaaaaacacccuuaggacuaguagacauauucauauuuuccacaucauuuuacuuaauuucaaucuuccuacaccucauaaaaaucccuacccacagacacauaguaggaaaaccaugcccaaaaccacauagacuaaaccauaugggaguaugcucaugcggcuuauacaaacauccaggaguaccaacaaaauggaaacgauaaggacuagucccuguucccagagcccacuuuuuuuucuuuuuuugaaauaaaauagccugucuuucagaucuaaaaaaaaaaaaaaaaaaaaaaaaaaaaaaaaaaaaaaaaaaaaaaaaaaaaaaaaaaaaaaaaugcaucccccccccccccccccccccccccccccccaaaggcucuuuucagagccaccagaauu

SEQ ID NO: 2737 - RNA, 1768 nt, Artificial Sequence
  mRNA product Design a-2 comprising derived and/or modified sequence from LASV(803213;Clade II)__AAF86703__GPC (opt6)
gggagaguccgcucagccagguugcagaagcggcuuagcguguguccuaaucuucucucugcguguagguaggccugugccgcaaacaagcuuaccaugggacaaauaauaaccuucuuccaagaaguaccacacguaauagaagaagucaugaacauagucuuaauagcauuaucauuauuagcaauauuaaaaggaauauacaacguagcaacaugcggauuauucggacuaauauccuuucuauuauuaugcggacgcagcugcucugucacauacaaaggagucuaugaacuacaaacauuagaacuaaacauggcaaacuuaaacaugacaaugccacuauccugcacaaaaaacaauucccaccacuacauaaugguuggcaacgaaacaggacucgaacuaacccuuacaaacacuucuauaauuaaccauaaauucugcaaccuaucagaugcacacaaaaaaaaccucuaugaccacgcacuaaugucuauaauaucaacauuucaccuaucuauaccaaacuuuaaccaauaugaagcaauguccugugauuuuaaugguggcaaaauaucuguacaauacaacuuaucacauucauucgcaguagacgcagcaaaccacugcggaacaauagcaaacggaguucuccaaacauuuaugagaauggccuggggaggaucauacaucgcacuagacucaggaaaaggaaauugggacuguauaaugaccucauaccaauaccuaaucauacaaaacacaacaugggaagaucauugccaauucucacgucccucuccaauaggauaucuaggccuccuaucacaaagaacaagagauaucuacauaucaagacgacuacucggaacauucacauggacacuaagcgacuccgaaggaaacgaagccccaggaggauacugccuuacacgauggaugcuaaucgaagccgaacuaaaaugcuuuggaaacacagcagucgcaaaauguaaugaaaaacaugaugaagaauuuugcgauaugcuaagacuauuugacuucaacaaacaagcaauaaaaagacucaaaacagaagcccaaaugucuauucaacucauaaauaaagcaguaaaugcauuaauuaacgaccaacuaaucaugaaaaaccaucuuagagauauuaugggaauaccauacuguaacuacucaagauacugguaccuaaaccacacaguaacuggaaaaacaucucuaccacgaugcuggcucguaucuaacgguucauaccuaaaugaaacacacuuuucugacgacaucgaacaacaagcagacaacaugauaacagaaaugcuacaaaaagaauacauggacagacaaggaaaaacaccacuaggucuaguagauuuauucguauucaguacaucuuucuaccuaauaucaauauuccuacaccucguaaaaauacccacacaccgccacauaguaggaaaaccauguccaaaaccacaccgacuaaaccacaugggcaucugcucaugcggacuauauaaacaccccggaguaccagucaaauggaaaagauaaggacuagucccuguucccagagcccacuuuuuuuucuuuuuuugaaauaaaauagccugucuuucagaucuaaaaaaaaaaaaaaaaaaaaaaaaaaaaaaaaaaaaaaaaaaaaaaaaaaaaaaaaaaaaaaaaugcaucccccccccccccccccccccccccccccccaaaggcucuuuucagagccaccagaauu

SEQ ID NO: 2738 - RNA, 1768 nt, Artificial Sequence
  mRNA product Design a-2 comprising derived and/or modified sequence from LASV(GA391;Clade III)__CAA36645__GPC (opt6)
gggagaguccgcucagccagguugcagaagcggcuuagcguguguccuaaucuucucucugcguguagguaggccugugccgcaaacaagcuuaccaugggacaaauaguaacauucuuccaagaaguaccacauguaauugaagaaguaaugaacauaguacuaauagcacuaucaauccuagcaauauuaaaaggauuauauaaugucgcuacuuguggacuaauaggacucguaacauuucuacuauuaucagguagaucaugcagccuuauauacaaaggaacauacgaauuacaaacauuagaacuaaacauggaaacccuaaacaugaccaugccacuauccuguaccaaaaacaacucacaccauuacauuagaguaggaaacgaaacaggucuugaacuaacauugacaaacacaagcauacuaaaccauaaauucugcaaccuaucagaugcacacaaaagaaaccuauaugaccauucacuuaugucuauaaucucaacauuucauuuauccauaccuaacuucaaucaauaugaagcaaugucuugcgauuucaacggcggaaaaauaacaguacaauacaaccucucccauuccuucgcaguagacgcagcaggccacugcgguacauuagcaaacggcguacuacaaacauuuaugagaauggcauggggcggaucauacauagcuuuagacucagguagaggaaacugggauugcaucaugacaaguuaucaauaccuaauaauucaaaacacaacaugggacgaccacugccaauucucaagaccuucaccaauaggauauuuaggucuacucucccaaagaacacgcgacauauauauaucaagaagacuacuagguacauucacauggacacuaucagauucagaaggaaacgaaacaccaggaggauacuguuuaacacgcuggaugcucauagaagcugaacuaaaaugcuuuggcaacacagcaguagcaaaauguaacgaaaaacacgacgaagaauuuugcgacauguuacgacuauucgacuuuaacaaacaagcaauaagaagacuaaaaacagaagcacaaaugucaauccaacucauuaacaaagcaguaaacgcuuuaauaaacgaccaauuaauaaugaaaaaccaccuacgagacauaaugggaauacccuauuguaacuacucacgauauugguaucuaaaccauaccucaacaggaaaaaccucccuacccagaugcuggcuaaucucaaacggaucauaccuaaacgaaacaaaauucucugacgacauagaacaacaagcugacaacaugauaaccgaaauguuacaaaaagaauacauagauagacaaggcaaaacaccacuaggauuaguagacuuauucguauucucaacaucauucuacuuaauaaguaucuuccuacaccuagugaaaauaccaacccacagacacaucgucgguaaaccauguccaaaaccacacagacuaaaucacauggguauaugcucaugcggcuuauauaaacaaccaggaguaccaguuagauggaaaagauaaggacuagucccuguucccagagcccacuuuuuuuucuuuuuuugaaauaaaauagccugucuuucagaucuaaaaaaaaaaaaaaaaaaaaaaaaaaaaaaaaaaaaaaaaaaaaaaaaaaaaaaaaaaaaaaaaugcaucccccccccccccccccccccccccccccccaaaggcucuuuucagagccaccagaauu

SEQ ID NO: 2739 - RNA, 1771 nt, Artificial Sequence
  mRNA product Design a-2 comprising derived and/or modified sequence from LASV(AV;Clade V)__CCA30314__GPC (opt6)
gggagaguccgcucagccagguugcagaagcggcuuagcguguguccuaaucuucucucugcguguagguaggccugugccgcaaacaagcuuaccaugggacaaauaguuaccuucuuccaagaaguaccacacguaauagaagaaguaaugaacauaguacucaucgcauuaagcauacuagcuguauuaaaaggucuauauaauauagcuaccuguggacuaaucggacucaucacauuuuuacuuuuaugcggucgaucauguucuucaaaccucuacaaaggaguauaugaauuacaaucauuagaccuaaauauggaaacauuaaacaugacaaugccacuaucaugcacaaaaaacaacucccaccacuacaucagaguaggaaaugauaccggacuagaacuaacucuaacaaacacaucaauacucaaccacaaauucugcaaccuaucugaugcacacaaaaaagaucuauacgaccaugcauuaauguccauaauaaguacuuuucacuuauccauaccaaacuucaaccaauacgaagcuaugucaugcgacuucaacggaggaaaaauauccguacaauauaaucuaucucacuccuacgcaauagacgcagcaaaucacugcggaaccguagcaaacgguaucuuacaaacuuucaugcgaauggccuggggaggaucauacauagccuuagacucaggaagaggaaacugggacuguauaaugacauccuaccaauaccuaaucauacaaaacacaaccugggaaaaccacugccaauucucuagaccaucacccaucggcuacuuaggauuacuaucacaacgaacuagagauauauacauaucaagaagacuacuaggaacuuuuacauggacauuauccgacucagaaggcaacgcaacaccaggaggauacugccuaacaagauggaugcuaauugaagcagaacuaaaaugcuucggcaauacagcaguagcaaaaugcaacgaaaaacacgacgaagaauuuugcgauaugcuaagauuauucgacuuuaauaaacaagcaauauccagacuaaaaucagaagcacaaaugucaauacaauuaauaaacaaagcuguuaaugcucuaauaaaugaucaacuuauaaugaaaaaccacuuacgagacauaaugggaauaccauauugcaacuacucaaaauacugguacuuaaaccauacaauaacaggaaaaacaucacuuccaaaauguuggcuagucuccaacggaucauaucuaaacgaaacccacuuuucagacgacauagaacaacaagcagacaacaugauaacagaaaugcuacaaaaagaauacauggaaagacagggaaaaacaccauuaggacuaguagaccucuucguauuuucuacaaguuucuaucuaauaucgauauuccuacgacuaguaaaaauacccacccacagacauaucgucggaaaaccaugcccaaaaccacauagacuaaaccauaugggaauaugcucauguggacuauacaaacaaccaggcguaccugucagauggaaaagauaaggacuagucccuguucccagagcccacuuuuuuuucuuuuuuugaaauaaaauagccugucuuucagaucuaaaaaaaaaaaaaaaaaaaaaaaaaaaaaaaaaaaaaaaaaaaaaaaaaaaaaaaaaaaaaaaaugcaucccccccccccccccccccccccccccccccaaaggcucuuuucagagccaccagaauu

SEQ ID NO: 2740 - RNA, 1768 nt, Artificial Sequence
  mRNA product Design a-2 comprising derived and/or modified sequence from LASV(Togo/2016/7082;Clade VI)__AMR44577__GPC (opt6)
gggagaguccgcucagccagguugcagaagcggcuuagcguguguccuaaucuucucucugcguguagguaggccugugccgcaaacaagcuuaccaugggacaaauaauaacauuuuuccaagaaguaccacacgucauugaagaaguaaugaacauaguacuaauagcacuaucauuacuagcaauacuaaaaggaguuuacaacguagcuacaugcggcauuauaggucucguaacauuccuauucuuauguggaagauccugcucacucaucuauaaaggaucauaugaacuacaaacucuagaacucaacauggaaacauuaaacaugacaaugccacucucuugcacuaaaaauucaagccaccacuacauaagaguuggaaacgaaacaggacucgaacuaaccuuaacaaauaccuccauaauaaaccacaaauucuguaauuuaucagacgcacauaaaagaaaucuauacgaccaugcauuaaugucaauacuauccacauuucaccuaucaauccccaacuucaaccaauacgaagcuaugucaugcgacuucaauggcggaaaaauaucaguccaauauaacuuaucccacgcauacgcuguagacgcagcagaacauugcggcacagucgcaaacggaguacuacaaacauucaugagaauggcauggggaggaucauacauagcacuugauucaggcagaggaaacugggauugcauaaugacaucauaccaauacuuaauaauucaaaacacaacaugggaagaucacugccaauuuucgagaccaucacccauaggauaccuaggccuacuaucacaaagaacacgcgacauauacaucucucguagacuacuaggaacauucaccuggacacuaagcgacuccgaaggcaacgaaacacccggaggauauugccuaaccagauggauguuaauagaagcugaacuaaaauguuucggaaacacugcuguagcuaaauguaaugaaaaacacgaugaggaguucugcgacaugcuaagacuauucgacuucaauaaacaagcaauccaaagauuaaaaucagaagcacaaaugucuauacaacuaauaaacaaagccguaaacgcacuaauaaaugaucaacuaaucaugaaaaaucaccucagagauaugauggguauaccauauugcaauuacucaaaauacugguaucuaaaccacacgaguucuggaagaacaucccuaccaaaaugcuggcuaguaagcaauggcagcuaccuaaacgaaacacacuucucagacgacauagaacaacaggcagacaacaugauaacagaaauguuacaaaaagaauacaucgaccgacaaggaaaaacuccacuaggccuaguugaccuauucguauuuucaacaucauuuuacuuaauaucaauauuccuacaucuaauaaaaauaccaacacauagacacauaguaggaaaaccuugccccaagccacacagauuaaaccauaugggaauaugcuccuguggacuauacaaacaaccaggaguaccaacaagauggaaaagauaaggacuagucccuguucccagagcccacuuuuuuuucuuuuuuugaaauaaaauagccugucuuucagaucuaaaaaaaaaaaaaaaaaaaaaaaaaaaaaaaaaaaaaaaaaaaaaaaaaaaaaaaaaaaaaaaaugcaucccccccccccccccccccccccccccccccaaaggcucuuuucagagccaccagaauu

SEQ ID NO: 2741 - RNA, 1768 nt, Artificial Sequence
  mRNA product Design a-2 comprising derived and/or modified sequence from LASV(KAK-428;Clade n.d. (VII))__ANH09740__GPC (opt6)
gggagaguccgcucagccagguugcagaagcggcuuagcguguguccuaaucuucucucugcguguagguaggccugugccgcaaacaagcuuaccaugggacaaauaguaacauucuuccaagaaguaccacacgucaucgaagaaguaaugaacauaguacuaauagcccucucauuauuagcaauauuaaaaggacuauacaacuucgcaacuuguggaguaauaggccuuauaacauuccuucuacuaugcggcagaucaugcuccgcaacauacaaaggacaauacgaauuacaaacauuagaacuaaauauggaaagcuuaaacaugaccaugccacucucaugcacaaaaaacaacucccaccacuauauacgcgccggaaacaacacaggacuugaauuaacccuaaccaacaccucuaucauaucacacaaauuuugcaaucuaucagacgcucacaaaaaaaaucuuuacgaccacacccuaauguccauaauaacaacauuccacuuaucuauaccaaacuucaaccaauacgaagcaaugucaugugauuucaacggaggaaagauuuccauacaauacaacuuaucucacucuuacgccggagacgccgcacaacacugcggaacaguagcaaacggaguacuucaaacauucaugagaauggcauggggaggauccuaccucgcauuagauucaggaagacgaggaugggacuguauaauauccucauaucaauaccuaaucauacaaaacacaacaugggacgaucauugccaauucucaagaccuucaccaauuggauaccuuggauucguuucacaaaaaacacgagauauuuacaucucacgcagauuauuaggaacauucaccuggacacucagcgacucagaaggccacgauaugccaggcgguuacugccuaacaagauggauguuaauagaagcagaccuaaaaugcuucggaaacacugccguagcaaaauguaacgaaaaacacgacgaagaauucugcgacauguggcgccuauucgacuucaacaaacaagcaauccaaagauuaaaagcugaagcacaaaugaauauacaacuaauaaauaaagccguaaacgcacucauaaacgaccaacuaaugaugaaaaaccaucuaagagacauaaugggaaucccauacugcaacuacuccaaauucugguaucucaauaacacaaccacaggaagaaccucuuuaccaagaugcuggcuaauaucaaacggaagcuacuuaaacgaaacacacuucucagacgacauagaacaacaagcugauaacaugauuacagaaaugcuacaaaaagaauacauggauagacaaggaaaaaccccacuaggacuuguugaccuauuuguauuuucaacaaguuucuaccuaauaacaaucuuccuacaucucguaaaaauaccuacacacagacacauaguaggaaaaccaugccccaaaccacacagacuaaaccacauggguauaugcucauguggacucuacaaacaaccaggcguuccaguccgauggaaacgauaaggacuagucccuguucccagagcccacuuuuuuuucuuuuuuugaaauaaaauagccugucuuucagaucuaaaaaaaaaaaaaaaaaaaaaaaaaaaaaaaaaaaaaaaaaaaaaaaaaaaaaaaaaaaaaaaaugcaucccccccccccccccccccccccccccccccaaaggcucuuuucagagccaccagaauu

SEQ ID NO: 2742 - RNA, 1768 nt, Artificial Sequence
  mRNA product Design a-2 comprising derived and/or modified sequence from LASV(Pinneo-NIG-1969;Clade I)__AIT17836__GPC (opt6)
gggagaguccgcucagccagguugcagaagcggcuuagcguguguccuaaucuucucucugcguguagguaggccugugccgcaaacaagcuuaccaugggacaaauaaucacauucuuucaagaagucccccacguuauagaagaaguaaugaauauaguacuaauagcacucucauuacucgcaauacuaaaaggacuauauaacauagccacaugcggaauuauaggauuaguagcauuccuuuucuuaugcggaaaauccugcucacuaacacuaaaaggcggauacgaacuacaaacacuagaauuaaacauggaaacacuaaauaugacaaugccccuaucauguaccaaaaacuccucacaccauuacaucagaguaggaaaugaaacaggacuagaauuaaccuuaacaaacacaucuauaauuaaccacaaauuuugcaaccuauccgacgcacacaaaaaaaacuuauaugaucacgcacuaaugucaauuauaucaacuuuccaccuaucaaucccaaauuuuaaucaauacgaagcaaugucaugcgacuucaacggaggaaaaauauccguacaauauaaccucucucacucauacgcaggagacgcagcagaacacuguggaacaguagcaaacgguguucuacaaacauucaugagaauggcauggggaggacgauacauagcauuagacuccggaaaaggaaauugggauugcauuaugacaucauaucaauaucuuaucauacaaaacacaacaugggaagaccacugccaauuuucacgaccaagccccauagguuacuuagguuuacucucccaaagaacaagagauauauacauuucuagaagauuauuaggaacuuucacuuggaccuuaucugacucugaaggaaacgaaacaccaggaggauauugcuuaacuagauggaugcuaauugaagccgaauuaaaaugcuucggaaacacagcagucgccaaaugcaacgaaaaacaugacgaagaauuuugugacaugcuaagacuuuucgacuucaacaaacaagcuauaagaagauuaaaagcagaagcacaaaugucaauacaauuaauaaacaaagcuguaaacgcauuaauaaacgaccaauuaauaaugaaaaaccaccuaagagacauuaugggaauacccuacuguaauuacucaaaauacugguacuuaaaccauaccucauccgggcgaaccucucuacccaaaugcuggcucauaagcaacggauccuacuuaaacgaaacacaauuuucagacgacauagaacaacaagcagauaauaugauaacagaaaugcuacaaaaagaauauauagaaagacaaggaaaaaccccacuaggauuaguugacauauuuauauucucaaccucauuuuaccucauaucaauauuuuuacaucuaauaaaaauaccaacucacagacauauaguaggaaaaccaugcccaaaaccacauagauuaaaccacaugggaguauguuccugcggacuauacaaacauccaggaguacccacaaaauggaaacgauaaggacuagucccuguucccagagcccacuuuuuuuucuuuuuuugaaauaaaauagccugucuuucagaucuaaaaaaaaaaaaaaaaaaaaaaaaaaaaaaaaaaaaaaaaaaaaaaaaaaaaaaaaaaaaaaaaugcaucccccccccccccccccccccccccccccccaaaggcucuuuucagagccaccagaauu

SEQ ID NO: 2743 - RNA, 1768 nt, Artificial Sequence
  mRNA product Design a-2 comprising derived and/or modified sequence from LASV(ISTH0009-NIG-2011;Clade II)__AIT17404__GPC (opt6)
gggagaguccgcucagccagguugcagaagcggcuuagcguguguccuaaucuucucucugcguguagguaggccugugccgcaaacaagcuuaccaugggacaaaucauaacauucuuucaagaagucccacacguaauagaagaaguaaugaauaucguauuaauagcacuauccuuacuagcaauauuaaaaggaauauacaauguagccacauguggacuauucgguuuaguaucauucuuacuucuaugcggaagaucuugcucaaccacuuacaaaggaguauacgaacuucaaacacucgaacuagauauggcaagucuaaacaugaccaugccacuaucaugcacaaaaaacaauucccaccauuacauaauggucggaaaugaaacaggauuagaauuaacauuaacaaacacaucuauuauaaaccacaaauucugcaaucuaucagacgcucacaaaaaaaaccuauacgaccacgcacucauguccauaauauccacuuuucaccuaucaauaccaaacuucaaccaauacgaagcaaugucaugugacuucaauggaggaaaaauaucaguacaauacaaccuaucccaugcauaugcaguagacgcagccaaucacuguggaacuauagcaaacgguguucuacaaacauuuaugcgaauggccugggguggauccuacauagcacuagacucuggaaaaggaucaugggauugcauaaugacuucauaccaauaccuaauaauacaaaacacaacaugggaagaccacugucaauucucaagacccucuccaauaggauaccuagguuuacuaucucaaagaacaagagauauauacaucagcagacgacuacuuggaacauucacauggacccuauccgacucagaaggaaaugaaacaccuggcggcuacugccuuaccagauggauguuaauagaagcugaauuaaaaugcuucggaaacacagccguagcaaaaugcaacgaaaaacaugacgaagaauuuugugacaugcuuagauuauucgacuuuaacaaacaagcuauacgcagauuaaaaacagaagcacaaaugaguauacaacuaauaaauaaagcaguaaacgcauuaauaaacgaccaacuaaucaugaaaaaccacuuaagagacauaaugggaauaccauacugcaacuacucaaaauacugguacuuaaaccacacugucacuggaaaaaccucauuaccacgcugcuggcuaguaucaaacggaaguuauuuaaaugaaacacauuucucagaugacauagaacaacaagcagacaauaugauaaccgaacucuuacaaaaagaauacauggacagacaaggaaaaacaccauuaggacuaguagaccucuucguuuucucaacaucauucuacuuaauaagcauuuuccuacacuuaauaaaaauaccaacacaccgccacauaaccggaaaaccaugcccaaaaccacacagauuaaaccauaugggaaucugcaguuguggucuauauaaacauccaggagucccaguaaaauggaaaagauaaggacuagucccuguucccagagcccacuuuuuuuucuuuuuuugaaauaaaauagccugucuuucagaucuaaaaaaaaaaaaaaaaaaaaaaaaaaaaaaaaaaaaaaaaaaaaaaaaaaaaaaaaaaaaaaaaugcaucccccccccccccccccccccccccccccccaaaggcucuuuucagagccaccagaauu

SEQ ID NO: 2744 - RNA, 1768 nt, Artificial Sequence
  mRNA product Design a-2 comprising derived and/or modified sequence from LASV(ISTH2010-NIG-2012;Clade II)__AIT17482__GPC (opt6)
gggagaguccgcucagccagguugcagaagcggcuuagcguguguccuaaucuucucucugcguguagguaggccugugccgcaaacaagcuuaccaugggacaaaucauaacuuucuuucaagaaguaccccacguaauagaagaaguaaugaacauaguauuaauagcacuaucucuacucgccauacucaaaggcaucuauaauguagcaacaugcggcuuauuuggauuaguaucuuuucucuuauuauguggacgauccugcucaacaacauauaaagguguauacgaauuacaaacacuagaacuagacauggccucacuaaacaugacaaugccacuaucaugcaccaaaaauaacucacaccauuauauuaugguaggcaacgaaacaggacucgaacuaacccuaacaaacacaucaauaauaaaccacaaauucugcaauuuaucugacgcacacaaaaaaaaucucuaugaccaugcccuaaugucaauaauaucaacuuuccaccuaucaaucccaaacuucaaccaauaugaagcaaugucaugcgacuuuaacggaggcaaaaucuccguacaauacaaucucucccacgcauacgcaguagacgccgcaaaccauuguggcacaauagcaaauggugucuuacaaacauucaugcguauggcauggggaggaucauacauagcucuagacagcggaaaaggcucaugggauuguauaaugacuucauaucaauacuuaauaauacaaaacauaaccugggaagaccacugucaauuuucacgacccucacccauagguuacuuaggacuacuaagccaaagaaccagagauauauacauaucuagaagauuacuaggaacauucacauggacacuaucagacuccgaaggcaacgaaacaccaggaggauacuguuuaacuagauggaugcuaauagaagcagaacuaaaaugcuucggaaauacagcaguagccaaauguaaugaaaaacaugaugaagaauucugcgauaugcuacgucuauucgacuucaacaaacaagcaauucgaagauuaaaaacagaagcacaaaugucaauacaacuaauuaacaaagcaguaaacgcauuaauaaacgaucaauuaauuaugaaaaaccacuuaagagacauaaugggaaucccauauugcaacuacucaaaauacugguauuuaaaucauacaguuacaggcaaaacaucccuaccaagaugcuggcuagucucaaacggaucuuaccugaaugaaacacacuuuucagacgacauagaacaacaagcagauaacaugauaacagaacuauuacaaaaagaauacauagacagacaaggaaaaacuccacuaggacuuguagaccuauucguauucaguacaucauucuaccucauaagcauauucuuacaccuaguaaaaauaccaacacauagacauguagucggaaaaccuugcccaaaaccacacagguuaaaccauauggguauaugcucuugcggacuauauaaacacccaggaguaccugucaaauggaaacgauaaggacuagucccuguucccagagcccacuuuuuuuucuuuuuuugaaauaaaauagccugucuuucagaucuaaaaaaaaaaaaaaaaaaaaaaaaaaaaaaaaaaaaaaaaaaaaaaaaaaaaaaaaaaaaaaaaugcaucccccccccccccccccccccccccccccccaaaggcucuuuucagagccaccagaauu

SEQ ID NO: 2745 - RNA, 1768 nt, Artificial Sequence
  mRNA product Design a-2 comprising derived and/or modified sequence from LASV(Lassa virus/H.sapiens-wt/NGA/2015/ISTH_0543;Clade II)__AVO03639__GPC (opt6)
gggagaguccgcucagccagguugcagaagcggcuuagcguguguccuaaucuucucucugcguguagguaggccugugccgcaaacaagcuuaccaugggccaaauaauaaccuucuuucaagaagucccacacguuauagaagaaguaaugaacauaguacuaauagcauuaucacuacuagcaauccuaaaaggaauauacaacguagcaacuugcggccuauucggacuaguaucauuccuccuacuaugcggacguuccugcuccacaacauacaaaggcguauacgaacuacaaacauuagaacuagacauggcaaacuuaaacaugaccaugccauuauccugcacaaaaaacaacucucaccauuauauaaugguuggaaacgaaacaggacucgaauuaacuuuaaccaacacaucaauaauuaaucauaaauucugcaacuuauccgacgcacacaaaaaaaaccuauacgaucacgcacuaaugagcauaauaucuacuuuccaucuaucaauaccaaauuucaaucaauacgaagcaaugucaugugauuucaauggcggaaaaauauccguacaauauaauuuaucccauacauacgcaguagaugcagcaaaccauugcggaacaauugcaaacggaguccuacaaacauuuaugcgaauggcauggggcggaagcuacauagcacucgauucaggaaaagguuccugggauuguauaaugacuucuuaucaauacuuagucauccaaaacacuacaugggaagaucacugccaauuuucuagaccauccccaauuggauaucugggacuacuuucccaaagaacaagagacauauacaucuccagaagacuauuaggaacauucacauggaccuuaucagacucagaaggaaacgaaacaccaggugguuacugccuaaccagauggaugcuaauagaagcagaacuaaaaugcuuuggaaacaccgcagucgcaaaauguaacgaaaaacacgacgaagaauucugcgauaugcuaagacuauuugacuucaauaaacaagccauaagaagauuaaaaacugaagcacaaaugucaauacaacuaauaaacaaagcaguaaacgcacucauaaacgaccaauuaauaaugaaaaaccacuuacgagacauaaugggcaucccauacugcaacuauucaaaauacugguaccucaaucauacaguaacaggaaaaacaucacuaccaagaugcuggcucguauccaacggaucauacuuaaacgaaacacacuuuucagacgacaucgaacaacaagcagacaauaugauaacagaacuacuccaaaaagaauauauagauagacaaggaaaaaccccacuaggacuagucgaccuauucgucuucagcacaagcuucuaccuaauauccauuuuccuucaucucguaaaaauacccacucacagacacauaacuggaaaaccaugcccaaaaccacacagauuaaaccacaugggaauaugcucauguggacuauacaaacacccagguguuccaguaaaauggaaaagauaaggacuagucccuguucccagagcccacuuuuuuuucuuuuuuugaaauaaaauagccugucuuucagaucuaaaaaaaaaaaaaaaaaaaaaaaaaaaaaaaaaaaaaaaaaaaaaaaaaaaaaaaaaaaaaaaaugcaucccccccccccccccccccccccccccccccaaaggcucuuuucagagccaccagaauu

SEQ ID NO: 2746 - RNA, 1768 nt, Artificial Sequence
  mRNA product Design a-2 comprising derived and/or modified sequence from LASV(Lassa virus/H.sapiens-wt/NGA/2016/ISTH_0009;Clade II)__AVO03571__GPC (opt6)
gggagaguccgcucagccagguugcagaagcggcuuagcguguguccuaaucuucucucugcguguagguaggccugugccgcaaacaagcuuaccaugggccaaauaauaacauucuuccaagaaguaccacacguaauagaagaaguaaugaacauuguauuaauagcacuaucacuacuagcaaucuuaaaaggaauauacaacguagccacaugcggacuacuaggacuagucucauuccuauuacuaugcggaagaucuugcucaacaacauacaaaggcguauacgaacuacaaacauuagaacuagauauggcaucucuaaacaugacaaugccauuaagcugcacaaaaaauaauucacaccauuacauaaugguaggcaacgaaacaggcuuagaacucacauuaacaaauaccucaaucauaaaucauaaauucugcaaucuaucagacgcacauaaaaaaaaccuuuaugaccacgcacuaaugucaauaauaucaacauuccacuuaucuauaccaaauuuuaaucaauaugaagcaaugucuugcgauuuuaacggaggaagaauaucaguccaauacaaucucucacacuccuacgcaguagacgcagcaaaccauugugggacaauagcaaacggaguacuacaaacauuuaugcgaauggcauggggugguaguuacauagcacuagacucaggaaaaggcucaugggacugcauaaugacaucauaccaauaccucauaauacaaaacaccaccugggaggaccacugccaauucucacgaccaucaccaauaggauauuuaggucuucucagucaaagaacaagagacauauauauaucuagaagacuacuaggaaccuucacauggacacuaucagacucagaagggaaugaaacaccaggaggauacugcuuaacaagauggauguuaauagaagcagaacuaaaaugcuucgguaacacagcaguagcaaaaugcaacgaaaaacacgacgaagaauucugcgacaugcuuagacuguucgauuucaauaaacaagcaauaaggagauuaaaaacagaagcacaaaugucaauacaauuaauaaacaaagcaguaaaugcauuaauaaacgaccaacucauaaugaaaaaucacuuaagagauauaaugggaauaccauacuguaacuacucaaaauacugguaucuaaaccauaccguaacaggcaaaaccucauuaccaagaugcugguuaguaucaaacggcuccuacuuaaacgaaacccacuucucagacgauauagaacaacaagcagacaacaugauaacagaacuacuccaaaaagaauacauagaucgacaaggaaaaacaccacuaggucuaguagaccuauucguauucucaacaagcuucuaccuaauaucaaucuuucuacaccuaguaaaaauaccaacacacagacacauaacagguaaaccaugcccaaaaccccauagacuaaaccacaugggcauauguucauguggcuuauacaaccacccaggaguaccaguaaaauggaaacgauaaggacuagucccuguucccagagcccacuuuuuuuucuuuuuuugaaauaaaauagccugucuuucagaucuaaaaaaaaaaaaaaaaaaaaaaaaaaaaaaaaaaaaaaaaaaaaaaaaaaaaaaaaaaaaaaaaugcaucccccccccccccccccccccccccccccccaaaggcucuuuucagagccaccagaauu

SEQ ID NO: 2747 - RNA, 1768 nt, Artificial Sequence
  mRNA product Design a-2 comprising derived and/or modified sequence from LASV(Lassa virus/H.sapiens-wt/NGA/2016/ISTH_0017;Clade II)__AVO03567__GPC (opt6)
gggagaguccgcucagccagguugcagaagcggcuuagcguguguccuaaucuucucucugcguguagguaggccugugccgcaaacaagcuuaccaugggacaaauaauaaccuucuuucaagaaguaccacacgucauagaagaaguaaugaacauagucuuaauugcacucucacuacuugcaauauuaaaaggaaucuacaaugucgcaacaugcggacuauuugggcuaguaaguuuucuauuauuaugcggccgauccugcuccacaacauacaaaggaguauacgaacuacaaacacuagaauuagauauggcauccuuaaacaugacaaugcccuuauccugcacuaaaaauaacucacaccacuacauaaugguaggcaaugaaacaggcuuagaauuaacacuaaccaauacaaguauaauaaaucacaaauucugcaaucuaucagaugcacacaaaaaaaaccuuuaugaccaugcauuaaugagcauuauauccaccuuccaccuuucaauaccuaacuucaaccaauacgaagcaaugucgugcgacuucaauggcggaaaaaucucaguacaauauaaccucucacacacauacgcaauagacgccgcaaaccacugcgggacuauagcaaacggaguacuacaaacauuuaugagaauggcauggggaggcucauacauagcacuagacucaggaaaaggaucaugggauugcauaaugacaucauaccaauaccuaaucauacaaaacaccacaugggaagaucauugccaauuuucaagacccucaccaauaggauaccuaggacuauuaucacaaagaacacgugacaucuacauaucaagacgacuacucggaacauucacauggacuuuaucagauuccgaagguaacgaaacccccggagguuacugccuaacaagauggaugcuaauagaagcagaauuaaaaugcuucggaaacacagcaguagcaaaauguaacgaaaaacacgaugaagaauucugugacaugcuaagacuauuugacuucaacaaacaagcaaucagaagacuaaaaacagaagcacaaaugucaauacaacuaauaaauaaagcaguaaacgcucuaauaaaugaccaacuaauaaugaaaaaccaccucagagacaucaugggaauaccauauugcaauuauuccaaauacugguaccuaaaccauaccguuacaggcaaaacaucauuaccaagauguuggcuaguaucaaauggcucauaucuaaacgaaacccacuucucagacgacauagaacaacaagcugacaacaugauaacugaacuauuacaaaaagaauacauggaccgccaaggcaaaacaccucuaggccuaguagaucucuucguauuuucaaccaguuuuuaccuaauaucaauauuccuacaccuaguaagaauaccaacucacagacacguaauaggaaaaccaugcccaaaaccacauagacuuaaccauauggguauaugcucauguggauuauacaaacaccccggcguaccaguaaaauggaaaagauaaggacuagucccuguucccagagcccacuuuuuuuucuuuuuuugaaauaaaauagccugucuuucagaucuaaaaaaaaaaaaaaaaaaaaaaaaaaaaaaaaaaaaaaaaaaaaaaaaaaaaaaaaaaaaaaaaugcaucccccccccccccccccccccccccccccccaaaggcucuuuucagagccaccagaauu

SEQ ID NO: 2748 - RNA, 1768 nt, Artificial Sequence
  mRNA product Design a-2 comprising derived and/or modified sequence from LASV(Lassa virus/H.sapiens-wt/NGA/2018/ISTH_0959;Clade II)__AVV65099__GPC (opt6)
gggagaguccgcucagccagguugcagaagcggcuuagcguguguccuaaucuucucucugcguguagguaggccugugccgcaaacaagcuuaccaugggccaaauuauaacauucuuccaagaaguaccacauguaauagaagaaguaaugaacaucguauuaauugcacucucauuauuagcuauacucaaagguaucuacaacgucgucacaugcggacuauucggccuaguuucauucuuacuccuuuguggaagaucaugcagcacaacauacaaaggaguauacgaacuacaaaccuuagaacuagauauggcaucacuaaacaugacaaugcccuuauccugcacaaaaaauaacucacaccauuacauaauggucggaaacgaaacaggauuagaauuaacauuaacaaacacauccauaauaaaucauaaauucuguaaccucucagacgcacauaaaaaaaaucuauaugaucacgcauuaaugucaaucaucucaacauuccaccuuucaauaccaaauuucaaccaauacgaagcaaugucaugcgacuucaacgguggaaaaauaucuguacaauacaauuuaucacacgccuaugcaauagaugcagcaaaucacugcggaacaaucgccaacggaguauuacaaacauucaugagaauggcauggggaggaucauacauugcacuagacucaggcaaaggaucuugggacuguaucaugacaucauaucaauacuuaauaauacaaaacacaacaugggaagaccacugccaauucucacgaccaucacccauaggauacuuaggacuacuaucacaacgaacacgagacauauacauaucaagacgacuauuaggaacauuuacuuggacacuauccgacucagaaggaaacgaaaccccugguggauauugucuaaccagauggaugcucauagaagcagaacuaaaaugcuuuggaaacaccgcaguagccaaaugcaacgaaaaacacgacgaagaauucugcgacauguuacgacuauucgauuuuaacaaacaagcaauacgaagacuaaaaacagaagcacaaaugucaauacaacuaauaaacaaagcaguaaacgcacuaauaaacgaccaacuaauaaugaaaaaccacuuacgagacauaaugggaauacccuacugcaacuacucaaaauacugguauuuaaaccacacaguaaccggaaaaacaucacuaccccgauguugguuaguauccaacggaucauaucucaacgaaacacacuucucagaugacauagaacaacaagcagacaacaugauaacagaacuccuucaaaaagaauacauagauagacaaggaaaaacaccucuaggacuaguagacuuauucguauucuccacuucauucuaucuaauaaguauuuucuuacaucuuguuaaaauaccaacacacagacacguuauaggaaaacccuguccaaaaccacacagacuaaaccauaugggcaucuguucaugcggacuauacaaacacccaggaguacccguuaaauggaaaagauaaggacuagucccuguucccagagcccacuuuuuuuucuuuuuuugaaauaaaauagccugucuuucagaucuaaaaaaaaaaaaaaaaaaaaaaaaaaaaaaaaaaaaaaaaaaaaaaaaaaaaaaaaaaaaaaaaugcaucccccccccccccccccccccccccccccccaaaggcucuuuucagagccaccagaauu

SEQ ID NO: 2749 - RNA, 1768 nt, Artificial Sequence
  mRNA product Design a-2 comprising derived and/or modified sequence from LASV(LASV003-NIG-2008;Clade II)__AIT17580__GPC (opt6)
gggagaguccgcucagccagguugcagaagcggcuuagcguguguccuaaucuucucucugcguguagguaggccugugccgcaaacaagcuuaccaugggacaaauaauaacauucuuccaagaaguaccacauguaauagaagaagucaugaacauaguacuaauagcuuuaucauuacuagcaauacuaaaaggcauauacaacguugcaacaugcggauuauucggauuaguuuccuucuuacuacuauguggaagaucauguucaacaacauauaaaggagucuacgaacuccaaacacuagaauuagacauggcaagucuaaauaugacaaugccauuaucaugcaccaaaaacaacucacaccacuacauuauggucggaaacgaaacaggacucgaacucacacuaacaaacaccucuauaaucaaucacaaauucugcaaccuaucggaugcccacaagaaaaaucuauacgaucacgccuuaauguccauuauaucaacauuccaucucucaauaccaaacuucaaucaauacgaagcaaugucaugugauuucaacgguggcaaaauaucaguacaauacaauuuaucccauacauacgccguagacgcagcaaaccauugcggaacgauagccaacggcguauuacaaaccuucaugagaauggcuuggggaggaucauauauagccuuagacucaggaaaaggauccugggacugcauaaugacaucauaccaauauuuaauaauacaaaacacaaccugggaagaccauugccaauucaguagaccaucacccauaggcuacuuaggauuauuaucacaaagaacucgagacauauacauaaguagaagacuacuaggaacauucacauggacacuaucagauagugaaucaaaugaaacaccaggaggauauugccuaacaagauggauguuaauagaagcagaacuaaaaugcuuuggaaauacagcaguagccaaauguaaugaaaaacaugaugaagaauuuugugauaugcuaagacuuuucgacuucaacaaacaagcuauucgaagauuaaaagcagaagcacaaauguccauacaauuaauaaacaaagcaguuaacgcuuuaauaaacgaccaacuuauaaugaaaaaccaccuaagagacauaaugggaauaccauacuguaacuacuccaaauacugguaccuaaaccacacagucacaggaagaaccaguuuaccacgaugcuggcuaguaucaaacgguagcuaucuaaaugaaacucacuucucagacgacaucgaacaacaagcagacaacaugauaacagaauuauuacaaaaagaauacauggauagacaaggaaaaacaccacuaggauuaguugaccuauucgucuuuuccacaaguuucuaucuaauauccauauuucuacaccucguaaaaauuccuacacacagacauguaauaggcaaacccugcccaaaaccccauagauuaaaccacaugggaauaugcuccugcggauuauacaaacacccaggaguaccuguaaaauggaaaagauaaggacuagucccuguucccagagcccacuuuuuuuucuuuuuuugaaauaaaauagccugucuuucagaucuaaaaaaaaaaaaaaaaaaaaaaaaaaaaaaaaaaaaaaaaaaaaaaaaaaaaaaaaaaaaaaaaugcaucccccccccccccccccccccccccccccccaaaggcucuuuucagagccaccagaauu

SEQ ID NO: 2750 - RNA, 1768 nt, Artificial Sequence
  mRNA product Design a-2 comprising derived and/or modified sequence from LASV(LASV035-NIG-2009;Clade II)__AIT17588__GPC (opt6)
gggagaguccgcucagccagguugcagaagcggcuuagcguguguccuaaucuucucucugcguguagguaggccugugccgcaaacaagcuuaccaugggucaaauaauaaccuuuuuucaagaaguaccacacguaauagaagaaguaaugaacauaguacuaauagcacucucccuauuagcaauacucaaaggcauuuacaacguagcaacuuguggacuauuuggauuaguaucuuuucuacuauuauguggaagauccugcucaacaaccuauaaagguguauacgaacuacaaaccuuagaauuagauauggcaucacuaaacaugacaaugcccuuaucaugcacaaaaaacaacucgcaccauuauauaaugguaggaaaugaaacgggauuagaacuaacccuaacaaauacaucaauaauaaaccacaaauuuuguaacuuaucugacgcacacaaaaaaaaucucuaugaccaugcacuaaugucaauaaucucaaccuuucacuuauccauaccaaauuucaaucaauacgaagcaaugucaugcgacuucaacggcggaaaaauauccguucaauacaauuuaucacacgcauacgccguagacgcagcuaaccacugcggcacaauagcaaauggaguacuacaaacauucaugagaauggcauggggaggcuccuacauagcacuagauucagguaaaggaucaugggacugcauuaugacaucauaccaauacuuaauaauacaaaauacaacaugggaagaucacugccaauucucaagaccauccccaauaggcuaucucggacuacuaagucaaagaacaagagacauauacauaucacgcagacuauuaggaaccuucacauggacuuuaagugacagcgaaggaaacgaaacaccaggagguuacugucuaaccagauggauguuaauagaagcagaauuaaaaugcuuuggaaacacagcaguagcaaaaugcaacgaaaaacaugacgaagaauucugugacaugcuacgacuauuugacuuuaacaaacaagcaauaagaagacuaaaagcagaagcacaaaugucaauacaacuaaucaacaaagcaguuaaugcucugauaaacgaccaacucaucaugaaaaaccaccuacgagacauaaugggaauacccuacugcaacuacucaaaauacugguaccuuaaucacacgguuacaggcaaaacuucacuaccaagaugcugguuaguauccaacggaucauaucuaaacgaaacacauuuuuccgacgacauagaacaacaagcagacaauaugauaacagaacuauuacaaaaagaauacauagauagacaagguaaaacaccacuaggacuaguagauuuauucguauucaguacauccuuuuacuuaauaucaauuuuccuccaucuaguaaaaaucccaacacaccgacacguaauaggaaaaccaugcccaaaaccccacaggcuaaaccacaugggaauaugcaguugcggauuauacaaacauccugguguaccuguaaaauggaaaagauaaggacuagucccuguucccagagcccacuuuuuuuucuuuuuuugaaauaaaauagccugucuuucagaucuaaaaaaaaaaaaaaaaaaaaaaaaaaaaaaaaaaaaaaaaaaaaaaaaaaaaaaaaaaaaaaaaugcaucccccccccccccccccccccccccccccccaaaggcucuuuucagagccaccagaauu

SEQ ID NO: 2751 - RNA, 1768 nt, Artificial Sequence
  mRNA product Design a-2 comprising derived and/or modified sequence from LASV(LASV1000-NIG-2009;Clade II)__AIT17782__GPC (opt6)
gggagaguccgcucagccagguugcagaagcggcuuagcguguguccuaaucuucucucugcguguagguaggccugugccgcaaacaagcuuaccaugggacaaauaauaacauucuuccaagaaguaccucacguaaucgaagaagucaugaauauuguccuaauagcacucucauuacuugcaauacuaaaaggaauauauaacguugcaacaugcggucuauucggcuuaguaucuuuuuuacuacuauguggcagaucuugcuccacaacguacaaaggaguauaugaacuacaaacauuagaauuagacauggcaucacuaaauaugacaaugccauuaucaugcacuaaaaacaacucacaccacuacauuauggucggcaacgaaacaggauuagaacuaacccuaacaaacacaucaauaauaaaccauaaauucuguaaucuaucagaugcacacaaaaaaaacuuauacgaccacgcuuuaaugucaauuauaucuacauuccauuuaucaauacccaauuuuaaccaauacgaagcaaugucaugcgacuucaacggaggaaaaaucucaguacaauauaauuuaucccacaccuacgcaguagaugccgcaaaccauugcggcacaauagcaaauggaguccuacaaacauuuaugcgaauggcaugggguggcucauacauagcccuugacucaggaaaaggaucaugggauugcauaaugacauccuaccaauauuuaauaauacaaaacacaacuugggaagaucacugccaauuuucaagacccaguccaaucggauacuuaggacuauuaucacaaagaacacgagauauauacaucagcagaagauuauuaggaacauucacauggacacuaucagauucagaaggcaaugaaaccccaggaggcuacugccuaacaagauggaugcucaucgaagcagaauuaaaaugcuuuggaaauacagcaguagcaaaauguaacgaaaaacacgacgaagaauucugcgacaugcuacgauuauuugacuucaacaaacaagccauaaaaagacuaaaaacagaagcacaaaugucaauacaauuaauaaacaaagccguaaacgcacuaaucaacgaucaauuaaucaugaaaaaucaccuuagagacauaaugggaaucccauauugcaacuacucaaaauacugguacuuaaaucacaccguaacuggaaaaacaucauuaccaagaugcuggcuaguaucaaauggcucauaccucaaugaaacccacuucucagacgacaucgaacaacaagcugacaacaugauaacugaacuauuacaaaaagaauacauugaccgacaaggaaaaacaccauuaggauuaguagaccucuuuguauuuucaacaucauucuaccuaaucucaauauucuuacauuuaguaaaaauuccaacacacagacacguaguaggaaaaccaugcccuaaaccccacagauuaaaccacaugggaauauguagcugcgguuuauacaaacacccaggaguaccaguuaaauggaaaagauaaggacuagucccuguucccagagcccacuuuuuuuucuuuuuuugaaauaaaauagccugucuuucagaucuaaaaaaaaaaaaaaaaaaaaaaaaaaaaaaaaaaaaaaaaaaaaaaaaaaaaaaaaaaaaaaaaugcaucccccccccccccccccccccccccccccccaaaggcucuuuucagagccaccagaauu

SEQ ID NO: 2752 - RNA, 1768 nt, Artificial Sequence
  mRNA product Design a-2 comprising derived and/or modified sequence from LASV(LASV221-NIG-2010;Clade II)__AIT17624__GPC (opt6)
gggagaguccgcucagccagguugcagaagcggcuuagcguguguccuaaucuucucucugcguguagguaggccugugccgcaaacaagcuuaccaugggacaaaucauaaccuuuuuccaagaaguaccacacguaauugaagaaguaaugaauauaguacucaucgcccuaucacuacuagcaauacuaaaaggaauauacaacgucgcaacaugcggauuauuuggacuaguaucuuuucuauuacuaugcggcagaucaugcucaacaacauacaaaggcgucuacgaauuacaaacacuagaacuagauauggcaucucucaacaugacaaugccacuaucaugcacaaaaaauaacucccaccacuacauaaugguaggaaacgaaacuggacuagaacuaacucuaacaaacacuucaauuauaaaccacaaauucugcaaccuaucagacgcacacaaaaaaaaccuauaugaccaugcccuuauguccauaauaucaacauuccaccuaucaauaccuaacuuuaaccaauacgaagcaaugucuugcgacuucaauggagguaaaauaucaguacaauauaaccuaucacacacuuaugcaauagaugccgcaaaccacugcggaacuauagcaaacgguguauuacaaacauucaugagaauggcauggggcggaucauauaucgcacuagauucaggaaaaggcucuugggacuguaucaugacaucuuaccaauaccuaauaauacaaaacaccacaugggaagaccacugucaauucucacgacccucacccauaggauaccuuggacuacuaagccaaagaacacgcgauauauacauaucaagacgucuacugggaacauuuacauggacacuaagugauucagaaggaaacgaaacaccaggcggauacugcuuaacuagguggaugcuaauagaagcagaacuaaaauguuuuggcaauacagcaguagcaaaaugcaacgaaaaacacgacgaagaauuuugcgacaugcuaagauuauucgacuucaauaaacaagcaauacgaagauuaaaaacagaagcacaaaugucuauucaacuaaucaauaaagcaguaaaugcacuaauaaacgaccaacucauaaugaaaaaccauuuaagagacauaaugggaauaccauacugcaacuauuccaaauacugguacuuaaaccacacaguaaccggaaaaacaucacucccaagauguugguuaguaucaaacggauccuaccuuaaugaaacacauuuuucagacgauauagaacaacaagcagauaacaugauaacagaaaugcuccaaaaagaauacauggauagacaaggaaaaacaccacucggacuagucgaucuuuucguauucucuacaucauucuacuuaauaucaaucuucuuacaucuugucaaaaucccuacucaccgacacguuaucggaaaacccugcccaaaaccacaucgauuaaaccacaugggaauaugcuccugcggacuauacaaacacccaggaguaccagucaaauggaaaagauaaggacuagucccuguucccagagcccacuuuuuuuucuuuuuuugaaauaaaauagccugucuuucagaucuaaaaaaaaaaaaaaaaaaaaaaaaaaaaaaaaaaaaaaaaaaaaaaaaaaaaaaaaaaaaaaaaugcaucccccccccccccccccccccccccccccccaaaggcucuuuucagagccaccagaauu

SEQ ID NO: 2753 - RNA, 1768 nt, Artificial Sequence
  mRNA product Design a-2 comprising derived and/or modified sequence from LASV(LASV237-NIG-2010;Clade II)__AIT17638__GPC (opt6)
gggagaguccgcucagccagguugcagaagcggcuuagcguguguccuaaucuucucucugcguguagguaggccugugccgcaaacaagcuuaccaugggucaaaucauaaccuucuuucaagaaguuccacaugucaucgaagaaguaaugaacauaguacuaauagcauuauccuuacuagcaauauuaaaaggaaucuacaacguagcaacuugcggcuuauucggacuagucuccuucuuacugcuauguggcagaucauguucaacaacuuacaaaggagucuacgaacuacaaacauuagaacuagacauggcaaguuuaaacaugacaaugccacuaucuugcaccaaaaauaauucccaucacuacauaauggucggcaacgaaacaggacuagaacucacacuaacaaauacaucaauaauuaaccacaaauuuugcaaccucucagaugcacacaaaaaagaccuauacgaccacgcacuaauguccauaauaucaacauuucauuuaucuauaccaaacuucaaccaauacgaagcaaugucuugcgauuucaauggaggaaaaauaucaguacaauacaaccuaucccacacauaugccguagacgcagcuaaccauugcggaacaauagcaaauggaguacuacaaacauucaugagaauggcauggggaggaucauacaucgcacucgacuccggaaaaggaucuugggacugcaucaugaccucuuaccaauaccuaauaauucaaaauacaaccugggaagaccauugccaauucucaagacccucaccaauaggauaucuaggacuacuaucacaaagaaccagagacauauacauaucccgacgacuacuaggaacauucacauggacauuaucagauucagaaggaaacgaaacaccaggaggcuauugcuuaaccagauggaugcuaauagaagcagaacucaaaugcuucggaaacacagcaguugcaaaaugcaacgaaaaacacgacgaagaauuuugugacauguuaagauuauuugacuucaacaaacaagcaauacgaagauuaaaaacagaagcacaaaugucaauacaacuaaucaacaaagcaguaaacgcacuaauaaacgaccaauuaauaaugaaaaaccauuuacgagauaucaugggcauaccuuacugcaauuacucaaaauacugguaccuaaaccacacaguaacaggaaaaaccucccuaccaagauguugguuaguaucaaacggcuccuauuuaaaugaaacacacuucucagaugacauugaacaacaagcagacaacaugauaacagaacuacuucaaaaagaauacauggacagacaagguaaaacaccacucggucuaguagacuuauucguauuuagcaccucguucuaccucauaucaauauuccuacaccuuauaaaaaucccaacacacagacauauaacaggaaaaccuugcccaaaaccacacagauuaaaccauauggguaucugcucauguggacuauacaaacacccaggcguuccaguaaaauggaaacguuaaggacuagucccuguucccagagcccacuuuuuuuucuuuuuuugaaauaaaauagccugucuuucagaucuaaaaaaaaaaaaaaaaaaaaaaaaaaaaaaaaaaaaaaaaaaaaaaaaaaaaaaaaaaaaaaaaugcaucccccccccccccccccccccccccccccccaaaggcucuuuucagagccaccagaauu

SEQ ID NO: 2754 - RNA, 1768 nt, Artificial Sequence
  mRNA product Design a-2 comprising derived and/or modified sequence from LASV(LASV253-NIG-2011;Clade II)__AIT17670__GPC (opt6)
gggagaguccgcucagccagguugcagaagcggcuuagcguguguccuaaucuucucucugcguguagguaggccugugccgcaaacaagcuuaccaugggacaaauaauaacuuucuuucaagaaguaccccauguaauagaagaaguaaugaacauaguacuaaucgcccuauccuuacuagcaauacuaaaaggaauauacaacguagcaacaugcggauuauucggccuuguaucauuucuacucuuaugcggcagauccuguucaacaacauacaaaggaguauacgaacuacaaacacuagaacuagacauggcaucacuaaauaugacaaugccauuaagcugcacaaaaaacaacucucaccacuacauaaugguaggaaaugaaacaggacucgaacucacacuaacaaauaccucuaucauaaaccacaaauucugcaaucuaucagaugcccacaaaaaaaaccuauaugaucaugcauuaauguccauaauaucaacauuccaucuaucaauucccaacuuuaaccaauacgaagcaaugucaugcgacuuuaacggcggaaaaauaucuguacaauauaaucuaucccacacuuaugcagucgaugccgcaaaucacugcgguaccauagcaaauggaguacuccaaacauucaugcgcauggcuuggggcggaucauacaucgcacuagauuccggaaaaggaucaugggacugcauaaugacaucuuaccaauaucuuaucauacaaaauacuaccugggaagaucacugccaauuuucaagaccgucaccaauaggauaucucggauuacuaucacaacgaaccagagacauauauauaucaagaagacuacuaggaaccuucacauggacauuaagcgauucugaaggaaaugaaacuccagguggauauugccuaacaagauggauguuaauagaagccgaauuaaaaugcuucggaaauacagcaguugcaaaauguaacgaaaaacaugacgaagaauucugugacaugcuaagauuauucgacuucaacaaacaagcaauaagaagacuaaaagcagaagcacaaaugucaauacaacuaauaaauaaagcaguaaaugcucuaauaaaugaccaauuaauaaugaaaaaccaccuuagagacauaaugggaauacccuacuguaacuacucaaaauacugguaccuaaaccacacagucacaggacgcacgucacuaccccgaugcuggcuaguaucaaacggcucuuaccuaaacgaaacacacuucagcgacgacauagaacaacaagcagacaacaugaucaccgaauuauuacaaaaagaauacauagacagacaaggaaaaacaccacuaggccuaguagaccucuuugucuucucaacaucauuuuaccuaauaucaauauuccuacauuuaguuaaaauacccacccauagacacaucauaggaaaacccugccccaaaccacaccgacuaaaccacaugggaauaugcucaugugguuuauacaaacaucccggaguaccaguaaaauggaaaagauaaggacuagucccuguucccagagcccacuuuuuuuucuuuuuuugaaauaaaauagccugucuuucagaucuaaaaaaaaaaaaaaaaaaaaaaaaaaaaaaaaaaaaaaaaaaaaaaaaaaaaaaaaaaaaaaaaugcaucccccccccccccccccccccccccccccccaaaggcucuuuucagagccaccagaauu

SEQ ID NO: 2755 - RNA, 1768 nt, Artificial Sequence
  mRNA product Design a-2 comprising derived and/or modified sequence from LASV(LASV254-NIG-2011;Clade II)__AIT17674__GPC (opt6)
gggagaguccgcucagccagguugcagaagcggcuuagcguguguccuaaucuucucucugcguguagguaggccugugccgcaaacaagcuuaccaugggacaaauaaucacauucuuucaagaaguaccacauguaauagaagaaguaaugaacauaguucuuauagcacucucauuacuagcaauauuaaaaggaauauacaacguagcuacaugcggccucuuuggacuaguaucauuccuccuccuaugcggaagaucuugcucaacaacauacaaagguguauacgaacuacaaacauuagaauuagacaugacaaaucuuaacaugacaaugccacuauccuguaccaaaaauaacucccaccacuauauuaugguaggaaaugaaacaggacuagaacucacacuaacaaacacaucaauaauaaaccacaaauuuugcaaccuaucugaugcccacaaaaaaaacuuauacaaccacgcacuaaugucaauaauaucaacauuccacuuaucaauaccaaauuuuaaccaauaugaagcaauguccugcgacuucaacggaggaaaaaucucaguacaauauaaccuaucccacucauacgcaguagacgcagcaaaucauugcggaacaauagcaaacggaguccuacaaacauuuaugcgcauggcauggggaggaucuuacaucgcauuagacuccggaaaaggaaauugggacuguauuaugacaucuuaccaauaucuaaucauacaaaacacaacaugggaagaccacugccaauuuaguagacccucacccauaggauaccuaggauuacucucucaaagaacaagagauauauacauaucccgccgcuuacucggaaccuucacuuggacacucucagacucagaaggaaacgaaacaccaggaggauacugccuuacaagauggaugcuaauagaagcagaauuaaaauguuucggaaacacagcaguagcuaaaugcaaugaaaaacacgacgaagaauucugugacaugcuaagacuauucgacuucaacaaacaagcaauacgaagacuaaaaaccgaagcacaagcaaauauacaacucaucaacaaagcaguaaacgcacuuauaaaugaccaauuaauaaugaaaaaccaccucagagacaucaugggaauaccuuauugcaacuauucaaaauauugguaccuuaaccacacagucacagguaaaacaucccuaccaagauguuggcucgucucaaauggauccuaccuaaacgaaacccacuucucugacgauauagaacaacaagcagacaauaugauaacugaacuccuacaaaaagaauacauggacagacaaggaaaaacaccacuaggacucguagaccuauucguauuuucaacaucuuucuacuuaauauccauauuccuacaccuaguaaaaauaccaacccacagacacgucauaggaaaaccaugcccuaaaccacaucguuuaaaucacaugggaauauguucauguggauuauauaaacauccagguguaccaguaaaauggaaaagauaaggacuagucccuguucccagagcccacuuuuuuuucuuuuuuugaaauaaaauagccugucuuucagaucuaaaaaaaaaaaaaaaaaaaaaaaaaaaaaaaaaaaaaaaaaaaaaaaaaaaaaaaaaaaaaaaaugcaucccccccccccccccccccccccccccccccaaaggcucuuuucagagccaccagaauu

SEQ ID NO: 2756 - RNA, 1768 nt, Artificial Sequence
  mRNA product Design a-2 comprising derived and/or modified sequence from LASV(Nig08-A19;Clade III)__ADU56618__GPC (opt6)
gggagaguccgcucagccagguugcagaagcggcuuagcguguguccuaaucuucucucugcguguagguaggccugugccgcaaacaagcuuaccaugggacaaaucguaacauucuuucaagaaguaccacacguaauagaagaagucaugaacauaguuuuaauagcccucucaauacuagcaauauuaaaaggcuuauacaacauagccaccugcggacuaauaggacuagucacauuccuccuacuaagcggcagaucuugcucaaugacauauaaaggaguauacgaauuacaaacccuagaacuaaauaugaauacauuaaacaugacaaugccacuaucaugcacaaaaaauaacucucaccauuacauaaugguuggaaacgaaacaggacuagaauuaacacuaacaaacaccagccuuuuacaccacaaauucugcaaccuauccgacgcacacaaaaaaaacuuauaugaccauacccuaaugucaauaaucuccacauuucaucuaucaauaccaaauuucaaccaauacgaagcaaugucaugcgacuucaacggaggaaaaauaacaguacaauacaaucuuucucacucauaugcaaucgaugcagcuaaccauugcggaacaguagcaaacggaguacuacaaacauucaugcgaauggcauggggagguucauacauugcucucgauucaggaagaggcaaaugggacuguaucaugacuucauaccaauaccuaaucauccaaaacacaacaugggaagaccacugccaauucucacgcccaucaccaauaggcuaccucggcuuacuaucccaaagaaccagagauauauacauaucaagaagacuacuaggaacauucacauggacucuuuccgacuccgaaggaaacgaaacaccaggaggcuacugccuaacacgauggauguuaauagaagcagaauuaaaaugcuucggcaacacugccgucgcuaaaugcaacgaaaaacaugaugaagaauuuugcgacaugcucagacuauucgacuucaauaaacaagcaaucagaagacuaaaagcagaagcucaaaugucaauccaacuaauaaacaaagcaguaaacgcucuaauaaaugaucaacuaauaaugaaaaaccaccuaagagacauaaugggaaucccauacuguaauuacucaaaauacugguaccuaaaucacacauccacuggaagaacaucacugccaagaugcugguuaguauccaacggaucauaucuaaaugaaacacacuucucagaugacauagaacaacaagcagacaauaugauaacagaaauguuacaaaaagaauaccuagauagacaaggaaaaacaccccuagguuuaguugacuuauucgucuucagcacaucuuucuaccuaauauccauauuccuccaucuaguaaaaauaccaacacacagacacauaguaggaaaaccaugcccaaaaccccaucgccuaaaccauaugggcauaugcucaugcggacuauacaaacaaccaggagucccagucagauggaaaagauaaggacuagucccuguucccagagcccacuuuuuuuucuuuuuuugaaauaaaauagccugucuuucagaucuaaaaaaaaaaaaaaaaaaaaaaaaaaaaaaaaaaaaaaaaaaaaaaaaaaaaaaaaaaaaaaaaugcaucccccccccccccccccccccccccccccccaaaggcucuuuucagagccaccagaauu

SEQ ID NO: 2757 - RNA, 1771 nt, Artificial Sequence
  mRNA product Design a-2 comprising derived and/or modified sequence from LASV(G1180-SLE-2010;Clade IV)__AIT17168__GPC (opt6)
gggagaguccgcucagccagguugcagaagcggcuuagcguguguccuaaucuucucucugcguguagguaggccugugccgcaaacaagcuuaccaugggacaaauaguaacauucuuccaagaaguaccacauguaauugaagaaguaaugaauauaguacuaaucgcucuaucuauccucgcaguacuaaaaggauuauauaacuucgcaacuuguggacuagucggcuuacuaacuuuccuccuauuaugcggacgaucuugcacagcaucaagauauaaaggaguuuacgaacuacaaacccuugaauuaaacauggaaacacuaaauaugacaaugcccuuaagcuguacaaaaaacaauucucaucauuacauaaugguaggaaacgaaacaggauuagaauuaacauuaacaaauacauccauaauaaaccauaaauucugcaauuuaucagacgcacacaaaaaaaaccucuacgaccaugcacuuaugucaauuauaucaacauuccacuuaucaauacccaacuucaaucaauacgaagcaaugucuugcgacuucaauggaggaaaaauaucaguacaauacaauuuaucccauucauaugcaggagacgcagcaaaccauugcggaacaguugccaacggaguccuacaaacauuuaugcgaauggcauggggaggaucauauaucgcacuagacaguggacacggaucaugggacugcauaaugacaagcuaccaauaucuaaucauacaaaauacuacaugggaagaccacugccaauucagccgaccaagcccaauaggauaucuaggccuacucucacaacgcacaagagauauauacauaucaagaagauuacuaggaacauuuacauggacauugucagacucugaaggaaaagacacaccaggagguuauugccuuacaagauggauguuaauagaagcagaauuaaaaugcuuuggaaacacggcuguagcuaaaugcaacgaaaaacacgaugaagaauucugcgauauguuaagacuauuugauuuuaacaaacaagcaauccaaagacuaaaagcagaagcacaaaugucaauacaacuaaucaacaaagcagucaaugcauuaauaaaugaccaacuuauaaugaaaaaucacuuaagagacauaaugggcauaccauacuguaauuacucaaaauauugguaccuaaaucacacaaccacaggaaaaacuagccuaccaaaaugcugguuaguaucaaauggaucuuacuuaaaugaaacacacuucucugacgauauagaacaacaagcugacaacaugauaacagaaaugcuccaaaaagaauacauggaaagacaaggaaaaacaccacuuggauuaguagaccuauucguauucagcaccuccuuuuauuuaauaucaauauuccuacaccucguaaaaauaccaacacauagacauaucgucggaaaaagcugcccaaaaccacaccgacuaaaucacaugggaauaugcucguguggccuauauaaacaaccaggagucccaguaaaauggaaaagauaaggacuagucccuguucccagagcccacuuuuuuuucuuuuuuugaaauaaaauagccugucuuucagaucuaaaaaaaaaaaaaaaaaaaaaaaaaaaaaaaaaaaaaaaaaaaaaaaaaaaaaaaaaaaaaaaaugcaucccccccccccccccccccccccccccccccaaaggcucuuuucagagccaccagaauu

SEQ ID NO: 2758 - RNA, 1771 nt, Artificial Sequence
  mRNA product Design a-2 comprising derived and/or modified sequence from LASV(G1442-SLE-2011;Clade IV)__AIT17180__GPC (opt6)
gggagaguccgcucagccagguugcagaagcggcuuagcguguguccuaaucuucucucugcguguagguaggccugugccgcaaacaagcuuaccaugggacaaauagucacuuuuuuccaagaaguaccacauguaauagaagaaguuaugaacauaguauuaauagcauuaucuauauuagccguacucaaaggucuauacaaugucgcaacauguggacuaauagguuuagucacauucuuacuccuaugcggaagaucauguacaacaacacuauacaaaggcguauacgaacuucaaacuuuagaacuaaacauggaaacauuaaacaugaccaugccucuauccugcacaaaaaacaacucacaccauuacauuagaguaggaaacgaaacaggacuagaacuaaccuuaacgaauacaucaauaauuaaccacaaauucugcaaccuaucagacgcccacaaaaaaaaccuauaugaccacgcauuaaugucuauaaucucaacauuccaccuaucaauuccaaacuucaaccaauacgaagcaaugucaugcgauuucaauggaggaaaaauaucaguacaauauaaccuuucacacucauacgcaggagacgcagcuaaccacugcgguacagucgcaaauggaguauuacaaacauucaugcguauggcaugggguggcucauauauagcacuugauucaggaagaggaaauugggauugcauuaugacuuccuaucaauaucuaauaauacaaaauacaacaugggaugaccacugucaauucucaagaccuucaccaauaggcuaccuaggacuauuaucacaaagaacccgagauguauacauaucacgacgacuuuuaggaacauucacauggacauuaucagacucagaaggcaaagacacaccaggagguuacugucuaaccagauggauguuaaucgaagcagaacuaaaaugcuuuggaaacacugcaguagcaaaauguaacgaaaaacacgaugaagaauucugugauauguuaagacuauucgauuucaacaaacaagcaauacaacgacucaaagcagaagcacaaauguccauucaacuaauuaacaaagcaguaaacgcucuaauaaacgaccaacucaucaugaaaaaccacuuaagagauauaaugggaauccccuacugcaauuacucaaaauacugguaccuaaauaacacugcaacuggcaaaaccucauuaccaaaaugcuggcucauaucuaauggcucauauuuaaacgaaacccauuucucagacgacauagaacaagaagccgauaacaugauaacagaaauguuacaaaaagaauacauggaaagacaaggaaaaaccccacuaggauuaguagacuuauucguauuuuccacuucauucuaucuaauaucaauauuccuacaccuagucaaaauaccuacacaccgacacauaguaggaaaauccuguccaaaaccccaucgacuaaaccacauggguauaugcuccugcggacuauacaaacaaccaggagucccaguaagauggaaaagauaaggacuagucccuguucccagagcccacuuuuuuuucuuuuuuugaaauaaaauagccugucuuucagaucuaaaaaaaaaaaaaaaaaaaaaaaaaaaaaaaaaaaaaaaaaaaaaaaaaaaaaaaaaaaaaaaaugcaucccccccccccccccccccccccccccccccaaaggcucuuuucagagccaccagaauu

SEQ ID NO: 2759 - RNA, 1771 nt, Artificial Sequence
  mRNA product Design a-2 comprising derived and/or modified sequence from LASV(G3010-SLE-2013;Clade IV)__AIT17344__GPC (opt6)
gggagaguccgcucagccagguugcagaagcggcuuagcguguguccuaaucuucucucugcguguagguaggccugugccgcaaacaagcuuaccaugggacaaauaguaacauuuuuccaagaaguaccccacguaauagaagaagucaugaauaucguguuaauugcacuaucaauccucgcaguucuaaaaggccuauacaauuucgccacauguggccuaguuggauuaguaaccuuccuauuacuauguggccgaucuuguacuaccuccuuauauaaaggagucuaugaacuacaaacacuagaacuaaauauggaaacacugaauaugacaaugccacucucauguacaaaaaacaacucacaccacuauauaaugguaggaaacgaaacaggcuuagaacuaacacuaacaaauacaagcauaauaaaccacaaauucugcaaccuuagcgaugcacauaaaaaaaacuuauacaaccacgcccuaaugucuauaauauccacauuccacuuauccauaccuaacuucaaucaauacgaagccaugucaugugacuucaauggaggaaaaaucuccguacaauacaaccuaucucauaguuacgcaggagacgcagccucucauugcggaacuguagcaaauggaguauuacaaacauucaugcgaauggcauggggaggaucauauauagcauuagauucuggauacggaaaaugggauugcaucaugacaucauaccaauacuuaauaauacaaaacaccaccugggaagaccacugucaauucucccgacccaguccaauaggauaccucgguuuauuaucacaacgaacaagagacauauacauaucaagaagauugcuaggaacauuuacauggacacuaagugauucagaaggaaaagacaccccaggaggauacugccuaacaagauggaugcuaauagaagcagaacuaaaaugcuucggaaauacagcagucgccaaaugcaacgaaaaacacgacgaagaauuuugcgacaugcuuagauuauucgacuuuaacaaacaagcuauacaaagauuaaaaaccgaagcacaaaugucaauacaauuaauaaauaaagcaguaaacgcccuaauaaacgaucaacuuauaaugaaaaaccaucuuagagacauaaugggaaucccuuacugcaacuauucaaaauauugguacuuaaaccacaccacaacaggaaaaacaucacuccccaaaugcuggcuaguauccaauggcucauaucucaacgaaacacacuucucagaugauaucgaacaacaagccgacaacaugaucacagaaaugcuucaaaaagaauacauggaacgacaaggaaaaacaccacuaggccucguggaccuauucguauucuccacaucauucuaucuaauuucuauauuccuacaucucguuaaaauaccaacacaccgacauauaguaggcaaaucauguccaaaaccacacagacuaaaccauaugggaaucuguuccuguggacucuauaaacaaccaggaguaccaguaagauggaaaagauaaggacuagucccuguucccagagcccacuuuuuuuucuuuuuuugaaauaaaauagccugucuuucagaucuaaaaaaaaaaaaaaaaaaaaaaaaaaaaaaaaaaaaaaaaaaaaaaaaaaaaaaaaaaaaaaaaugcaucccccccccccccccccccccccccccccccaaaggcucuuuucagagccaccagaauu

SEQ ID NO: 2760 - RNA, 1771 nt, Artificial Sequence
  mRNA product Design a-2 comprising derived and/or modified sequence from LASV(G502-SLE-2009;Clade IV)__AIT17126__GPC (opt6)
gggagaguccgcucagccagguugcagaagcggcuuagcguguguccuaaucuucucucugcguguagguaggccugugccgcaaacaagcuuaccaugggacaaauaguaacauuuuuccaagaaguaccacacgucauagaagaaguaaugaauauaguauuaauagcccuuagcauccucgcaguacuaaaaggucuauacaacuucgcaacaugcggccuagucggacuacuaacauuccuauuauuauguggucgcucaugcacuacaggacucuauaaaggaguauacgaauuacaaacauuagaauuaaauauggaaacauuaaacaugacaaugccacuauccuguaccaaaaacaacucacaccauuauauaaugguaggcaacgaaacaggacucgaacuaacucuuacaaauacaucuauaauaaaccacaaauucugcaacuuaucugacgcacacaagaaaaaccuauacgaccacgcuuuaaugucaauaaucucaacauuccaucuaucaauaccaaacuucaaccaauaugaagcaaugucaugugauuucaacggaggaaaaauaucaguacaauacaaccuaucacacucauacgcaggagacgcagccgaccacugcggaacaguagcuaaugguguacuacaaacauucaugagaauggcauggggcggauccuacaucgcacuugauuccggaagaggaagaugggacugcaucaugacuucauaucaauacuuaauaauacaaaacaccacaugggaagaccauugccaauucucaagaccaucacccauaggauaccuaggcuuauuaucccaaagaacaagagacauauacauaucuagaagacuacucggaacauucacuuggacacucucugauucagaaggaaaagacacucccggaggauacugccuaacacgauggauguuaauagaagccgaauuaaaaugcuucggaaauacagcaguugcuaaaugcaacgaaaaacaugacgaagaauuuugcgauauguuaagauuauucgacuucaacaaacaagcaauccaaagacuaaaagcagaagcacaaaugucaauacaacuaauuaauaaagcaguaaacgcucuuauuaacgaucaacuuguaaugaaaaaccaucuaagagacauaauggguauuccauauuguaacuacucccguuacugguacuuaaaccacaccacaacaggaagaacaucauuaccuaaauguuggcuaguaucaaacggaucauaccuaaacgaaacacauuucuccgaugacauugaacaacaagcagacaacaugauaacagaaaugcuacaaaaagaauacauggaaagacaaggaaaaacaccacuaggccucguagaccucuucgucuucuccacuucauucuauuuaauaucaauauucuuacaccuaguaaaaauaccaacucacagacauauagucggaaaaaguugcccaaaaccacaccgccuaaaccacaugggcauuuguucauguggacucuacaaacaaccaggcguaccaguuaaauggaaacgaugaggacuagucccuguucccagagcccacuuuuuuuucuuuuuuugaaauaaaauagccugucuuucagaucuaaaaaaaaaaaaaaaaaaaaaaaaaaaaaaaaaaaaaaaaaaaaaaaaaaaaaaaaaaaaaaaaugcaucccccccccccccccccccccccccccccccaaaggcucuuuucagagccaccagaauu

SEQ ID NO: 2761 - RNA, 1771 nt, Artificial Sequence
  mRNA product Design a-2 comprising derived and/or modified sequence from LASV(G733-SLE-2010;Clade IV)__AIT17154__GPC (opt6)
gggagaguccgcucagccagguugcagaagcggcuuagcguguguccuaaucuucucucugcguguagguaggccugugccgcaaacaagcuuaccaugggacaaaucguaaccuucuuccaagaagucccacacguaauagaagaaguaaugaauaucguacuaauagcauuaucaauacuugcaguacucaaaggacuauauaacuucgcuacaugcggaauaguaggacuaguaucauucuuauuauuaugcggacgaucaugcaccacaucauuauacaaaggagucuaugaauuacaaacacuagaauuaaacauggaaacccuaaacaugacaaugccacucucaugcacaaaaaauaacucacaucacuacauaaugguuggaaacgagacaggacuagagcuaacacuaacaaacacaucaauaauaaaccacaaauucuguaauuuaagcgacgcacacaaaaaaaaucuauacgaccacgcauuaauguccauaaucucaaccuuccacuuaucaauaccaaauuuuaaucaauacgaagcaaugucaugcgauuucaacggaggaaaaauaucaguucaauauaaccuuagucacuccuacgcaggagaugccgccaaccacugcggcacaauagcaaacgguguccuacaaacuuucaugagaauggcauggggaggaagcuacauagcauuagauagcgggagagaucgaugggacuguauaaugacuaguuaucaauauuuaauaauacaaaacaccacaugggaagaccacugccaauucucaagaccaagcccaaucgguuaccucggacucuuaucacaaagaacccgagacauauacauaucaagaagacuacuaggcacauucacauggacccuaucugacagcgaaggaaaagauacuccaggagguuacugccuuacuagauggaugcuaauagaagcagaauuaaaauguuucggaaacaccgcaguagcaaaauguaacgaaaaacaugacgaagaauucugcgacaugcuccgacuauuugauuucaacaaacaagcaauacaaagacuaaaagcagaagcacaaaugucaauacaauuaauaaauaaagcaguaaacgcccuaauaaacgaccagcuaauaaugaaaaaccacuuacgagauaucaugggaaucccauacuguaacuacucaaaauacugguacuuaaaccauacaacaacuggaaaaacaucacuaccaaaaugcugguuaguaaguaacggaucuuaccucaacgaaacacauuuuucagaugacauagaacaacaagccgauaauaugauaacagaaaugcuacaaaaagaauacauggaaagacaagguaaaacuccacuaggacuagucgaccuauucguauucaguacaucauuuuacuuaauaucaaucuuccuacaccuaguaaaaauaccuacccacagacacguaguaggaaaaucaugcccaaaaccacaucgacuaaaucacaugggaauaugcucauguggacuauacggccaaccaggaguaccaguaaaauggaaaagauaaggacuagucccuguucccagagcccacuuuuuuuucuuuuuuugaaauaaaauagccugucuuucagaucuaaaaaaaaaaaaaaaaaaaaaaaaaaaaaaaaaaaaaaaaaaaaaaaaaaaaaaaaaaaaaaaaugcaucccccccccccccccccccccccccccccccaaaggcucuuuucagagccaccagaauu

SEQ ID NO: 2762 - RNA, 1771 nt, Artificial Sequence
  mRNA product Design a-2 comprising derived and/or modified sequence from MOPV/LASV reassortant(IGS-1;Clade IV)__AFY05576__GPC (opt6)
gggagaguccgcucagccagguugcagaagcggcuuagcguguguccuaaucuucucucugcguguagguaggccugugccgcaaacaagcuuaccaugggacaaauaguaacauucuuccaagaagucccacacguaauagaagaaguaaugaauauaguacucauagcauuaucaguccuugcaguacuaaaaggccuauauaauuucgcuacauguggccuaguuggccuaguaacauuccuauuauuauguggacgauccugcacuacaucauuauacaaaggaguauacgaauuacaaacacucgaauuaaacauggaaacacucaacaugacaaugccacuauccugcacuaaaaacaacagccaccauuauaucaugguaggaaaugaaacaggacuagaauuaacacucacaaauacaucaauaauaaaccauaaauucuguaaucuaucugacgcacacaagaaaaacuuauacgaccacgcauuaaugucuauaauuucaacauuccaucuaucuauaccaaacuucaaucaauacgaagcaaugagcugugacuucaacggaggaaaaauaucaguacaauacaaccucucacacucauacgccggagaugcagcaaaccauuguggcacaguagcuaacggaguacuacaaacauuuaugcgcauggcuuggggaggaucauauauagcccucgauucaggucgaggcaacugggacugcauaaugacaucauaccaauaccuaauaauacaaaauacaacaugggaagaucauugccaauucucaagaccauccccuauaggcuacuuaggacuacucucucaacgaacaagggacauauacaucagcagaagauuauuaggaaccuuuacuuggacuuuaagcgacucagaaggcgaagauacacccggaggauacugucuaacaagauggaugcuaauagaagcagaauuaaaaugcuuugguaacacagcaguagccaaaugcaacgaaaaacacgaugaagaauuuugcgacauguuaagacuauucgauuucaacaaacaagcaauccaaagacucaaagcagaagcacaaauguccauacaacuaaucaauaaagcaguaaacgcacuaauuaacgaccaacuaauaaugaaaaaccacuuaagagacauaaugggaauaccuuauugcaacuacucuaaauacugguaccuaaaccacacaacaacaggccguacaucauuaccaaaaugcuggcuaguaucgaacggaucauacuuaaaugaaacacauuucucagaugauaucgaacaacaagcagacaauaugauaacagaaaugcuacaaaaagaauacauggaaagacaaggaaaaacaccacuaggucuaguagaccuauucguauucucaacuagcuucuaucucaucucaauauuccuacaccuaguaaaaauaccaacacauagacauauaguaggaaaaucaugcccaaaaccccacagacuaaaccacaugggaauaugcucauguggacucuacaaacaaccaggaguaccaguaaaauggaaacgcuaaggacuagucccuguucccagagcccacuuuuuuuucuuuuuuugaaauaaaauagccugucuuucagaucuaaaaaaaaaaaaaaaaaaaaaaaaaaaaaaaaaaaaaaaaaaaaaaaaaaaaaaaaaaaaaaaaugcaucccccccccccccccccccccccccccccccaaaggcucuuuucagagccaccagaauu

SEQ ID NO: 2763 - RNA, 1771 nt, Artificial Sequence
  mRNA product Design a-2 comprising derived and/or modified sequence from LASV(LM765-SLE-2012;Clade IV)__AIT17814__GPC (opt6)
gggagaguccgcucagccagguugcagaagcggcuuagcguguguccuaaucuucucucugcguguagguaggccugugccgcaaacaagcuuaccauggggcaaauugucacauucuuucaagaaguaccacacguuauagaagagguaaugaacauaguacuaauagcacuaucaauacuagccguauuaaaaggacuauacaacuucgccacaugcggacuaguaggccuaguaacauuccuacuacuguguggacgaagcugcacuaccucccuauacaaaggaguauaugaacuccaaacauuagaacuaaauauggaaacacuuaacaugacuaugccccuauccugcacaaaaaacaacucacaucauuacauuaugguuggaaaugaaacaggauuagaacuaaccuuaaccaacacuucaauaauagaccacaaauucugcaacuuaucagacgcacaucgaaaaaauuuauaugaccaugcacuaaugucaauuauaucaacauuucaccuaagcauaccaaacuucaaccaauaugaagcaaugucaugcgacuucaacggaggaaaaauaucaguacaauacaauuuaucacauagcuaugcaaaagacgcagcagaucauugcggaacaguagcaaacggaguacuacaaacauucaugcgaauggccuggggaggaucauacauagcacuagacuccggaagaggaagaugggauuguauaaugacuucauaccaauauuuaauaauacaaaauacuacuugggaagaucacugccaauucucuagaccaucacccauuggauacuuaggacuacuaucacaaagaacaagggacauauacauaucaagacgacuacucgguacauucacauggacauuaucagauagugaaggaaaagauacuccaggcggauauugcuuaaccagauggaugcuaauugaagcagaacuaaaauguuuuggaaacacagcuguagcaaaaugcaacgaaaaacaugaugaagaauucugugauaugcuaagauuauucgauuuuaauaaacaagcaauucaaagacuaaaagcagaagcacaaaugucaauucaacuaauaaacaaagcaguaaaugcauuaauaaacgaucaacuaauaaugaaaaaucaccuaagagacauaaugggaauaccauacugcaacuacucuaaauacugguaccuaaaucacacaacaacaggcaaaacaucacuaccaaaaugcugguuaguaucaaacggaucauaccuaaacgaaacacacuucagcgaugacauagaacaacaagcagauaauaugauaacugaaauguuacaaaaagaauacauggaaagacaaggaaaaacaccauuaggcuuagucgacuuauucguauucucaacaucauuuuacuuaaucuccauauuccuacaccuaguaaaaauacccacacauagacacauagucggaaaaccaugcccaaaaccacacagacuaaaccacaugggaauauguucauguggacuauauaaacaaccaggaguaccaguaaaauggaaacgauaaggacuagucccuguucccagagcccacuuuuuuuucuuuuuuugaaauaaaauagccugucuuucagaucuaaaaaaaaaaaaaaaaaaaaaaaaaaaaaaaaaaaaaaaaaaaaaaaaaaaaaaaaaaaaaaaaugcaucccccccccccccccccccccccccccccccaaaggcucuuuucagagccaccagaauu

SEQ ID NO: 2764 - RNA, 1771 nt, Artificial Sequence
  mRNA product Design a-2 comprising derived and/or modified sequence from LASV(LM776-SLE-2012;Clade IV)__AIT17824__GPC (opt6)
gggagaguccgcucagccagguugcagaagcggcuuagcguguguccuaaucuucucucugcguguagguaggccugugccgcaaacaagcuuaccaugggacaaaucguaacauuuuuccaagaagucccccacguaauagaagaaguaaugaacauuguacuuaucgcauuaucaauacucgcaguccuaaaaggacuauacaacuuugcaacaugcggacuaguaggcuuagucacauuccuauuacuaugcggaagaucaugcacaacaagcguauacaaaggaguauaugaacuccaaacacuagaacucaauauggaaacucuaaacaugacaaugccauuaucaugcacaaaaaacaacucacaccauuacauaaugguaggaaacgaaacaggacuagaauuaacacuaacaaacacuucaauaaucaaccacaaauucugcaaccuuucagacgcacauaaaaaaaaccuauacgaccacgcacuaaugucuauaauaucaaccuuccaucuaucaauaccgaacuuuaaccaauacgaggcaaugucaugugauuucaauggcggaaaaauaucaguacaauacaaccuaucacacucauacgccggugaugcagccaaccacugcggaacaguugccaaugguguacuacaaacauucaugagaauggcauggggcggaucauacauagcccuagacucagggcacggaaaaugggacuguauaaugacaucuuaccaauaccucauaauacaaaauacaacaugggaagaccacugccaauuuucacgaccaucaccaauaggauaucuaggacuauuaucacaaagaacuagagacauauauauaucaagaagauuauuaggaacauuuacuuggacacuaucagacucagaaggaaaagacacaccagguggauauugcuuaaccagauggauguuaauagaagcagaacuaaaaugcuuuggaaacacagcaguugcgaaauguaaugaaaaacacgacgaagaauucugcgauaugcuaagauuauucgacuuuaacaaacaagcaauacaaagacuaaaagcugaagcacaaaugagcauacaacugauaaacaaagcaguaaacgcccucauuaacgaccaauuaauaaugaaaaaccacuuaagagacauaaugggaauaccauacugcaacuacucaaaauacugguauuuaaaccacacaacaaccggaaaaacaucccuaccaaaaugcuggcuaguauccaauggaucauaccuaaaugaaacacacuuuucagacgacauugaacaacaagcagacaauaugauaacagaaauguuacaaaaagaauacauggaacgacaaggcaaaacuccccuaggacucguagaccuuuucgucuucucaaccaguuucuaucuaauaucaauauuccuccaccuagucaaaauacccacacauagacacauaguugguaaaucaugccccaaaccccauagacucaaccacaugggaauaugcucuugcggacuauacaaacaaccaggagucccaguacgauggaaaagauaaggacuagucccuguucccagagcccacuuuuuuuucuuuuuuugaaauaaaauagccugucuuucagaucuaaaaaaaaaaaaaaaaaaaaaaaaaaaaaaaaaaaaaaaaaaaaaaaaaaaaaaaaaaaaaaaaugcaucccccccccccccccccccccccccccccccaaaggcucuuuucagagccaccagaauu

SEQ ID NO: 2765 - RNA, 1771 nt, Artificial Sequence
  mRNA product Design a-2 comprising derived and/or modified sequence from LASV(Mad39;Clade IV)__ANH09722__GPC (opt6)
gggagaguccgcucagccagguugcagaagcggcuuagcguguguccuaaucuucucucugcguguagguaggccugugccgcaaacaagcuuaccaugggacaaaucguaacauucuuccaagaaguaccacacguaauagaagaaguaaugaacauaguacuuauagcucuaucuauauuagcaguucuaaaaggauuauacaauguagccacaugcggacugaucggacuaguaacauuccuacuccuauguggaagaucauguaccacaacucuauauaaaggcguauaugaacuacaagcauuagaacuuaacauggaaacucuaaacaugacaaugccccuaucaugcacaaaaaauaacucccaccacuacauaagaguaggaaaugaaacuggacucgaacuaacacuaacaaacacauccuuaaucaaccacaaauucuguaaccuaagcgacgcacauaaaaaaaaucuauacgaccacgcauuaauguccauaaucucaaccuuccacuuauccauccccaauuuuaaccaauacgaagcaaugucaugcgauuucaaugacgguaaaauauccguccaauauaauuuaucccauacauacgccggagauaccgcaaaccacugcggaacuguugcaaacggagucuuacaaacauucaugagaauggccuggggaggaucauacauagcacuagacuccggaagaggaggaugggacugcaucaugacuucauaucaauaccuaauuauacaaaacacuacaugggaagaccacugucaauuuucaagaccaucaccaauaggauaccuaggucuacuuucacaaagaaccagagacaucuauaucuccagaagacuccucgguacauucacauggacacuuucagacucagaaggaaaagacacacccggaggauauugucuaacaagauggaugcucauagaagccgaacucaaaugcuucggaaauacagcaguagcuaaaugcaacgaaaaacaugaugaagaauuuugcgauaugcuuagauuauucgauuucaauaaacaagccauacaaagacuaaaagcagaagcccaaaugucaauacaacuaauaaacaaagccguaaacgcacuaauaaacgaucaauuaauaaugaaaaaccaccuaagagacauaaugggaauaccauacugcaauuauucaaaauauugguaccuaaaucacacaguaacaggaaaaaccucauuaccuaaaugcuggcuagucucuaacggaucauacuuaaacgaaacccacuucucagaugacauagaacaacaagccgacaacaugaucacggaaaugcuucaaaaagaauacauggagagacaaggcaaaacaccacuaggacuaguugaccuauucguuuuuucaaccuccuucuacuuaauaucaaucuuccuacaccuagucaaaauacccacacauagacauguaguaggaaaaccauguccaaaaccacaucgauuaaaucacaugggaauuugcucaugcggcuuuuacaaacaacccggagucccaguacgauggaaacgauaaggacuagucccuguucccagagcccacuuuuuuuucuuuuuuugaaauaaaauagccugucuuucagaucuaaaaaaaaaaaaaaaaaaaaaaaaaaaaaaaaaaaaaaaaaaaaaaaaaaaaaaaaaaaaaaaaugcaucccccccccccccccccccccccccccccccaaaggcucuuuucagagccaccagaauu

SEQ ID NO: 2766 - RNA, 1771 nt, Artificial Sequence
  mRNA product Design a-2 comprising derived and/or modified sequence from LASV(Z0947-SLE-2011;Clade IV)__AIT17840__GPC (opt6)
gggagaguccgcucagccagguugcagaagcggcuuagcguguguccuaaucuucucucugcguguagguaggccugugccgcaaacaagcuuaccaugggacaaauagucaccuucuuccaagaagucccacauguaauagaagaaguaaugaauauaguccuuauagcacuaucaauccuugccguacuaaaaggacuauacaacuucgccacaugcggucuagucggccuaguaacauucuuacuauuaugcggacgaucuuguacuaucagccucuacaaaggaguuuacgaauuacaaacacuagaacuaaauauggaaacauuaaacaugacuaugccccugucauguaccaaaaauaacucacaucacuauauuaugguuggcaaugaaacaggacucgaacucacacuaacaaacacaucaauaaucaaccauaaauucuguaacuuauccgaugcacacaagaaaaaccuauaugaccaugcacuaauguccauaauaucaacauuucaccuaucaauucccaauuucaaccaauacgaagcaaugucaugcgacuuuaauggagguaaaauaucaguacaauauaaccuaucacacucuuaugcaggagaugcagcaaaccauugcggaacaguagcaaacggaguauuacaaacauucaugcguauggccuggggaggaucuuauauagcauuagacucaggaagagauagaugggauuguauaaugacaucauaccaauacuuaauaauacaaaauacaaccugggaagaccacugccaauucucaagacccuccccaauaggauaucucggauuacuuucacaacgcacaagagauauauacauaucaagaagauuacuaggaacuuucacauggacccuauccgauucugaaggaaaagauacaccagguggauacugccuaacccgauggaugcuaauagaagcagaacuaaaauguuucggaaacacagcuguagcaaaaugcaacgaaaaacacgacgaagaguucugcgacaugcuaagauuauucgauuucaacaaacaagcaauccaaagauuaaaagcagaagcacaaauguccauccaacuaauuaacaaagcagucaacgcauuaauaaacgaccaacuaauaaugaaaaaccaccuucgagacaucauggguauuccauacugcaauuacucaaaauacugguacuuaaaucacacuaccacaggaaaaacaucauuacccaaaugcuggcuaguaucuaacggauccuaucuaaaugaaacacacuucucagacgacauagaacaacaagcugauaacaugauaacagaaauguuacaaaaagaauacauggaacgccaaggcaaaacaccacucggauuaguagaucuauucguauucucaacaucauucuaucuaauaucaauauuucuccaccuaguuaaaauccccacacauagacauauaguaggaaaacccugcccaaaaccacaccgacuaaaccacauggguaucugcucaugcggauuauacaaacaaccuggaguaccuguaaaauggaaaagauaaggacuagucccuguucccagagcccacuuuuuuuucuuuuuuugaaauaaaauagccugucuuucagaucuaaaaaaaaaaaaaaaaaaaaaaaaaaaaaaaaaaaaaaaaaaaaaaaaaaaaaaaaaaaaaaaaugcaucccccccccccccccccccccccccccccccaaaggcucuuuucagagccaccagaauu

SEQ ID NO: 2767 - RNA, 1771 nt, Artificial Sequence
  mRNA product Design a-2 comprising derived and/or modified sequence from LASV(Josiah;Clade IV)__NP_694870__GPC (opt11)
gggagaguccgcucagccagguugcagaagcggcuuagcguguguccuaaucuucucucugcguguagguaggccugugccgcaaacaagcuuaccaugggccaaauagucaccuucuuccaagaagucccccacguaaucgaagaaguaaugaacaucguccucaucgcacucucaguccucgccguccucaaaggccucuacaacuuugccacaugcggccuagucggacucgucaccuuccuccuccuuugcggccgcuccugcacuaccagccuuuacaaaggcgucuacgaacuccaaacccuugaacucaacauggagacccucaacaugaccaugcccuuauccugcaccaaaaacaacucacaccacuacauaauggucggcaacgaaaccggcuuagaacuaacccucaccaacaccuccauaaucaaccacaaauucugcaaccucagcgacgcccacaagaaaaaccuauacgaccacgcccucaugucaaucauauccaccuuccaccucucuauacccaacuucaaccaauacgaagcaauguccugcgacuucaacggcgguaaaauauccguucaauacaaccugucucacuccuacgccggcgacgccgccaaccacuguggcaccgucgcuaacggcguacuacaaacauucaugcgaauggccuggggcggcagcuacaucgcccucgacucagggagaggaaacugggacugcaucaugaccucuuaccaauaccucaucauacaaaacaccaccugggaagaccacugccaauucagccgaccaucccccaucggcuaccuaggccuacuaucacaacguacccgcgacaucuauauaagccgccgccuacucggcaccuucaccuggacacucuccgacuccgaagguaaagacacccccggaggcuacugccuaacccgcuggaugcuaaucgaagccgaacuuaaaugcuucggcaacaccgcggucgccaaaugcaacgaaaagcacgacgaagaguucugcgacaugcucaggcucuuugacuucaacaaacaagccauccaacgccucaaagcagaagcccaaauguccauccaacucauaaacaaagccgucaaugcccucauuaacgaccaacucauuaugaaaaaccaccuacgagacaucauggguauccccuacugcaacuacagcaaauacugguaccucaaccauacaacuaccggccgcacuagccugcccaagugcuggcucguauccaauggcuccuaccucaacgaaacccacuucuccgacgacauugaacaacaagccgacaacaugaucaccgaaaugcuucaaaaggaauacauggaacggcaaggaaaaacuccccucggccucgucgaccucuucgucuucagcacauccuucuaccucauauccaucuuccuccaccuagucaaaauccccacacacagacacauagucggaaaauccugccccaaaccccacagacucaaccacaugggcaucuguuccugcggucucuacaaacaaccuggcguacccgucaaauggaagcgcuaaggacuagucccuguucccagagcccacuuuuuuuucuuuuuuugaaauaaaauagccugucuuucagaucuaaaaaaaaaaaaaaaaaaaaaaaaaaaaaaaaaaaaaaaaaaaaaaaaaaaaaaaaaaaaaaaaugcaucccccccccccccccccccccccccccccccaaaggcucuuuucagagccaccagaauu

SEQ ID NO: 2768 - RNA, 1768 nt, Artificial Sequence
  mRNA product Design a-2 comprising derived and/or modified sequence from LASV(LP;Clade I)__AAF86701__GPC (opt11)
gggagaguccgcucagccagguugcagaagcggcuuagcguguguccuaaucuucucucugcguguagguaggccugugccgcaaacaagcuuaccaugggccaaaucaucaccuucuuccaagaagucccacacgucauagaagaagugaugaacaucguccucauagcccuaucacuccuugccauccucaaaggccucuacaacaucgcaaccugcggcaucaucggccucgucgccuuccucuuucucugcggcaagagcuguucccuaacccuuaaaggagguuacgaacuccaaacacuagagcuaaacauggaaacacuuaacaugaccaugccccuaagcugcaccaaaaacuccucacaccacuacauccgcgucggaaacgaaaccggccucgaacucacucucaccaacacguccaucaucaaccacaaauucugcaaccuaucugacgcccauaagaaaaauuuauacgaccacgcccuaaugagcaucaucucgaccuuccaccuuuccauccccaacuucaaccaauacgaagccauguccugcgacuucaauggcggaaaaauauccguccaauacaaccucucacacagcuacgccggggacgccgccgaacacugcggcaccgucgccaacggcguccuacaaaccuucaugcgcauggccuggggaggccgcuauauagcccucgauuccgguaaaggcaacugggacugcauaaugaccuccuaccaauaccuuaucauacaaaacaccacaugggaagaccacugccaauucucccgcccgagccccauuggauaccucggccuacucucucaacgcacuagagacaucuacaucucccgccgucuccucggcaccuucaccuggacccucuccgacucagaaggcaacgaaacacccggaggcuacugccuuacccgauggaugcucaucgaagcagaacuaaaaugcuucggcaacacugccgucgccaaauguaacgaaaaacacgacgaagaguucugcgacaugcuccgccucuucgacuucaacaaacaagccauccgucgccucaaagcugaagcacaaauguccauacagcucaucaacaaagccgucaacgcacuaaucaacgaccaacucaucaugaaaaaccaccuccgagacaucaugggcauaccauacugcaacuacuccaaauacugguaccugaaccacaccuccucuggccgaaccucccuaccaaagugcuggcucauaucaaacggcuccuaccuuaacgaaacccaauucucagacgacaucgaacaacaagcagacaacaugaucaccgaaaugcugcaaaaagaguacauagaacgccagggcaaaacaccccuuggccuugucgacauauucaucuucucaaccagcuucuaccucaucagcaucuuccuccaucucauaaaaauccccacccaucgucacaucgucggaaaaccaugcccaaaaccccaucgucucaaccacaugggcgucugcuccugcggucucuacaagcaccccggcguacccaccaaauggaagcgcuaaggacuagucccuguucccagagcccacuuuuuuuucuuuuuuugaaauaaaauagccugucuuucagaucuaaaaaaaaaaaaaaaaaaaaaaaaaaaaaaaaaaaaaaaaaaaaaaaaaaaaaaaaaaaaaaaaugcaucccccccccccccccccccccccccccccccaaaggcucuuuucagagccaccagaauu

SEQ ID NO: 2769 - RNA, 1768 nt, Artificial Sequence
  mRNA product Design a-2 comprising derived and/or modified sequence from LASV(803213;Clade II)__AAF86703__GPC (opt11)
gggagaguccgcucagccagguugcagaagcggcuuagcguguguccuaaucuucucucugcguguagguaggccugugccgcaaacaagcuuaccaugggccaaaucauaacauucuuccaagaagucccccacgucaucgaagaagucaugaacaucguacucaucgcucucucacuccuagccauccucaaagguaucuacaauguagcgaccugcggccucuucggccucaucucauuccuucuccucugcggccgcuccugcuccgucaccuacaaaggcgucuacgagcuccagacccuagaacuaaacauggccaaccucaauaugaccaugccccucuccugcacuaaaaacaacagccaucacuacaucauggucggaaacgagaccggacucgaacucacacuuacuaacaccuccaucaucaaccacaaauucugcaaccucuccgacgcccacaagaaaaaucucuaugaccacgcccucauguccauuaucucaacguuccaccucuccaucccuaacuucaaccaauacgaagccaugucaugcgacuucaacggcggcaaaauaagcguccaauacaaccuaucccacuccuucgccguagacgccgccaaccacugcggcaccaucgccaacggcguucuccaaacauucaugcgcauggccugggguggcuccuacauugcccucgacucaggcaaaggcaacugggauugcaucaugacauccuaccaauaccucauuauccaaaacacaacuugggaagaccacugccaauucagccgcccaucccccauaggcuaccucggccuccucucccaacgcacacgcgacaucuacaucucccgccgccuacuaggaaccuucaccuggacccucagcgacucggaaggcaacgaagccccaggcggcuacugccucacuagauggaugcucaucgaagccgaacucaaaugcuucggcaacaccgccguggccaaauguaacgaaaaacacgacgaagaguucugcgacaugcuccgccucuucgacuucaacaagcaagccaucaaacgccucaaaaccgaagcgcaaaugucaauccagcucauaaacaaggcagucaacgcccucaucaaugaucaacuuaucaugaaaaaccaccuccgcgacauaaugggcauccccuacuguaacuacucucgcuacugguaccucaaccacacugugacaggcaaaaccucacuaccccgcuguuggcucguauccaacggcuccuaccucaacgaaacccacuucagcgacgacaucgaacaacaggccgacaauaugaucaccgaaaugcuacaaaaggaauacauggaccgacaaggcaaaacaccccuuggccucgucgaccuauucgucuucuccaccucauucuaccucaucuccaucuuccuccaccucgucaaaaucccaacccaccgccacaucgucggcaagcccugccccaaaccccaccgccucaaccauaugggcaucugcucaugcggccucuacaaacaccccggaguaccaguaaaauggaaacgcuaaggacuagucccuguucccagagcccacuuuuuuuucuuuuuuugaaauaaaauagccugucuuucagaucuaaaaaaaaaaaaaaaaaaaaaaaaaaaaaaaaaaaaaaaaaaaaaaaaaaaaaaaaaaaaaaaaugcaucccccccccccccccccccccccccccccccaaaggcucuuuucagagccaccagaauu

SEQ ID NO: 2770 - RNA, 1768 nt, Artificial Sequence
  mRNA product Design a-2 comprising derived and/or modified sequence from LASV(GA391;Clade III)__CAA36645__GPC (opt11)
gggagaguccgcucagccagguugcagaagcggcuuagcguguguccuaaucuucucucugcguguagguaggccugugccgcaaacaagcuuaccaugggucaaaucgucaccuucuuccaagaaguaccccacgucaucgaagaagucaugaacauaguccucaucgcccucuccauccucgcgauccucaaaggacuauauaacgucgcaaccugcggccucaucggccucgucaccuuccuccuccucagcggacguuccugcagccucaucuacaaaggcaccuacgaacuccagacucucgaacuuaacauggaaacacucaacaugaccaugccccucuccugcaccaagaacaacucccaccacuacauccgcguaggcaacgaaaccggccuagagcuaacccuaacaaacacaucaauccucaaccacaaauucugcaaccucuccgacgcccacaaacgcaaccuauacgaccacucccucauguccaucaucuccaccuuccaccucucaauccccaacuucaaccaauacgaagccauguccugcgacuuuaacggaggcaagaucaccguacaauacaaccucucccacuccuucgccgucgacgccgccggccacugcggcacccucgccaacggaguacuacaaaccuucaugcgcauggcauggggcggcucauacaucgcgcucgacuccggccgcggcaacugggacuguaucaugacauccuaucaauaccuuauaauccagaacaccaccugggacgaccacugccaauuuucccgccccucacccaucggauaucuaggccuccucucccaacgcacccgagacaucuacaucucccgacgacuccucggcacauucacauggacccucuccgacucagaaggcaacgaaacccccggcggauauugccuaacacgcuggaugcucaucgaagcugaacuuaagugcuuuggcaacaccgcaguagcuaaaugcaacgaaaaacacgacgaagaguucugcgacaugcuccgacucuucgacuucaacaaacaagcaauccgccgguuaaaaacugaagcacaaauguccauccaacucaucaacaaagcaguaaacgcucucaucaacgaucaacucauaaugaaaaaccaccuccgagacauaaugggcauacccuacugcaauuacucaagauacugguaccucaaccacaccucaaccgguaaaaccucccuaccccgcugcuggcuaaucucaaauggcucauaccucaacgaaacuaaauucuccgacgacaucgaacaacaagcagacaacaugauuaccgaaaugcugcaaaaagaauacaucgaccgacaaggcaagacccccuuaggccuugucgaccucuucgucuucuccaccucauucuaccucaucucaaucuuccuccaccucgucaaaaucccaacccaccgccacaucgucggcaaacccugccccaaaccccaccggcucaaucacaugggcaucugcagcugcggacucuacaaacaacccggcgucccaguccgcuggaaacgcuaaggacuagucccuguucccagagcccacuuuuuuuucuuuuuuugaaauaaaauagccugucuuucagaucuaaaaaaaaaaaaaaaaaaaaaaaaaaaaaaaaaaaaaaaaaaaaaaaaaaaaaaaaaaaaaaaaugcaucccccccccccccccccccccccccccccccaaaggcucuuuucagagccaccagaauu

SEQ ID NO: 2771 - RNA, 1771 nt, Artificial Sequence
  mRNA product Design a-2 comprising derived and/or modified sequence from LASV(AV;Clade V)__CCA30314__GPC (opt11)
gggagaguccgcucagccagguugcagaagcggcuuagcguguguccuaaucuucucucugcguguagguaggccugugccgcaaacaagcuuaccaugggacagaucguaacauucuuccaagaagucccccacguaaucgaagaagucaugaacaucguacuuaucgcccucuccauccucgccguccucaaaggccuauacaacaucgccacaugcggccuaaucggacuuauaaccuuccuccuccuuugcggccguucaugcucaagcaaccuuuacaaaggagucuacgaacuacaaagucucgaccucaacauggaaacacucaacaugaccaugccccucagcugcaccaaaaacaacucccaccacuacauccgcgucggcaacgacacaggacucgaacucacucucacaaacaccaguauccucaaccacaaguucugcaaccucuccgacgcccacaagaaagaccucuacgaccacgcacugauguccauaauuuccacuuuccaccuuuccauucccaacuucaaccaauacgaagccaugucaugcgacuuuaacggcggaaaaaucagcguacaauacaaccucucucacuccuaugccaucgacgcugcaaaccacugcggcaccgucgcaaacggcauccuccaaaccuucaugagaauggccuggggcggcucuuacaucgcccuagauucaggccgcggcaacugggacuguaucaugacauccuaccaauaccucaucauacaaaacaccaccugggaaaaccacugccaauuuucccgccccagcccaaucgguuaccucggccuccucucucaacggacccgcgacaucuacaucucccggcgacuauuagggacguucaccuggacccucucagacagcgaaggcaacgccacccccggcggauacugccuaacucgcuggaugcuuauagaagccgaacuuaaaugcuucggcaacacugcaguugccaaaugcaacgaaaaacacgacgaggaguucugcgacaugcuccgccucuucgacuucaacaagcaagccaucagccgccuuaaauccgaagcccaaauguccauucagcucaucaacaaagcuguaaacgcccucauaaacgaccaacucaucaugaaaaaucaccuccgcgacauaaugggcauacccuacugcaacuacuccaaauacugguaccuaaaucacaccaucaccggcaaaaccucucuccccaaaugcuggcucgucuccaacggcucauaccucaacgaaacccacuucucggacgacaucgaacaacaagccgacaacaugaucaccgaaaugcuccaaaaagaauacauggaacgccaaggcaaaacaccacuaggccuagucgaccuauucgucuucucgacuuccuucuaccuaauauccaucuuccuucgacucguaaaaauccccacacacagacacauugucggcaagcccugccccaaaccccaccgccuaaaccacaugggcaucugcucaugcggccucuacaaacaacccggcgucccaguccgcuggaaacgcuaaggacuagucccuguucccagagcccacuuuuuuuucuuuuuuugaaauaaaauagccugucuuucagaucuaaaaaaaaaaaaaaaaaaaaaaaaaaaaaaaaaaaaaaaaaaaaaaaaaaaaaaaaaaaaaaaaugcaucccccccccccccccccccccccccccccccaaaggcucuuuucagagccaccagaauu

SEQ ID NO: 2772 - RNA, 1768 nt, Artificial Sequence
  mRNA product Design a-2 comprising derived and/or modified sequence from LASV(Togo/2016/7082;Clade VI)__AMR44577__GPC (opt11)
gggagaguccgcucagccagguugcagaagcggcuuagcguguguccuaaucuucucucugcguguagguaggccugugccgcaaacaagcuuaccaugggacaaaucaucaccuuuuuccaagaagucccccacguuaucgaagaagucaugaacauaguccucaucgcacuuucacuccucgccauacucaaaggcguauacaacgucgcaaccugcggaauaaucggccuggucaccuuccuguuccuaugcggacgauccugcucccuaaucuacaagggguccuacgaacuacaaacccuagaacucaacauggaaacacuuaacaugacaaugccacucucaugcaccaaaaacucaucccaccacuacaucagaguuggcaacgaaacaggccucgagcuaacccucaccaauacaucaaucaucaaccacaaauucugcaaccucuccgacgcccacaaacgaaaccucuaugaccacgcacucauguccauccuuagcaccuuccaccuuagcauccccaacuucaaccaauacgaggccaugagcugcgacuucaacggaggaaaaaucuccguccaauacaaccuaucccacgccuacgccgucgacgcagccgaacacugcgguaccgucgcgaacggcguccuccaaaccuucaugcgcauggccuggggcggcagcuacaucgcccucgacagcggccgcgggaacugggacugcaucaugaccucauaucaauaccuaauuauccaaaacaccaccugggaggaucacugccaauucucccgcccauccccaaucggcuaccuuggccuccucucccaacgcacccgugacaucuacaucucccgcagacuacucgguaccuucacauggacccucuccgacuccgaaggcaacgaaaccccaggcggcuacugccugacacgcuggaugcucaucgaagccgagcucaaaugcuucggcaacaccgccgucgccaagugcaaugaaaaacacgacgaagaguucugcgacaugcuucgccucuucgacuuuaacaaacaggccauccaacgccuaaaaagugaagcccaaaugagcauccaguuaaucaacaaagccgucaaugccuuaaucaacgaccaacucaucaugaaaaaccaucuccgcgacaugaugggcauaccuuacugcaacuauuccaaauacugguaccuaaaccacacuuccucgggccgaacaagccucccaaaauguuggcucgucuccaacggaucauaccucaacgaaacccacuucuccgacgacaucgaacaacaagccgacaauaugauuaccgaaauguuacaaaaggaauacaucgaccgccaaggcaaaacaccccuaggccucgucgaccuuuucguauucucgacgucauucuaccuaaucaguaucuuccuccaccucaucaaaauccccacccaccgucacaucgucggcaaaccgugccccaaaccccaccgccugaaccacaugggaaucugcucuuguggccuauacaaacaacccggaguacccaccagguggaaacgguaaggacuagucccuguucccagagcccacuuuuuuuucuuuuuuugaaauaaaauagccugucuuucagaucuaaaaaaaaaaaaaaaaaaaaaaaaaaaaaaaaaaaaaaaaaaaaaaaaaaaaaaaaaaaaaaaaugcaucccccccccccccccccccccccccccccccaaaggcucuuuucagagccaccagaauu

SEQ ID NO: 2773 - RNA, 1768 nt, Artificial Sequence
  mRNA product Design a-2 comprising derived and/or modified sequence from LASV(KAK-428;Clade n.d. (VII))__ANH09740__GPC (opt11)
gggagaguccgcucagccagguugcagaagcggcuuagcguguguccuaaucuucucucugcguguagguaggccugugccgcaaacaagcuuaccaugggccaaaucgucaccuucuuccaagaagucccccacgucaucgaagaagucaugaacauaguccuaauagcccucucccuccuagccauccucaagggacuauauaacuucgccacaugcggcgucaucggccuuauaacuuuccuccuacucugcggccgcuccugcucugccaccuacaaaggccaauacgagcuucaaacucuugaacucaacauggaaucacuaaacaugaccaugccccuauccugcaccaaaaauaacucacaccacuacauccgcgccgggaacaacacaggccuagaacucacgcucaccaacaccuccaucaucucacauaaauucugcaaccuauccgacgcccacaagaaaaaccucuaugaccacacacucauguccaucauaacaaccuuccaccucuccaucccuaacuucaaccaguacgaagccaugagcugcgacuucaacggcggcaaaauauccauccaauacaaucugucccacuccuacgccggcgacgcagcccagcacugcggcaccgucgccaacggcguccuccagaccuucaugcguauggcauggggaggcuccuaccucgccuuagacagcggacgacguggaugggacugcauaaucuccuccuaccaauacuuaauaauccaaaacaccaccugggacgaucacugccaauucucacgccccucccccaucggcuaccucggauucgucucacagaaaacccgagacaucuacaucuccagacgccuacucggaacguucaccuggacacucagcgacuccgagggccacgacaugcccggcggauacugccucacccgcuggaugcucaucgaagccgaccugaaaugcuucggcaacacagccgucgccaaaugcaacgaaaaacacgacgaagaguucugcgacauguggcgacucuucgacuucaacaaacaagcaauccaaagacucaaagccgaagcccaaaugaacauccaacuaaucaacaaggccgucaacgcccugauaaacgaccaacucaugaugaaaaaccaccucagagacaucaugggcaucccauacugcaacuacuccaaauucugguaccucaacaacaccacaaccggccgcaccucccuaccgcgcugcuggcuaaucucaaaugguuccuaccucaacgaaacccauuuuagcgacgacaucgaacaacaagccgacaacaugaucaccgaaaugcugcaaaaggaauacauggaccgccaaggaaaaacaccccucggccucguagaccucuucgucuucuccaccagcuucuaccuaaucacaaucuuccuccaucuggucaaaauaccgacucacagacacaucgucggaaaacccugccccaaaccccaccgacucaaccacauggguaucugcuccugcggccucuacaaacaacccggagucccaguucgauggaaacgcuaaggacuagucccuguucccagagcccacuuuuuuuucuuuuuuugaaauaaaauagccugucuuucagaucuaaaaaaaaaaaaaaaaaaaaaaaaaaaaaaaaaaaaaaaaaaaaaaaaaaaaaaaaaaaaaaaaugcaucccccccccccccccccccccccccccccccaaaggcucuuuucagagccaccagaauu

SEQ ID NO: 2774 - RNA, 1768 nt, Artificial Sequence
  mRNA product Design a-2 comprising derived and/or modified sequence from LASV(Pinneo-NIG-1969;Clade I)__AIT17836__GPC (opt11)
gggagaguccgcucagccagguugcagaagcggcuuagcguguguccuaaucuucucucugcguguagguaggccugugccgcaaacaagcuuaccaugggccaaaucauaacuuucuuucaagaagucccacacgucaucgaagaagucaugaacauaguccucaucgcccuaucccuccuagcaauccuaaaaggccuauacaauaucgcaaccuguggcaucaucggccuugucgccuuccucuuccucugcggcaaauccuguucccuuacccuaaagggcggcuacgagcuccaaacccucgaacucaacauggaaacccucaacaugacuaugccccucuccugcaccaagaacuccucccaccacuacauccgcguuggcaaugaaaccggacucgaacugacccuaaccaacaccucaaucaucaaccacaaauuuugcaaccuuuccgacgcacacaagaaaaaccucuacgaccacgcccucaugagcaucaucucaaccuuccaccucucaauccccaacuucaaucaauacgaagccauguccugcgacuucaacggcggaaaaaucagcguccaguacaaccugucacacagcuacgccggcgacgccgccgaacacugcggaacagucgcuaacggagucuuacaaacauucaugcgcauggcauggggcggccgguacaucgcccucgacuccggcaaaggcaacugggacugcaucaugaccuccuaccaauaccucauaauccaaaacaccaccugggaagaccacugccaauucucccgcccuucccccaucggcuaccuaggccuccuaagccaacgaacccgagacaucuacaucucaagacgccuccucggcacuuucaccuggacccucuccgacucagagggaaacgaaacccccggaggcuacugccuuacccgcuggauguuaaucgaagccgaacucaaaugcuucggcaacaccgccguagccaaaugcaacgaaaaacacgacgaagaguucugcgacaugcuacgccucuucgacuucaacaaacaagccauacgccgacucaaagcagaagcccaaauguccauccaauuaaucaacaaggccgucaacgcccuaauaaacgaccagcuaauaaugaaaaaccaccuccgcgacaucauggguauccccuacugcaacuacuccaaauacugguaccuaaaccacaccucauccggccgaacaucccuccccaaaugcuggcucaucuccaacggcuccuaccucaacgaaacacaauucuccgacgacaucgaacaacaagccgacaacaugaucacugagaugcuacaaaaagaauacaucgaacgacaaggcaaaacaccccuaggacucgucgauaucuucauauucucaaccucuuucuaccucaucucuaucuuccuucaccucaucaaaauccccacucaccggcacauagucggcaaacccugccccaaaccacaccgccuaaaccacaugggugucugcuccugcggccucuacaaacaccccggcguccccacaaaauggaaacgauaaggacuagucccuguucccagagcccacuuuuuuuucuuuuuuugaaauaaaauagccugucuuucagaucuaaaaaaaaaaaaaaaaaaaaaaaaaaaaaaaaaaaaaaaaaaaaaaaaaaaaaaaaaaaaaaaaugcaucccccccccccccccccccccccccccccccaaaggcucuuuucagagccaccagaauu

SEQ ID NO: 2775 - RNA, 1768 nt, Artificial Sequence
  mRNA product Design a-2 comprising derived and/or modified sequence from LASV(ISTH0009-NIG-2011;Clade II)__AIT17404__GPC (opt11)
gggagaguccgcucagccagguugcagaagcggcuuagcguguguccuaaucuucucucugcguguagguaggccugugccgcaaacaagcuuaccaugggccaaaucaucaccuuuuuccaagaagucccccacgucaucgaagaagucaugaacaucguccuaaucgcacucucccuacucgccauccucaaaggaaucuacaacguugcuacaugcggacucuucggccucgucuccuuccuccuccucugcggccgcucaugcuccaccaccuacaaaggcgucuacgaacuccaaacacucgaacucgacauggccucccuaaacaugaccaugccccucuccugcaccaaaaacaacucccaccacuacaucaugguaggcaacgaaaccggccuagaacucacccucacaaacacaucaaucaucaaccacaaauucugcaaucucuccgacgcacacaagaaaaaccucuacgaccacgcccucaugucuaucaucuccacauuccaccucucaauccccaacuucaaccaauacgaagcaauguccugcgacuucaacggaggcaaaaucucggugcaauacaaccucucgcacgccuacgcuguagacgccgccaaccacugcggcacuaucgccaacggcguccuacagaccuucaugcgcauggccuggggcggcuccuacaucgcccucgacucgggcaaaggcuccugggacugcaucaugacguccuaccaauaccucaucauccaaaacacaaccugggaagaccacugccaauucucccgacccagccccaucggguaccucggccuucuaucacaacggacccgagauauauacaucucccgcagacuacucggcacuuucaccuggacacucucagacuccgaaggcaacgaaacccccggcggcuacugccucacacguuggaugcuuauagaagccgaacucaaaugcuucggcaacaccgccgucgccaaaugcaacgaaaaacacgacgaagaauuuugcgacaugcucagacucuucgacuucaacaaacaagccauaagacgcuuaaaaacagaagcacaaaugucuauacaacucaucaacaaagccgucaaugcacuaaucaacgaccagcuaaucaugaaaaaccaccuccgcgacaucaugggcauccccuacugcaacuacuccaaauacugguacuugaaccacaccgucaccggcaaaaccucccucccgcgcugcuggcuagucagcaacggcagcuaccucaacgaaacccacuucucugacgacauagaacaacaagccgacaacaugaucaccgaacuccugcaaaaagaauacauggaccgccaaggaaagacuccccucggccucguggaccuauucgucuucucaaccucauucuaccuuaucagcaucuuccuccaccuuaucaaaauaccuacacaccgccacaucacaggcaaaccaugccccaagccccaccgauuaaaccauaugggcauaugcuccugcggccucuacaaacaccccggaguaccagucaaauggaaacgaugaggacuagucccuguucccagagcccacuuuuuuuucuuuuuuugaaauaaaauagccugucuuucagaucuaaaaaaaaaaaaaaaaaaaaaaaaaaaaaaaaaaaaaaaaaaaaaaaaaaaaaaaaaaaaaaaaugcaucccccccccccccccccccccccccccccccaaaggcucuuuucagagccaccagaauu

SEQ ID NO: 2776 - RNA, 1768 nt, Artificial Sequence
  mRNA product Design a-2 comprising derived and/or modified sequence from LASV(ISTH2010-NIG-2012;Clade II)__AIT17482__GPC (opt11)
gggagaguccgcucagccagguugcagaagcggcuuagcguguguccuaaucuucucucugcguguagguaggccugugccgcaaacaagcuuaccaugggccaaaucaucaccuucuuccaagaagucccacacgucauagaagaaguaaugaacaucguccuaauugcucucucacuacucgcgauccucaaagguaucuacaacgucgcaaccugcggacuguuuggacucguaucauuccuccuccugugcggccgcagcugcucaaccacauacaaaggcguauacgaacuacaaacccucgaacucgacauggccagccucaacaugacaaugccccucagcugcaccaaaaauaacagccaccacuacaucauggucggcaacgaaaccggccuugaacucacccucacaaacaccucaaucauaaaccacaaauucugcaaccucagcgacgcccacaagaaaaaccuauacgaccaugcacuaauguccaucauaagcaccuuccaccucuccauacccaacuucaaccaguacgaggccaugucaugcgauuucaacggaggcaaaaucuccguccaauacaaccuaagccacgccuacgcagucgacgccgccaaccacugcggcaccauagcaaacggcguccuucaaaccuucaugcgaauggccuggggcggcucauacaucgcccuagacucaggcaaaggcuccugggacugcauaaugacaucauaccaauaucucaucauccaaaacauaacaugggaagaccacugccaauucucccguccaucgccaaucggauaccucggccuccuaucacaacgaacucgcgacaucuacauaucccgccgucuccuaggaacauucaccuggacacucagcgacuccgaaggaaacgaaacccccggcggcuacugccucacgcgcuggaugcugaucgaagcagaacucaaaugcuucggcaacacugccgucgccaaaugcaacgaaaaacacgacgaagaguucugcgacaugcuacgacucuucgacuucaacaaacaagccauccgucgccucaaaaccgaagcccaaaugucgauccaacucaucaacaaggcaguaaacgcccuaaucaacgaccaacucauaaugaagaaccaccuacgcgauaucaugggcauacccuacugcaacuacuccaaguacugguaccucaaccacaccgucacaggcaaaaccucccucccccgaugcuggcuagucuccaacggcucuuaucuaaacgaaacccacuucuccgacgacauagaacaacaagccgauaacaugauuaccgaacuccuacaaaaagaauacaucgaccgccaaggcaagaccccacucggacucgucgaccuauucgucuucucaaccucguucuaccucauuucuauauuccuccaccuaguaaaaauccccacacaccgccaugucgucggcaaacccugccccaaaccccaccgccuaaaccacaugggaauaugcagcugcggccucuacaaacaccccggcguacccgugaaauggaaacgauagggacuagucccuguucccagagcccacuuuuuuuucuuuuuuugaaauaaaauagccugucuuucagaucuaaaaaaaaaaaaaaaaaaaaaaaaaaaaaaaaaaaaaaaaaaaaaaaaaaaaaaaaaaaaaaaaugcaucccccccccccccccccccccccccccccccaaaggcucuuuucagagccaccagaauu

SEQ ID NO: 2777 - RNA, 1768 nt, Artificial Sequence
  mRNA product Design a-2 comprising derived and/or modified sequence from LASV(Lassa virus/H.sapiens-wt/NGA/2015/ISTH_0543;Clade II)__AVO03639__GPC (opt11)
gggagaguccgcucagccagguugcagaagcggcuuagcguguguccuaaucuucucucugcguguagguaggccugugccgcaaacaagcuuaccaugggccagauuaucacauucuuccaagaagucccccacgucaucgaagaagucaugaacauaguacuaaucgcccugucacuccucgcaauccuaaaagguaucuacaacguugcuaccugcggacucuucggccucguuucauuccuccuccucuguggccgauccugcuccacaacuuauaaaggcgucuacgaacuccaaacacucgaacuugacauggccaaccucaacaugaccaugccacucucaugcaccaaaaacaacucccaccacuacauuauggucggcaacgaaaccggccucgaacuaacucucaccaacacaucaauaaucaaccacaaauucugcaaccuaagcgacgcccacaagaaaaaccuauacgaccacgcccuaauguccaucauaagcaccuuccaccucuccauuccaaacuuuaaccaauacgaagcaauguccugcgacuucaacggaggcaaaaucucaguccaauauaaccucucccacaccuacgccgucgacgcggccaaccacugugguaccaucgccaacggaguccuccaaaccuucaugcgcauggcuuggggcggaagcuacaucgcccuagacuccggcaaaggaucaugggacugcaucaugaccuccuaucaguaucucguaauacaaaacacaacuugggaagaccacugucaauucucccgcccaucgcccaucggcuaccucggccuucuaucccaacgaacaagagacaucuacaucucucgccgacuucuuggcaccuucacauggacccucucagacucagaaggcaacgaaaccccugguggcuacugccucacccgcuggauguugaucgaagccgaacuaaaaugcuucggcaacacagccguugccaaaugcaacgagaaacacgacgaagaguucugcgacaugcuccgccuauucgacuucaacaaacaagccauccgccgccucaaaaccgaagcccagauguccauccagcucaucaacaaagccguaaacgcucuaauaaacgaccaacucaucaugaaaaaccaccuacgcgacaucaugggcauccccuacugcaacuacuccaaauacugguaccuaaaccacaccgucaccgguaaaaccucucuaccacgcugcuggcucgucuccaacggaucauaccucaacgaaacccacuucucagaugacaucgaacaacaagccgacaacaugauaaccgaacuccuacagaaagaauacaucgaucgacagggcaaaacaccccucggccucgucgaccucuucguuuucucaaccuccuucuaccuaaucuccauauuccuccaccucgucaaaauccccacccaucgacacaucaccggcaaaccaugcccaaaaccccaccgacucaaccacaugggcaucugcuccugcgguuuauacaaacacccuggcguccccgucaaauggaaacgguaaggacuagucccuguucccagagcccacuuuuuuuucuuuuuuugaaauaaaauagccugucuuucagaucuaaaaaaaaaaaaaaaaaaaaaaaaaaaaaaaaaaaaaaaaaaaaaaaaaaaaaaaaaaaaaaaaugcaucccccccccccccccccccccccccccccccaaaggcucuuuucagagccaccagaauu

SEQ ID NO: 2778 - RNA, 1768 nt, Artificial Sequence
  mRNA product Design a-2 comprising derived and/or modified sequence from LASV(Lassa virus/H.sapiens-wt/NGA/2016/ISTH_0009;Clade II)__AVO03571__GPC (opt11)
gggagaguccgcucagccagguugcagaagcggcuuagcguguguccuaaucuucucucugcguguagguaggccugugccgcaaacaagcuuaccaugggccaaaucaucaccuucuuccaagaagucccccacgucauugaagaaguaaugaacauaguccucaucgcccucucacuacuagcuauccuaaagggaaucuacaacgucgccaccuguggccuccucggccucguaucguuccuccuucuuuguggacgauccugcuccaccaccuacaaagguguauacgaacuccaaacccucgaguuagacauggccagccuaaacaugaccaugccccucuccugcaccaaaaauaauucccaccacuacaucauggucggcaacgaaaccggccucgaacucacacucacuaacacauccaucaucaaccacaaauucugcaacuuaucagaugcccacaagaaaaaccucuacgaccacgcacuaaugucaaucaucucaaccuuccaccucagcauccccaacuucaaccaguacgaggcaaugucuugcgacuucaacggcggacgcaucuccguccaauacaaccucucccacagcuaugccgucgacgccgccaaccacugcggcacgaucgccaacggcguccuacaaaccuucaugcgaauggccuggggcgguuccuauaucgcccucgacuccggcaaaggaagcugggacugcaucaugaccucauaccaauaccucauaauccaaaacaccacaugggaagaucacugccaauucucccguccaucccccaucggcuaccucggccuccucucacaacgcacacgcgacaucuacaucucaagacgccuacucggcaccuucacuuggacccucucagacuccgaaggcaacgaaacccccggaggcuacugccuuacccgcuggaugcuaaucgaagccgaacucaaaugcuucggcaacaccgccguagcaaaaugcaacgaaaaacacgacgaagaguucugcgacaugcuccgacuuuucgacuucaacaaacaggccauccgccgccucaaaaccgaagcacaaauguccauccaacucaucaacaaagcaguaaacgcccuuauaaacgaucaacuaaucaugaaaaaccaccuccgcgacaucaugggcauccccuacugcaacuacuccaaauacugguaccuaaaccacaccguaaccggaaaaaccagccuccccagaugcuggcuagucagcaacggaucauaccuuaacgaaacccacuucuccgaugacaucgaacaacaagccgacaacaugaucaccgaacuucuacagaaagaauacaucgaccgccaaggcaaaacgccccucggccuugucgaccucuucgucuucuccaccuccuucuaccucaucagcauauuccuacaccuugucaaaaucccaacccaccgucacaucaccggcaaacccugcccaaaaccccaccgacuaaaccacaugggcaucugcuccugcggccucuacaaccacccaggcguccccgucaaauggaaacguuagggacuagucccuguucccagagcccacuuuuuuuucuuuuuuugaaauaaaauagccugucuuucagaucuaaaaaaaaaaaaaaaaaaaaaaaaaaaaaaaaaaaaaaaaaaaaaaaaaaaaaaaaaaaaaaaaugcaucccccccccccccccccccccccccccccccaaaggcucuuuucagagccaccagaauu

SEQ ID NO: 2779 - RNA, 1768 nt, Artificial Sequence
  mRNA product Design a-2 comprising derived and/or modified sequence from LASV(Lassa virus/H.sapiens-wt/NGA/2016/ISTH_0017;Clade II)__AVO03567__GPC (opt11)
gggagaguccgcucagccagguugcagaagcggcuuagcguguguccuaaucuucucucugcguguagguaggccugugccgcaaacaagcuuaccaugggccaaauaaucacauuuuuccaagaagucccccacgucaucgaagaagucaugaauaucguccuuaucgcccucagccuccuugcaauccugaaaggcaucuacaacgucgccacaugcggccucuucggccuagucuccuucuuacuccuaugcggacgcuccugcucgacaaccuacaaaggcgucuacgaacuccaaacacuggaacucgacauggccucccuuaacaugaccaugccccuauccugcaccaaaaacaacagccaccauuacauaaugguaggaaacgaaaccggccucgaacuaacacucaccaacaccuccauaauaaaucacaaauucugcaaccucucagacgcccacaagaaaaaccuuuacgaccaugcacucauguccaucauaucaaccuuccaccucuccauacccaauuucaaccaauacgaagccaugucaugcgacuucaauggcggcaaaaucuccguccaguacaaccuuucccacacuuacgccaucgacgccgccaaccacugcggcaccauagccaacggcguacuccaaacauucaugcgcauggcgugggguggcuccuacaucgcacucgacucaggcaaaggaucaugggacugcauaaugaccucauaccaauaccucaucauccaaaacacaaccugggaagaccacugccaauucagccggccaucucccaucggcuaccucggccuacuaagccaacgcacgcgcgacaucuacaucucccgccgccuucuaggcaccuucaccuggacccucucagacuccgaagggaacgaaacgcccggcggauacugccucacccgcuggaugcucaucgaagccgaacucaaaugcuucggcaacacagcagucgccaaaugcaacgaaaaacacgacgaagaguucugcgacaugcuccgccuauucgacuucaacaaacaagcaauacgccgacuuaaaaccgaagcacaaaugucaauccaacuaaucaacaaagcagucaacgcucuaauuaacgaccaacuuaucaugaaaaaccaccuccgagacaucaugggcaucccauacugcaacuacucaaaauacugguaccucaaucacaccgucacgggcaaaaccucccucccacgcugcuggcuagucuccaacggcucauaccucaacgaaacgcacuuuucagaugacaucgaacaacaagcugacaauaugaucaccgaacuccuacaaaaagaauacauggaccgccaaggaaaaacaccccucggacucgucgaucucuucguauucuccaccucauucuaccuaaucuccauauuccuccaccuaguacgaauccccacccaccgccacgucauaggcaaacccugccccaaaccccaccgccuaaaccacaugggcauaugcuccugcggccucuacaaacacccuggcguccccgucaaauggaagcgcugaggacuagucccuguucccagagcccacuuuuuuuucuuuuuuugaaauaaaauagccugucuuucagaucuaaaaaaaaaaaaaaaaaaaaaaaaaaaaaaaaaaaaaaaaaaaaaaaaaaaaaaaaaaaaaaaaugcaucccccccccccccccccccccccccccccccaaaggcucuuuucagagccaccagaauu

SEQ ID NO: 2780 - RNA, 1768 nt, Artificial Sequence
  mRNA product Design a-2 comprising derived and/or modified sequence from LASV(Lassa virus/H.sapiens-wt/NGA/2018/ISTH_0959;Clade II)__AVV65099__GPC (opt11)
gggagaguccgcucagccagguugcagaagcggcuuagcguguguccuaaucuucucucugcguguagguaggccugugccgcaaacaagcuuaccaugggacaaaucaucaccuucuuccaagaagucccacacguuauagaagaagucaugaacaucguacucaucgcacuuucacuacuugccauccucaaaggaaucuauaacgugguaaccugcggccuauucggccucgucuccuuccuccuccucugcggccgcuccugcuccaccaccuacaaaggagucuacgaacuccaaacccucgagcuugacauggccucacuaaauaugacaaugccacuuucaugcacuaagaacaacucacaccacuacauaauggucggcaacgaaaccggccucgaacugacccucacaaacaccucuaucauaaaccauaaauucugcaaucucuccgacgcacacaagaagaaccucuacgaccacgcucucaugucaauaauauccaccuuccaccucuccauacccaacuucaaccaauacgaagcaauguccugcgacuucaacggcggaaaaaucuccguccaauacaaccuaucccacgccuaugccaucgacgccgccaaucacugcggaacaaucgccaauggaguccuccaaacauucaugcgcauggccuggggcggauccuacaucgcacucgacucaggcaaaggcucaugggacugcauaaugacauccuaccaauaccucaucauccaaaacaccaccugggaagaccacugccaauucucccgccccucgccaaucggcuaccucggacuccucucccagcgcacucgcgacaucuacaucucacgccgccugcuaggcacauucaccuggacccuauccgacuccgaagguaacgaaacccccggcggguauugccuaacucgcuggaugcuaauagaagccgaacuaaaaugcuucgguaacaccgccgucgccaaaugcaacgaaaaacacgacgaagaguucugcgacaugcuccgacucuucgacuucaacaaacaagccauccgccgacuaaagacagaagcacaaaugucaauccagcugaucaacaaagccgugaacgcccuaaucaacgaccaacucaucaugaaaaaccaccuccgagacaucaugggcaucccguacugcaacuacuccaaauacugguaccuuaaccacaccgucacuggaaaaaccucacucccccguugcuggcucguuuccaacggaagcuaucuaaacgaaacccacuucuccgacgacaucgaacaacaagcagacaauaugaucacugaacuccuccaaaaagaauacauagaccgccaaggcaaaaccccacucggccuagucgaccuauucgucuucucuaccuccuucuaucucaucucuaucuuccuccaccuaguuaaaauccccacacaucgacacgucaucggaaaaccaugcccaaaaccccaucgccugaaccauaugggcaucugcucauguggccuauacaaacaccccggcguccccguaaaauggaaacgcuaaggacuagucccuguucccagagcccacuuuuuuuucuuuuuuugaaauaaaauagccugucuuucagaucuaaaaaaaaaaaaaaaaaaaaaaaaaaaaaaaaaaaaaaaaaaaaaaaaaaaaaaaaaaaaaaaaugcaucccccccccccccccccccccccccccccccaaaggcucuuuucagagccaccagaauu

SEQ ID NO: 2781 - RNA, 1768 nt, Artificial Sequence
  mRNA product Design a-2 comprising derived and/or modified sequence from LASV(LASV003-NIG-2008;Clade II)__AIT17580__GPC (opt11)
gggagaguccgcucagccagguugcagaagcggcuuagcguguguccuaaucuucucucugcguguagguaggccugugccgcaaacaagcuuaccaugggacaaaucauaaccuuuuuccaagaagucccgcacguaaucgaagaagucaugaacauuguccucaucgcccucucacuccuugccauuuuaaaaggcaucuacaacgucgcaaccugcggacuauucggacucgucucuuuccuccuccuaugcggccgcuccugcuccaccaccuacaaaggagucuacgagcuucaaacccucgaacucgacauggccucacucaacaugacaaugccccucagcugcacuaaaaacaacucacaccacuacauaaugguuggaaacgaaaccggccucgaacucacccuaacaaacaccuccauuaucaaccauaaauucugcaaccucuccgacgcccacaaaaagaaccucuacgaccacgcccugaugucuaucaucuccacauuccaccucucaauccccaacuucaaccaauacgaggccauguccugcgacuucaaugguggcaaaaucuccguacaauacaaccucucccacaccuacgcagucgacgccgcaaaccacugcggcaccaucgccaacggaguacuucaaaccuucaugcgaauggccuggggcggcuccuacaucgcccucgacuccggaaaaggcagcugggacugcaucaugaccucauaccaauaccuaaucauccaaaacaccaccugggaagaccacugccaauucagccgcccaucccccaucggcuaccucggccuccucucccaacgcacacgcgacaucuacaucucccgccgccuacucggcaccuucacuuggacccuaucugacagcgaauccaacgaaacuccaggaggcuacugccuaacucgcuggaugcucaucgaagcagaacucaaaugcuucggcaacacugccguagcaaaaugcaacgaaaaacacgacgaagaguucugcgacaugcuccgccuauucgacuucaacaagcaggccauccgccgccucaaagccgaagcucaaauguccauccaacuaaucaacaaagccgucaacgcccucaucaacgaccaacucaucaugaaaaaccaccuccgcgacaucaugggcauccccuacugcaacuacucuaaauacugguaccucaaccacaccguaaccggccgcacaucccucccacgcugcuggcucgucagcaacggauccuaccuaaacgaaacccacuucucagacgacauugaacaacaagcagacaacaugaucaccgaacuccuccaaaaagaauacauggaccgccaagguaaaaccccacucggccuaguggaccuauucgucuucuccaccucauucuaccugauauccaucuuccuccaccucgucaaaauccccacacaccgccacgucaucggcaaacccugccccaaaccccaccgccuaaaccacaugggaauaugcucuugcggccucuacaaacacccaggaguccccguaaaauggaaacgauaaggacuagucccuguucccagagcccacuuuuuuuucuuuuuuugaaauaaaauagccugucuuucagaucuaaaaaaaaaaaaaaaaaaaaaaaaaaaaaaaaaaaaaaaaaaaaaaaaaaaaaaaaaaaaaaaaugcaucccccccccccccccccccccccccccccccaaaggcucuuuucagagccaccagaauu

SEQ ID NO: 2782 - RNA, 1768 nt, Artificial Sequence
  mRNA product Design a-2 comprising derived and/or modified sequence from LASV(LASV035-NIG-2009;Clade II)__AIT17588__GPC (opt11)
gggagaguccgcucagccagguugcagaagcggcuuagcguguguccuaaucuucucucugcguguagguaggccugugccgcaaacaagcuuaccaugggccaaaucaucaccuucuuccaggaagucccccacgucaucgaagaaguaaugaacauaguccuaaucgcccuaucccuccucgccauucuaaaaggcaucuacaacgucgcaaccugcggacucuucggacucgucuccuuccuucucuuaugcggccgaucaugcuccaccacuuauaaagggguuuacgaacuccaaacccucgaacucgacauggccucccucaacaugaccaugccccuauccugcaccaaaaacaauucacaccacuacaucaugguaggcaacgaaacaggccucgaacucacccucacaaacaccuccaucauaaaccacaaauucugcaaccugucagacgcacacaagaaaaaccuauaugaccacgcacucauguccaucaucuccaccuuccaccucagcaucccaaacuucaaccaauacgaagccaugucaugcgacuucaacggcggcaaaaucuccguacaauacaaccucucccacgccuacgccgucgacgcagcaaaccacugcggaaccaucgccaauggcguccuacaaacauucaugcguauggccuggggcgguuccuacauagcacucgacuccggaaaaggauccugggacugcaucaugaccuccuaccaauaucucaucauccaaaacaccaccugggaagaccacugccaauucucacgcccuucucccauaggcuaccucggccuacuaucgcaacgaacacgcgacaucuacauuucccgacgacuacucggcaccuucacauggacccuuucagauucugaaggcaacgaaaccccaggcggauacugccuaacccgcuggaugcuaaucgaagccgaacuuaaaugcuucggcaauacagccguagccaaaugcaacgaaaaacacgacgaagaguucugcgacaugcuccgccucuucgacuucaacaaacaagcaauccgccgccucaaagccgaagcccaaauguccauccaacucaucaacaaagccgucaacgcccucaucaacgaccaacuuauaaugaaaaaucaccuccgcgacaucaugggaauaccauacuguaacuacuccaaauacugguaccucaaccacacagucaccggcaaaacaucacucccucgcugcugguuagucuccaauggauccuaccucaacgaaacccacuucuccgacgacaucgaacaacaagcagacaacaugaucaccgaacuccugcaaaaagaauacaucgaccgccaaggcaaaacaccacucggccuugucgaccuauucguauucucaaccuccuucuaccugaucuccaucuuccuccaccucguaaaaauaccaacccaccgccacgucauagggaaacccugccccaaaccccaccgccugaaccacaugggaauaugcucaugcggccucuacaaacacccgggcguacccgucaaguggaaacgcuaaggacuagucccuguucccagagcccacuuuuuuuucuuuuuuugaaauaaaauagccugucuuucagaucuaaaaaaaaaaaaaaaaaaaaaaaaaaaaaaaaaaaaaaaaaaaaaaaaaaaaaaaaaaaaaaaaugcaucccccccccccccccccccccccccccccccaaaggcucuuuucagagccaccagaauu

SEQ ID NO: 2783 - RNA, 1768 nt, Artificial Sequence
  mRNA product Design a-2 comprising derived and/or modified sequence from LASV(LASV1000-NIG-2009;Clade II)__AIT17782__GPC (opt11)
gggagaguccgcucagccagguugcagaagcggcuuagcguguguccuaaucuucucucugcguguagguaggccugugccgcaaacaagcuuaccaugggacaaaucaucaccuucuuccaagaggucccccacgucauagaagaagucaugaacaucguccucaucgcacucucccuccucgccauccugaaaggcauauacaacgucgcgaccugcggccucuucggccucgucucuuuccuccuccucugcggcagaucgugcuccaccaccuacaaaggcgucuacgaacugcaaacccucgagcucgacauggccucccucaacaugacuaugccccuguccuguaccaaaaacaacucccaccauuauaucauggucggcaaugaaaccggacucgaacucacccucacuaacaccucaauaaucaaccacaaauucugcaaccucucagacgcccacaaaaagaaccucuacgaccacgcacuaauguccauaauaucaaccuuccaccucucaauccccaacuucaaccaauacgaggcgauguccugcgacuuuaacggcgggaaaaucuccguccaauacaaccuuucucacaccuacgccgucgacgcagccaaccacugcggcacaaucgccaacggcguccuccaaacauucaugcgaauggccuggggcggcuccuacauugcccucgacuccggcaaaggcuccugggacugcaucaugaccuccuaccaguaccucauaauucaaaacacaacuugggaagaccacugccaauuuucccgcccguccccaauuggauaccucggccuccuuagccaaaggacccgcgacaucuauauuucccgacgccuccucggcacauucaccuggacacuauccgacuccgaaggcaacgaaacccccggcggauacugccuaacccgcuggaugcucaucgaagccgaacucaaaugcuucggaaacaccgccgucgcuaaaugcaacgaaaaacacgacgaggaguucugcgacaugcuccgccuauucgacuucaacaagcaagcuaucaaacggcucaaaaccgaagcgcaaauguccauccaacucaucaacaaagcaguaaacgcccucaucaacgaccaacuaaucaugaagaaccaccuacgcgacaucaugggaauccccuacugcaacuacuccaaauauugguaccuaaaccacaccgucacaggcaaaaccucccuaccccgaugcuggcuaguuagcaacggcucauaccuaaaugaaacccacuucucagacgacaucgaacaacaggcggacaacaugaucaccgaacuccuccaaaaggaauacaucgacaggcaaggaaaaacgccccugggccuagucgaccuauucgucuucuccaccucauucuaccuaauaagcaucuuccuccaccucgucaaaauccccacccaccgacacgucgucggaaaacccugcccaaaaccccaccgacucaaccacauggguaucugcuccugcggccuauacaaacaucccggcguccccguaaaauggaaacgcuaaggacuagucccuguucccagagcccacuuuuuuuucuuuuuuugaaauaaaauagccugucuuucagaucuaaaaaaaaaaaaaaaaaaaaaaaaaaaaaaaaaaaaaaaaaaaaaaaaaaaaaaaaaaaaaaaaugcaucccccccccccccccccccccccccccccccaaaggcucuuuucagagccaccagaauu

SEQ ID NO: 2784 - RNA, 1768 nt, Artificial Sequence
  mRNA product Design a-2 comprising derived and/or modified sequence from LASV(LASV221-NIG-2010;Clade II)__AIT17624__GPC (opt11)
gggagaguccgcucagccagguugcagaagcggcuuagcguguguccuaaucuucucucugcguguagguaggccugugccgcaaacaagcuuaccaugggacaaaucaucaccuucuuccaggaaguaccacacguaauagaagaagucaugaacaucguucuaaucgcccucucacuacucgcaauacucaaaggcauauacaacgucgcaaccugcggccucuucggccucgucuccuuccuacuccuuugcggccgcuccugcuccacaaccuacaaaggcgucuacgaacuccaaacucucgaacuagacauggcuucccucaacaugaccaugccccuuucuugcaccaaaaacaacucccaccacuacaucauggucggcaacgaaaccggccuagaacucacccuaacaaacaccuccaucaucaaccacaaauucugcaaccucucagaugcccacaaaaagaaccucuacgaucacgccuuaaugaguaucaucuccaccuuccaccuaucaauacccaacuucaaccaguacgaagcaauguccugcgacuucaacggcggaaaaaucucgguccaauacaaccucucccacaccuacgccaucgacgccgcaaaccacugcggcaccaucgccaacggcguucuccaaacauucaugcgcauggccuggggcggcuccuacaucgcccucgacuccggaaaaggaagcugggacugcaucaugaccagcuaccaguaccuaaucauacaaaacaccaccugggaagaucacugccaauuuucucgccccucccccaucggcuaccucggccuacucucccaacgcacucgcgacaucuacaucagcagacgccuccuuggcaccuucaccuggacccuauccgacuccgaagguaacgaaacucccggcggcuacugccucacacgcuggaugcuuaucgaagccgaacucaaaugcuucggaaacacagccguagccaaaugcaacgaaaaacacgacgaagaauuuugcgacaugcuccgccuauucgacuucaacaagcaagccauccgccgcuuaaaaaccgaagcccaaaugucaauccaacucaucaacaaagccgucaacgcccucauaaacgaccaacucaucaugaaaaaccaccuccgugacaucaugggcauccccuacugcaacuacuccaaauacugguaccucaaccacacugucacgggaaaaacaagccuuccccgaugcuggcuagucuccaauggcucuuaccucaacgaaacacacuucucugacgacaucgaacaacaagccgacaacaugaucaccgaaaugcuacaaaaggaauacauggaccgacagggcaaaacaccccucggccucgucgaccucuucguguucucaaccuccuucuaccugaucuccaucuuccuucaccucguaaaaauccccacccacagacacguaaucggaaagccaugcccaaaaccccaccgccuaaaccacaugggaauuugcucaugcggccucuacaaacaccccggcgucccagucaaauggaaacgcuaaggacuagucccuguucccagagcccacuuuuuuuucuuuuuuugaaauaaaauagccugucuuucagaucuaaaaaaaaaaaaaaaaaaaaaaaaaaaaaaaaaaaaaaaaaaaaaaaaaaaaaaaaaaaaaaaaugcaucccccccccccccccccccccccccccccccaaaggcucuuuucagagccaccagaauu

SEQ ID NO: 2785 - RNA, 1768 nt, Artificial Sequence
  mRNA product Design a-2 comprising derived and/or modified sequence from LASV(LASV237-NIG-2010;Clade II)__AIT17638__GPC (opt11)
gggagaguccgcucagccagguugcagaagcggcuuagcguguguccuaaucuucucucugcguguagguaggccugugccgcaaacaagcuuaccaugggccagaucaucaccuucuuccaagaaguaccccacgucaucgaagaagucaugaacauaguccugaucgcacucucacuccuagccauacucaagggaaucuauaacguagccacaugcggacuauucggucucguaucauuccuacuacucugcggccguuccugcucgaccaccuauaaaggcgucuacgaacuccagacacucgaacucgacauggcaucccucaacaugaccaugccccuaucuugcaccaaaaacaacucccaccacuacaucauggucggaaacgaaaccggacucgaacucacacucaccaacaccucuauaaucaaccacaaauucugcaaccuaucagacgcucacaaaaaagaccucuacgaccacgcacucaugucaaucaucucaaccuuccaccucuccaucccaaacuucaaccaguacgaagccaugucuugcgacuucaauggaggaaaaaucucgguucaguacaaucucagccacaccuacgccgucgacgccgccaaccauugcggaaccaucgcaaacggcguccuacaaaccuucaugcgcauggccuggggcggcuccuacaucgcccucgacuccggcaaaggcuccugggacugcaucaugacuagcuaccaauaucuuaucauacaaaacacaaccugggaagaccacugccaauucucucgacccucaccaaucggcuaccucggacuacucucccagcggacacgcgacaucuacaucagccgccgacuccuaggcacauucaccuggacccuaagcgacagcgaaggcaacgaaacacccggaggcuacugccucacccgcuggaugcucaucgaagccgaacucaaaugcuucggaaacacagcagucgcaaaaugcaacgaaaaacacgacgaagaauucugcgacaugcuccgccucuucgacuucaacaaacaagccauucgcagacucaaaacggaagcccagaugucaauacaacuaauaaacaaagccgucaacgcccuaaucaacgaccaacucaucaugaaaaaccaccuccgcgacaucaugggcauccccuacugcaacuacagcaaauacugguaccucaaccacacagucaccggcaaaaccucacucccacgcuguuggcucgucuccaacgggucauaccucaacgaaacccacuucuccgacgacauugaacaacaagccgacaacaugauaaccgaacuccuccaaaaagaauacauggacagacaaggcaaaacuccccuaggccuagucgaccucuucgucuucagcaccucguucuaccucaucucaauauuccuccaccuaaucaaaauccccacccaccgacacauaaccggcaaacccugucccaaaccacaccgccucaaccacaugggaauaugcucauguggccucuacaaacaccccggcguccccgucaaguggaaacguuaaggacuagucccuguucccagagcccacuuuuuuuucuuuuuuugaaauaaaauagccugucuuucagaucuaaaaaaaaaaaaaaaaaaaaaaaaaaaaaaaaaaaaaaaaaaaaaaaaaaaaaaaaaaaaaaaaugcaucccccccccccccccccccccccccccccccaaaggcucuuuucagagccaccagaauu

SEQ ID NO: 2786 - RNA, 1768 nt, Artificial Sequence
  mRNA product Design a-2 comprising derived and/or modified sequence from LASV(LASV253-NIG-2011;Clade II)__AIT17670__GPC (opt11)
gggagaguccgcucagccagguugcagaagcggcuuagcguguguccuaaucuucucucugcguguagguaggccugugccgcaaacaagcuuaccaugggacaaaucaucacauucuuucaagaagucccccacgucaucgaagaaguaaugaacauaguccucaucgcacucagccuccucgcaauacucaaagguaucuacaacguggccacuugcggucucuuuggccuagucucauuccuucuucucugcgggcguucaugcuccaccacauacaaaggcgucuacgaacuccaaacccuagaacucgacauggccucccucaacaugaccaugccccucuccugcaccaaaaauaacucccaccacuacaucauggucggcaacgaaaccggccucgaacuaacccucaccaacaccuccaucaucaaccacaaauucugcaaccucuccgacgcacacaagaaaaaccuauacgaccacgcacuaaugucaaucaucucaaccuuccaccucuccauccccaacuucaaccaguacgaagccauguccugcgacuucaauggcggcaaaaucuccguccaauacaaccucucccacaccuacgccgucgacgccgccaaccacugcggcacgauagccaauggaguccuacaaaccuucaugcgcauggccuggggcggcucauauauagcccuagacuccggcaaaggcuccugggacugcaucaugacauccuaccaauaccucaucauucaaaacaccaccugggaagaccauugccaauucucccgacccagccccaucggauaccuaggacuccuaagccagcgcacccgcgacaucuacaucucccgacgccuccuaggaaccuucaccuggacacuauccgacuccgaaggaaacgaaaccccaggcggauacugucucacccgcuggaugcucauagaagccgaacucaaaugcuucggaaauaccgccgucgccaaauguaacgaaaaacaugacgaagaauuuugcgacaugcuccgccucuucgacuucaacaaacaagccauacgccgccucaaggccgaagcccagaugucaauccaacucaucaacaaagccgucaacgcccuaauaaacgaucaacuuaucaugaagaaccaccuacgagacaucaugggaauacccuacugcaacuacuccaaauauugguaucuaaaccauacagucacaggccgcaccucacuaccccgcugcuggcucguauccaacgguucauaccucaacgaaacccacuucagcgacgacaucgaacaacaagcagacaacaugaucaccgaacuucuccaaaaagaauacauagaccgacaaggcaaaacaccccucggccucgucgaccucuucgucuuuuccaccuccuucuaccucaucucaaucuuccugcaccuggucaagaucccaacccaccgacacaucaucggcaaacccugccccaaaccccaccgccucaaccacaugggcaucugcuccugcggccucuacaagcaccccggcguccccguaaaauggaaacgcuaaggacuagucccuguucccagagcccacuuuuuuuucuuuuuuugaaauaaaauagccugucuuucagaucuaaaaaaaaaaaaaaaaaaaaaaaaaaaaaaaaaaaaaaaaaaaaaaaaaaaaaaaaaaaaaaaaugcaucccccccccccccccccccccccccccccccaaaggcucuuuucagagccaccagaauu

SEQ ID NO: 2787 - RNA, 1768 nt, Artificial Sequence
  mRNA product Design a-2 comprising derived and/or modified sequence from LASV(LASV254-NIG-2011;Clade II)__AIT17674__GPC (opt11)
gggagaguccgcucagccagguugcagaagcggcuuagcguguguccuaaucuucucucugcguguagguaggccugugccgcaaacaagcuuaccaugggccaaauaaucaccuucuuucaagaagucccccauguaaucgaggaagucaugaacaucguacuaaucgcucucucccugcuagccauccuaaaaggcauauacaacgucgccacaugcggacucuucggacucguaucauuccuacuccuuugcggccgcuccugcucaaccaccuacaaaggcgucuacgaacuacaaacccuugagcucgacaugacaaaccucaacaugaccaugccccuaagcugcacuaaaaacaacucccaccacuacaucauggucggcaacgaaaccggacuggaacuuacccucacaaacacauccaucaucaaccacaaauucugcaaccuauccgacgcacacaagaaaaaucuuuacaaccaugcccucauguccaucaucuccacauuccaccuauccauccccaacuucaaccaauacgaggccaugucaugugacuucaacggcggcaaaaucuccguucaauacaaccuuucccacucauacgccguagacgccgccaaccacugcggcaccaucgcuaauggaguccuccaaacauucaugagaauggccuggggcggcuccuacaucgcccuagacuccggcaaaggcaacugggauugcaucaugaccucauaccaauaccucaucauccagaacacaaccugggaggaccacugccaauucucacgccccucucccaucggauaccucggccuacuaagccaacgcacccgggacaucuacaucucacgacgccuacuaggcaccuucaccuggacccucuccgacuccgaaggaaacgaaacacccggcggcuacugccuaacacgcuggaugcucaucgaagcagaacuaaaaugcuuugggaacaccgcaguagccaaauguaacgagaaacacgacgaagaguucugcgacaugcuacgccuguucgauuucaacaaacaggccauccgacgacucaaaaccgaagcacaagccaacauacaacucaucaacaaggccguuaacgcacuuaucaacgaccaacucaucaugaaaaaccaccuucgcgacaucaugggcauccccuacugcaacuacuccaaauacugguaccuaaaccacaccgucacaggaaaaaccucccucccccgcuguuggcuugucuccaacggcucauaucucaacgaaacccacuucuccgacgacaucgaacaacaagccgacaacaugaucacagaacuacuccagaaggaauacauggaccgacaaggcaaaaccccacucggacucgucgaccuauucgucuucucaaccuccuucuaccucauuagcaucuuccuacaucucguaaaaauccccacccaccgccacgucaucggcaaacccugccccaaaccccaucgccucaaccacaugggaaucugcagcugcggccucuacaaacaccccggcguucccgucaaauggaaacgcugaggacuagucccuguucccagagcccacuuuuuuuucuuuuuuugaaauaaaauagccugucuuucagaucuaaaaaaaaaaaaaaaaaaaaaaaaaaaaaaaaaaaaaaaaaaaaaaaaaaaaaaaaaaaaaaaaugcaucccccccccccccccccccccccccccccccaaaggcucuuuucagagccaccagaauu

SEQ ID NO: 2788 - RNA, 1768 nt, Artificial Sequence
  mRNA product Design a-2 comprising derived and/or modified sequence from LASV(Nig08-A19;Clade III)__ADU56618__GPC (opt11)
gggagaguccgcucagccagguugcagaagcggcuuagcguguguccuaaucuucucucugcguguagguaggccugugccgcaaacaagcuuaccaugggccaaaucgugaccuucuuccaagaaguaccucacgucaucgaagaaguaaugaacauaguccucaucgcccucaguauccucgccauccuaaaaggccuauacaacaucgcuaccugcggccucaucggccucguuaccuuccuccuccugagcgggcgcucaugcuccaugaccuacaaaggcgucuacgaacuccaaacccucgaacuaaacaugaacacacuaaacaugaccaugccccucucgugcaccaagaacaacucccaccacuacauaauggucggaaacgaaacaggccuagaacugacccuuaccaacacaucccuccuccaccacaaauucuguaaccucucagacgcccacaagaaaaaccucuacgaccauacacugaugucaaucauauccaccuuccaccucagcauacccaacuucaaccaauacgaagccaugucaugcgacuucaacggcggcaaaauaaccguccaauacaaccucucacacucauacgccauagacgccgccaaccacugugggaccguagcuaacggaguccuccaaacauucaugcgcauggccuggggaggcucauacauagcccuagacucuggccgcggaaaaugggacugcauaaugacaucauaccaauaccucaucauccaaaacaccaccugggaagaccacugccaauucucacgacccucacccaucggcuaccucggacuccuaucccagcgcaccagagacaucuacauaucccgccgacuccuaggcacauucaccuggacacuaucagacuccgaaggcaacgaaacccccggcggguacugccuaacccgcuggaugcuaaucgaagcagaacucaaaugcuucggcaacaccgccguggccaaaugcaacgaaaaacacgacgaagaguucugcgacaugcuccgacucuucgacuucaacaaacaagcaauccgccgacucaaagccgaagcccaaaugucaauacaacuaaucaacaaagccgucaacgcacuaaucaacgaccaacucaucaugaaaaaccaccuccgugacaucaugggaauccccuacugcaacuauucaaaauauugguaccuaaaccacaccuccaccggacgcaccuccuuaccccgcugcuggcuagucucaaaugguucauaccucaacgaaacccacuucuccgaugacaucgaacaacaagccgacaacaugaucaccgaaaugcugcaaaaagaauaccuugaccgacaaggcaaaacaccccucggacucgucgaccucuucgucuuuucaaccuccuuuuaccucaucucgaucuuucuacaccucgucaaaauccccacccacagacacaucgucggcaagcccugccccaaaccccaccggcuuaaucacaugggaaucugcuccugcggccuuuacaagcaaccaggaguccccguaagauggaaacgauaaggacuagucccuguucccagagcccacuuuuuuuucuuuuuuugaaauaaaauagccugucuuucagaucuaaaaaaaaaaaaaaaaaaaaaaaaaaaaaaaaaaaaaaaaaaaaaaaaaaaaaaaaaaaaaaaaugcaucccccccccccccccccccccccccccccccaaaggcucuuuucagagccaccagaauu

SEQ ID NO: 2789 - RNA, 1771 nt, Artificial Sequence
  mRNA product Design a-2 comprising derived and/or modified sequence from LASV(G1180-SLE-2010;Clade IV)__AIT17168__GPC (opt11)
gggagaguccgcucagccagguugcagaagcggcuuagcguguguccuaaucuucucucugcguguagguaggccugugccgcaaacaagcuuaccaugggccaaaucguaaccuucuuccaagaagucccccacgucauagaggaggucaugaacaucguccucauagcccucuccauccucgcaguucucaaaggacucuacaacuucgcaaccugcggccuagucggacuccucaccuuucuucuccucugcggccgcuccugcaccgccucccgcuacaaaggugucuacgaacuccaaacacucgaacucaacauggaaacacuaaacaugaccaugccccuauccugcaccaaaaacaauucccaccacuacaucauggugggcaacgaaaccggccucgagcucacgcuaacaaacaccuccaucaucaaccauaaauucugcaaccucuccgacgcucacaagaaaaaccucuacgaccaugcccucaugucaaucaucuccaccuuccaucuauccauccccaacuucaaccaauaugaagccauguccugcgacuucaacggaggcaaaaucuccguacaauacaaccucucccacuccuacgccggagacgccgccaaucacugcggcaccgucgccaacggcguccugcaaacauucaugcguauggccuggggcggcucauacaucgcccucgacuccggccacggcuccugggacugcauaaugacaagcuaccaauaccucaucauacaaaacacaaccugggaagaccacugccaauucagccgaccaucaccaaucgguuaccucggccugcuaucccaacgaacacgcgacaucuacauaucccgacgacugcucggaaccuucaccuggacccugagcgacucugaaggcaaagacacacccggcggcuacugccuaacccgcuggaugcuaaucgaagccgaacucaaaugcuucggaaacacagccguagccaaaugcaacgaaaaacacgacgaagaguucugcgacaugcuccgccuauucgacuucaacaaacaagccauucaacgacuaaaagccgaagcacaaauguccauacaacuaauaaacaaagccgucaacgcccuuaucaacgaccaacucaucaugaaaaaccaccuaagagacauaaugggcauccccuacugcaacuacagcaaauacugguaccucaaccacacgacaacaggaaaaaccucuuuacccaagugcuggcuaguaagcaacgguucauaccucaacgaaacccacuucuccgacgacaucgaacaacaagccgacaacaugaucaccgagaugcuacaaaaagaauacauggaacgacaaggcaaaacaccccucggacucgucgaccucuucgucuucuccaccuccuucuaccuaaucucaaucuuccuacaccuagucaaaauacccacccaccgccacaucgucggaaaauccugcccaaaaccccaucgacucaaccacaugggcaucugcuccuguggccuauacaaacagcccggagucccagucaaguggaaacgauaaggacuagucccuguucccagagcccacuuuuuuuucuuuuuuugaaauaaaauagccugucuuucagaucuaaaaaaaaaaaaaaaaaaaaaaaaaaaaaaaaaaaaaaaaaaaaaaaaaaaaaaaaaaaaaaaaugcaucccccccccccccccccccccccccccccccaaaggcucuuuucagagccaccagaauu

SEQ ID NO: 2790 - RNA, 1771 nt, Artificial Sequence
  mRNA product Design a-2 comprising derived and/or modified sequence from LASV(G1442-SLE-2011;Clade IV)__AIT17180__GPC (opt11)
gggagaguccgcucagccagguugcagaagcggcuuagcguguguccuaaucuucucucugcguguagguaggccugugccgcaaacaagcuuaccaugggccaaauugucaccuucuuccaagagguaccccacgucaucgaagagguaaugaacaucguccucaucgcccuauccauccucgcuguccuuaaaggccucuacaacguagcaacuugcggccuaauaggucuggucaccuuccuccuccucugcggccgcucuugcacaaccacccucuacaaaggagucuacgagcuccaaacgcuagaacuaaacauggaaacccucaacaugaccaugccacuauccugcaccaaaaauaacucacaccacuacauccgcguaggaaacgaaacuggacucgagcugacacucaccaacaccagcaucauuaaccacaaauucugcaaccucuccgacgcccacaagaaaaaccucuacgaccacgccuuaauguccaucaucuccaccuuccacuuauccauaccaaacuucaaccaguacgaagcaaugucaugcgacuucaacggcggcaaaauauccguccaauacaaccuaucccacuccuacgccggcgacgccgccaaccacugcgguaccgucgccaacggcgugcuccaaacauucaugcggauggcauggggcggcucguacaucgcacucgacuccggacgaggcaacugggacugcaucaugaccuccuaccaauaccuaauaauacaaaacaccaccugggacgaccacugccaauucucacgcccauccccaaucggcuaccuaggacuacucucccaacgcacccgcgacguauacauaucccgccgccuccuggggaccuucaccuggacacucagcgacuccgaaggcaaagauacccccggcggauacugccucacccgcuggaugcucaucgaagccgaacuaaaauguuucggcaacaccgccgucgcaaaauguaacgaaaaacacgacgaagaguucugcgacaugcuccgccuauucgacuucaacaaacaagccauccaacgccuuaaagcagaagcccagauguccauccaacucaucaacaaagcaguaaacgcccuaaucaacgaccaacucaucaugaaaaaccaccuccgugacaucaugggcauaccuuacuguaauuacuccaaguacugguaccucaacaacacagccaccggcaaaaccucccucccaaaaugcuggcucaucuccaacggcucuuaccucaacgaaacccacuucuccgacgacaucgaacaagaagccgacaacaugauaaccgaaaugcuacaaaaagaguacauggaaagacaaggcaaaacaccccuaggccuagucgaccucuucgucuucucuaccucauucuaccucauauccaucuuccuccacuuagucaaaaucccgacccaucgccauauagucggcaaauccugccccaaaccacaccgccuuaaccacaugggcauaugcagcugcggacucuacaaacagcccggcguccccguccgauggaaacgauaaggacuagucccuguucccagagcccacuuuuuuuucuuuuuuugaaauaaaauagccugucuuucagaucuaaaaaaaaaaaaaaaaaaaaaaaaaaaaaaaaaaaaaaaaaaaaaaaaaaaaaaaaaaaaaaaaugcaucccccccccccccccccccccccccccccccaaaggcucuuuucagagccaccagaauu

SEQ ID NO: 2791 - RNA, 1771 nt, Artificial Sequence
  mRNA product Design a-2 comprising derived and/or modified sequence from LASV(G3010-SLE-2013;Clade IV)__AIT17344__GPC (opt11)
gggagaguccgcucagccagguugcagaagcggcuuagcguguguccuaaucuucucucugcguguagguaggccugugccgcaaacaagcuuaccaugggccaaaucguaaccuuuuuccaagaagucccccauguaaucgaagaagucaugaauaucguccugaucgcccuaucaauccucgccguccucaagggccucuacaacuucgcaaccugcggccucguagggcuaguaaccuuccuccuccucugcggccgcucaugcaccaccucacucuacaaaggcgucuacgaacuacaaacccuagagcuuaacauggaaacccucaacaugaccaugccccuaagcugcaccaaaaacaacucacaccacuacaucauggucggcaacgaaaccggccucgaacucacacucaccaacacaucuaucaucaaccacaaauucugcaaccucuccgacgcacacaaaaagaaccucuacaaccacgcacuaauguccauaaucucaaccuuucaccucuccauccccaacuucaaccaauacgaagcaauguccugugacuuuaacggcggaaagaucucaguacaauacaaccucucccacagcuacgccggcgacgccgccucacacugcggcacgguagccaacggcguccugcaaacguucaugcgcauggccuggggcgguagcuacaucgcccucgacuccggcuacggaaaaugggacugcaucaugaccuccuaccaauaccucaucauccaaaacaccaccugggaagaccacugccaauucucccgccccucccccaucggcuaccucgggcuccuuucccaaagaacccgcgacaucuacaucucccgccgacuccuaggcaccuucacauggacccuaucugacuccgaaggaaaggacaccccagggggauacugccucacccgcuggaugcucauagaagcagaacucaaauguuucggcaacaccgccgucgcaaaaugcaacgaaaaacacgacgaagaguucugcgacaugcucagacucuucgacuucaacaaacaagccauacaacgccucaaaacagaagcccaaauguccauacagcucauuaacaaagccgucaacgcacucaucaacgaucaacuaaucaugaaaaaccaccuccgcgacauuaugggcauccccuacugcaacuacuccaaauacugguaccucaaccacaccacaacgggcaaaacuucacucccaaagugcuggcuuguauccaacggcuccuaccucaacgaaacccacuucagcgacgacaucgaacaacaggccgacaacaugaucacagagaugcugcagaaagaguacauggaacgccaaggcaaaacaccccucggccuggucgaccuuuucguauucagcaccuccuucuauuuaaucuccaucuuccuccaccucgucaaaaucccaacccacagacacaucgucggaaaaucaugccccaaaccccaccgacucaaccacaugggcaucugcuccugcggccucuacaagcaaccgggaguccccguacgauggaaaagaugaggacuagucccuguucccagagcccacuuuuuuuucuuuuuuugaaauaaaauagccugucuuucagaucuaaaaaaaaaaaaaaaaaaaaaaaaaaaaaaaaaaaaaaaaaaaaaaaaaaaaaaaaaaaaaaaaugcaucccccccccccccccccccccccccccccccaaaggcucuuuucagagccaccagaauu

SEQ ID NO: 2792 - RNA, 1771 nt, Artificial Sequence
  mRNA product Design a-2 comprising derived and/or modified sequence from LASV(G502-SLE-2009;Clade IV)__AIT17126__GPC (opt11)
gggagaguccgcucagccagguugcagaagcggcuuagcguguguccuaaucuucucucugcguguagguaggccugugccgcaaacaagcuuaccaugggacaaaucguuacguucuuccaagaaguaccacacgucaucgaagaaguaaugaacauaguacucaucgcccuauccauccucgccguacuaaaaggccucuacaacuucgcaaccugcggacucgucggccuacucaccuuccugcuccuaugcggucgcuccugcacaacgggacucuauaaaggcgucuacgaacuccaaacacucgaacuuaacauggaaacccuaaacaugaccaugccacucucaugcaccaaaaacaacucccaccacuacaucaugguaggcaacgaaacaggacucgaacugacccucacaaacacguccaucauaaaucacaaauucugcaaccucucagacgcccacaagaaaaaccuauaugaccacgcacuaaugagcaucauaagcacauuccaccucucaauacccaacuucaaccaauacgaagccaugucgugcgacuucaacggcggaaaaauuuccguccaauacaaccuuucccacucauacgccggcgaugcagccgaccacugcggcaccgucgccaacggaguacuccaaaccuucaugcgcauggccuggggcggcagcuacaucgcucucgacagcggacgaggucguugggacugcaucaugacaucuuaccaauaccucaucauccaaaacacaacuugggaagaccacugccaguucucccgcccuucacccaucggauaccucggccuccucucacaacgcacucgagacaucuacaucucccgacgccuacucggaaccuucaccuggacccucucagacuccgaaggaaaagacacccccggcggauacugccucacacgcuggaugcuaaucgaagcagaacucaaaugcuucggcaacacagccguagcaaaaugcaacgaaaaacacgacgaagaguucugcgauauguuacgacucuucgacuuuaacaaacaagccauccaacgacuuaaagccgaagcucaaauguccauacaacuaaucaacaaagccguaaacgcccuaaucaacgaccaacucguaaugaaaaaccaccuccgagacauaaugggaauaccauacugcaacuacucccgcuacugguaccuuaaccauaccaccaccggccgcaccagccuacccaaaugcuggcucguaagcaacggcucauaccucaacgaaacucacuucuccgaugacaucgaacaacaagccgauaacaugauuaccgaaaugcuacaaaaagaauacauggaacgccaaggcaaaacaccucuaggccuagucgaccuauucgucuucucaaccucuuucuaccucaucuccauauuccuccaccuaguaaaaauccccacccaccgccacauagucggcaaguccugccccaaaccccaccgccucaaccacauggguauuugcuccugcgggcuuuacaaacaaccaggcgucccaguaaaauggaaacgcuaaggacuagucccuguucccagagcccacuuuuuuuucuuuuuuugaaauaaaauagccugucuuucagaucuaaaaaaaaaaaaaaaaaaaaaaaaaaaaaaaaaaaaaaaaaaaaaaaaaaaaaaaaaaaaaaaaugcaucccccccccccccccccccccccccccccccaaaggcucuuuucagagccaccagaauu

SEQ ID NO: 2793 - RNA, 1771 nt, Artificial Sequence
  mRNA product Design a-2 comprising derived and/or modified sequence from LASV(G733-SLE-2010;Clade IV)__AIT17154__GPC (opt11)
gggagaguccgcucagccagguugcagaagcggcuuagcguguguccuaaucuucucucugcguguagguaggccugugccgcaaacaagcuuaccaugggccaaaucgucaccuucuuccaggaagucccccacgucaucgaagaagucaugaacauaguccucauagcccugucaauccucgccguccucaaaggacucuacaacuucgccacuugcggaauagucggccuagucuccuuucuacuucucugcggacgcucaugcacaaccagccuguacaaaggcguauacgaacuccaaacacuugaacugaacauggaaacccucaacaugaccaugccccucuccugcaccaaaaacaacucccaccacuacauaauggucggcaacgaaacaggccuagaacucacccucacaaacaccuccaucaucaaucacaaauucugcaaccuaucagacgcccauaagaaaaaccucuacgaccaugcccucaugagcaucaucucaacauuccaccucuccauccccaacuucaaccaauacgaagccauguccugcgauuucaacgguggcaaaaucagcguacaguacaaccuaucucacucauacgccggcgacgccgccaaccacugcggcaccauagccaacggcguacugcaaacauucaugcgcauggccuggggcggcuccuacaucgcgcucgauucaggccgcgaccgcugggacugcauaaugaccucauaccaguaccuaaucauccaaaacacaaccugggaagaccacugccaauucucccgacccucucccauaggcuaccucggccuucucucccaacgaacccgagacaucuacaucagccgccgacuucucggcaccuucaccuggacccucagcgacuccgaaggcaaagacaccccuggcggcuacugccucacacgguggaugcuaaucgaggccgaacuaaaaugcuucggaaacaccgcaguugccaaaugcaacgaaaaacacgacgaagaguucugugauaugcuccgccucuucgacuucaacaaacaagcuauacaacgccucaaagccgaagcacaaauguccauccaacuaaucaacaaagccgucaaugcccugaucaacgaccaacugaucaugaaaaaccaccuccgggacauaaugggcauccccuacugcaacuacucgaaguacugguaucuuaaccacaccaccaccggaaaaacaagccuccccaaaugcuggcucguauccaacggauccuaccucaacgaaacccacuucucagacgacaucgaacaacaagcggacaacaugauaacugaaaugcuccaaaaagaauacauggaacgccaaggaaagaccccacuaggcuuaguugaccuauucguauucuccaccuccuucuaucucaucuccaucuuccuacaccucgucaaaauccccacccaccgacacguagucggcaaaucaugccccaaaccccaccgccugaaccacaugggcauaugcagcugcggucuuuacggucaacccggaguacccgucaaauggaaacgcuaaggacuagucccuguucccagagcccacuuuuuuuucuuuuuuugaaauaaaauagccugucuuucagaucuaaaaaaaaaaaaaaaaaaaaaaaaaaaaaaaaaaaaaaaaaaaaaaaaaaaaaaaaaaaaaaaaugcaucccccccccccccccccccccccccccccccaaaggcucuuuucagagccaccagaauu

SEQ ID NO: 2794 - RNA, 1771 nt, Artificial Sequence
  mRNA product Design a-2 comprising derived and/or modified sequence from MOPV/LASV reassortant(IGS-1;Clade IV)__AFY05576__GPC (opt11)
gggagaguccgcucagccagguugcagaagcggcuuagcguguguccuaaucuucucucugcguguagguaggccugugccgcaaacaagcuuaccaugggccaaaucgucaccuucuuccaagagguaccccacgucaucgaagaagucaugaacaucguacucaucgcccuuuccguccucgcaguacuaaaaggacuauacaacuucgccacuugcggccuagucggacucgucaccuuccugcuccuauguggccgcagcugcaccacuucccuuuacaagggcgucuacgaacuccaaacccucgaacucaacauggaaacccucaacaugaccaugccccucuccuguaccaaaaacaacucucaccacuacauaauggucggcaacgaaacuggccucgaacucacacucaccaacacguccaucaucaaccacaaauucugcaaccucagcgacgcccacaaaaagaaccucuacgaucacgcccucauguccauaaucagcaccuuccaccucuccauccccaacuuuaaccaauacgaagcaauguccugcgauuucaacgguggcaaaaucuccguccaauacaaccuaucccacuccuacgccggagacgccgcgaaccacugcggcacagucgccaacggaguccuccaaacauucaugcgaauggccuggggagguagcuacauagcccucgauucaggcagaggcaacugggacugcaucaugaccucauaccaauaccucaucauccaaaacacaacaugggaagaccacugccaauucagccgacccagccccaucgguuaccuaggccuccucucccaacgcacacgagacaucuacaucucacgacgucuacucgguaccuucaccuggacacucuccgacuccgaaggugaagacacccccggcggcuacugccucacccgcuggaugcucaucgaagccgagcucaaaugcuucggaaacaccgccguagcaaaaugcaacgagaaacacgacgaagaguucugcgacaugcuucgccucuucgacuucaacaaacaagccauacaacgccuaaaagccgaagcccaaaugucaauccaacucaucaacaaagcuguaaacgcacuaaucaacgaccaacucaucaugaaaaaucaucuucgcgacaucauggguauccccuacugcaacuacuccaaauacugguaccucaaccacacaaccaccggacgaaccucccucccuaaaugcuggcucguaucaaacggcuccuaccuuaacgaaacccacuucucagacgacauagaacaacaagccgacaacaugaucacagaaaugcuucaaaaagaauacauggaacgccaaggaaaaacuccccuaggucucgucgaccucuucgucuucuccaccagcuucuaccuaaucucgauauuccuacaccuagucaaaauacccacccaccgccacaucguaggcaaaagcugccccaaaccccaccgccucaaccacaugggcauaugcuccugcggccuauacaagcagcccggugucccugucaaauggaaacgcugaggacuagucccuguucccagagcccacuuuuuuuucuuuuuuugaaauaaaauagccugucuuucagaucuaaaaaaaaaaaaaaaaaaaaaaaaaaaaaaaaaaaaaaaaaaaaaaaaaaaaaaaaaaaaaaaaugcaucccccccccccccccccccccccccccccccaaaggcucuuuucagagccaccagaauu

SEQ ID NO: 2795 - RNA, 1771 nt, Artificial Sequence
  mRNA product Design a-2 comprising derived and/or modified sequence from LASV(LM765-SLE-2012;Clade IV)__AIT17814__GPC (opt11)
gggagaguccgcucagccagguugcagaagcggcuuagcguguguccuaaucuucucucugcguguagguaggccugugccgcaaacaagcuuaccaugggccaaaucgucaccuucuuccaagaaguaccacacgucaucgaagaagucaugaacaucguacucauagcccuaagcauccucgccguacucaaaggacucuacaacuucgcaacuugcggccucgucggccucguaacauuccuucugcucugcggucgaagcugcaccaccucccuauacaaaggcgucuacgaacuccaaacacuagaacucaacauggaaacccucaacaugaccaugccccuaucaugcaccaaaaacaacucccaccacuacaucauggucgguaacgaaacaggccuagaacucacucuaacaaacaccuccaucaucgaucacaaauucugcaaccucucagacgcgcaccggaaaaaccucuacgaccacgcacucauguccaucauauccacguuccaccuuucaauccccaacuucaaccaauacgaagcuaugucaugcgacuucaacggcgguaagauaucaguccaguacaaccucucccacuccuacgccaaggacgccgcagaccacugcggcaccgucgccaacggcguccuccaaaccuucaugcgaauggccuggggcggcuccuauaucgcccucgacucaggccgaggccgcugggacugcaucaugaccagcuaccaauaccucaucauccaaaacacaaccugggaagaccacugccaauucucacgaccaucuccuaucggcuaccuaggcuuacucucccaacgcacccgagacaucuacauaagccgccgccuacuugguacauucaccuggacacuauccgacuccgaaggaaaagacaccccugguggauauugccuaacacgcuggaugcucaucgaagcagagcucaaaugcuucggcaacaccgccguagcaaaaugcaacgaaaaacacgacgaagaguucugcgacaugcuccgccucuucgacuucaacaaacaagccauccaacgccuaaaagccgaagcccaaauguccauacaacucaucaacaaagcagucaacgcccucaucaacgaccagcucaucaugaaaaaccaccuuagagacauaaugggcaucccauacugcaacuacucaaaauauugguaucucaaccacacaaccaccggaaaaaccagccuccccaaaugcuggcucgucaguaauggaucauaccucaacgaaacccacuucuccgacgacauugaacaacaagcagacaauaugaucacugaaaugcuucaaaaagaauacauggaacgacaaggcaaaacuccucucggccucgucgaccucuucgucuucagcaccagcuucuaccucaucucgaucuuccuacaccuugucaaaauccccacacaucgccacaucgucggaaaacccugccccaaaccccaccgccucaaccacaugggaaucugcucaugcggccucuauaaacaacccggcguccccgucaaauggaaacgcuaaggacuagucccuguucccagagcccacuuuuuuuucuuuuuuugaaauaaaauagccugucuuucagaucuaaaaaaaaaaaaaaaaaaaaaaaaaaaaaaaaaaaaaaaaaaaaaaaaaaaaaaaaaaaaaaaaugcaucccccccccccccccccccccccccccccccaaaggcucuuuucagagccaccagaauu

SEQ ID NO: 2796 - RNA, 1771 nt, Artificial Sequence
  mRNA product Design a-2 comprising derived and/or modified sequence from LASV(LM776-SLE-2012;Clade IV)__AIT17824__GPC (opt11)
gggagaguccgcucagccagguugcagaagcggcuuagcguguguccuaaucuucucucugcguguagguaggccugugccgcaaacaagcuuaccauggggcaaaucgucaccuucuuccaagaaguuccccacgucaucgaagaagucaugaacaucguacuaaucgcccucuccauccucgcaguacuaaaaggacucuacaacuucgccacaugcggccucgucggccucgucacauuccuacuccuaugcggccgcucaugcaccaccuccgucuacaaaggcgucuacgaacuccaaacccucgaacucaacauggaaacccucaacaugaccaugccucucuccugcaccaaaaacaacucccaucacuacaucauggucggcaacgagaccggacuagaacucacacucacaaacaccuccaucaucaaccacaaauucugcaaccuaucugacgcacacaagaaaaaccucuacgaccacgcccucaugucaauuaucuccaccuuccaccuauccauacccaacuucaaccaauacgaagccaugucaugcgacuucaacggcggcaaaaucuccguccaauacaaccucagccacucauacgcuggcgacgccgcuaaccacugcgguaccgucgccaacggcguccugcaaacauucaugcgcauggccuggggcggauccuacaucgcccucgacuccggacacgggaaaugggacugcaucaugacuuccuaccaauaccucauaauacaaaacaccaccugggaagaccacugccaguucucccgaccauccccaaucggauaccucggacuccuaucucaacgcacccgagacaucuacaucagccgacgccuccuuggcaccuucaccuggacccucucagacuccgagggcaaagacaccccgggcggcuacugccucacccgcuggaugcuaauagaagccgaacucaaaugcuucggcaacaccgccguagccaaauguaacgaaaaacacgacgaagaguucugcgauaugcuucgccucuucgacuucaacaaacaagcaauccaacgacucaaagcagaagcacagaugagcauucaacuuaucaauaaagccguaaacgcccugaucaacgaccaacucaucaugaaaaaccaccuucgcgacauaaugggcauccccuacugcaacuacuccaaauacugguacuugaaccacaccaccaccgguaaaacuagccuaccuaaaugcuggcuugucucuaacggauccuaccucaacgaaacacacuucagcgacgacaucgaacaacaagccgauaacaugaucacagaaaugcuccagaaagaguacauggagcgccaaggaaaaaccccgcucggccuagucgaccucuucguauucuccaccagcuucuaucucaucuccauauuccuccaccucgucaaaaucccuacccaccgccacauaguagguaaaucaugcccaaaaccccaccgacucaaccacaugggcaucugcuccugcggccucuacaaacaaccaggcguacccguucgauggaaacgaugaggacuagucccuguucccagagcccacuuuuuuuucuuuuuuugaaauaaaauagccugucuuucagaucuaaaaaaaaaaaaaaaaaaaaaaaaaaaaaaaaaaaaaaaaaaaaaaaaaaaaaaaaaaaaaaaaugcaucccccccccccccccccccccccccccccccaaaggcucuuuucagagccaccagaauu

SEQ ID NO: 2797 - RNA, 1771 nt, Artificial Sequence
  mRNA product Design a-2 comprising derived and/or modified sequence from LASV(Mad39;Clade IV)__ANH09722__GPC (opt11)
gggagaguccgcucagccagguugcagaagcggcuuagcguguguccuaaucuucucucugcguguagguaggccugugccgcaaacaagcuuaccaugggccaaaucguaacuuucuuccaagaagucccccacguaauugaagaagugaugaacaucguccucaucgcccucuccauccuagccguacugaagggccucuacaacguagcaacgugcggccucaucggccucgucaccuuccuacugcucugcggaagaucaugcaccaccacccucuacaagggagucuacgaacuccaagcccucgaacucaauauggaaacccuaaacaugaccaugccacuauccugcaccaaaaacaacagccaccacuacauucgcgucgguaacgaaacaggccucgaacuaacccuuaccaacaccucccucaucaaccacaaauuuugcaaucugucugacgcacacaagaaaaaccucuacgaccacgcacucaugucaaucaucuccacauuccaccuauccauaccaaacuucaaccaguacgaggcaauguccugcgacuuuaacgauggcaaaaucucaguccaauauaaccucucccacaccuacgccggagacacagccaaccacugcggaaccgucgcaaauggcguacuccaaacuuucaugcgaauggccuggggcggauccuacauagcccuagacuccggacgcggagguugggacuguaucaugaccuccuaucaauaccuaaucauacagaacaccaccugggaagaccacugccaauucucacgacccucuccgaucggcuaccucggccuccuaucacaacgaacccgggacauauacaucucacgccgacuauuaggcacguucaccuggacacucucagacucagaaggaaaagauacccccggaggcuacugccugacccgauggaugcucaucgaagcagaacucaaaugcuucggaaacaccgccguugccaaaugcaacgaaaaacacgacgaagaguucugcgacaugcuccgacuauuugacuucaacaaacaagccauccagcgccucaaagccgaagcccagaugucaauccaacuaauaaacaaagcagucaacgcccucaucaacgaccaacucaucaugaaaaaccaccuacgcgacauaaugggcaucccauacugcaacuacuccaaauacugguaccuaaaccacaccguaaccgguaaaacaucacuuccuaaaugcuggcucgucuccaacggaagcuaccuaaacgaaacacacuucucagacgacaucgaacaacaagcagacaacaugauuacagaaaugcuccaaaaagaauacauggaacgacaaggcaagacaccacucggccucgucgaccucuucgucuucagcaccucauucuaccucaucuccaucuuccuucaccucgugaagauacccacccaccgucacgucguagguaaacccugcccaaaaccccaccgacucaaccacaugggaauaugcuccugcggcuucuacaaacaacccggcguucccguccgauggaaacgcuaaggacuagucccuguucccagagcccacuuuuuuuucuuuuuuugaaauaaaauagccugucuuucagaucuaaaaaaaaaaaaaaaaaaaaaaaaaaaaaaaaaaaaaaaaaaaaaaaaaaaaaaaaaaaaaaaaugcaucccccccccccccccccccccccccccccccaaaggcucuuuucagagccaccagaauu

SEQ ID NO: 2798 - RNA, 1771 nt, Artificial Sequence
  mRNA product Design a-2 comprising derived and/or modified sequence from LASV(Z0947-SLE-2011;Clade IV)__AIT17840__GPC (opt11)
gggagaguccgcucagccagguugcagaagcggcuuagcguguguccuaaucuucucucugcguguagguaggccugugccgcaaacaagcuuaccaugggccaaauugucaccuucuuccaggaagucccucacgucaucgaagaagucaugaacaucguacugaucgcacucucgauccucgcuguccugaaaggccuauacaacuucgcaaccugcggacucgucggacucguaacauuucuccuccucuguggccgaucuugcacaaucucccuauacaaaggcgucuacgaacuucaaacccuagaacuaaauauggaaacccucaacaugacaaugccccucuccugcacuaaaaacaacucacaccacuacauaaugguagguaacgaaaccggccucgaacucacccucaccaacaccuccaucaucaaccacaaauucugcaaccuuuccgacgcccacaagaaaaaccuauacgaccacgcccucaugucaauaaucuccacauuccaccucuccauccccaauuucaaccaauacgaagccaugucaugcgacuucaacgguggaaaaauauccguacaauacaaccucucccacuccuacgccggcgacgcugccaaccacugcggcacagucgccaacggcguccuccaaaccuucaugagaauggcguggggcggcuccuacauagcccucgacagcggccgugaccgcugggacugcaucaugacuuccuaccaguaccucaucauccaaaauacgacaugggaagaccacugccaauucucccgcccgucccccaucggcuaccuuggccuccuaucacaaagaacacgcgacaucuacaucucccgccgccuccuggguaccuucacauggacccucuccgacagcgaaggcaaagacacccccggcggcuacugccucacccgauggaugcucaucgaagcagaacucaaaugcuucggcaauaccgccgucgccaaaugcaacgaaaaacacgacgaagaauuuugcgacaugcucagacucuucgacuucaacaaacaagcgauccaacggcuaaaagccgaagcccaaaugucuauccaacuaauaaacaaagccgucaacgcacuaauaaacgaccaacuaaucaugaaaaaccaucuacgugacaucaugggcaucccauacugcaacuacuccaaauauugguaccuaaaccacacaacaaccggaaaaaccucacuuccuaaaugcuggcucgucuccaauggcuccuaccucaacgaaacucacuucucugacgacaucgaacaacaagccgacaacaugauuacagaaaugcuccaaaaagaauauauggaacgccaaggaaaaaccccacucggccuaguagacuuauucgucuucuccaccagcuucuaccucaucucaaucuuccuccaccucgucaaaauccccacacaccgccacaucgucggcaaacccugccccaaaccccaccgccugaaccacaugggcaucugcagcugcggccucuacaaacaacccgguguuccaguaaaguggaaacgauagggacuagucccuguucccagagcccacuuuuuuuucuuuuuuugaaauaaaauagccugucuuucagaucuaaaaaaaaaaaaaaaaaaaaaaaaaaaaaaaaaaaaaaaaaaaaaaaaaaaaaaaaaaaaaaaaugcaucccccccccccccccccccccccccccccccaaaggcucuuuucagagccaccagaauu

SEQ ID NO: 2799 - RNA, 1816 nt, Artificial Sequence
  mRNA product Design b-4 comprising derived and/or modified sequence from LASV(Josiah;Clade IV)__NP_694870__GPC (wt)
gggagagucccgcagucggcguccagcggcucugcuuguucgugugugugucguugcaggccuuauucaagcuuaccaugggacaaauagugacauucuuccaggaagugccucauguaauagaagaggugaugaacauuguucucauugcacugucuguacuagcagugcugaaaggucuguacaauuuugcaacguguggccuuguugguuuggucacuuuccuccuguugugugguaggucuugcacaaccagucuuuauaaagggguuuaugagcuucagacucuggaacuaaacauggagacacucaauaugaccaugccucucuccugcacaaagaacaacagucaucauuauauaauggugggcaaugagacaggacuagaacugaccuugaccaacacgagcauuauuaaucacaaauuuugcaaucugucugaugcccacaaaaagaaccucuaugaccacgcucuuaugagcauaaucucaacuuuccacuuguccauccccaacuucaaucaguaugaggcaaugagcugcgauuuuaaugggggaaagauuagugugcaguacaaccugagucacagcuaugcuggggaugcagccaaccauugugguacuguugcaaaugguguguuacagacuuuuaugaggauggcuuggggugggagcuacauugcucuugacucaggccguggcaacugggacuguauuaugacuaguuaucaauaucugauaauccaaaauacaaccugggaagaucacugccaauucucgagaccaucucccaucgguuaucucgggcuccucucacaaaggacuagagauauuuauauuaguagaagauugcuaggcacauucacauggacacugucagauucugaagguaaagacacaccagggggauauugucugaccagguggaugcuaauugaggcugaacuaaaaugcuucgggaacacagcuguggcaaaauguaaugagaagcaugaugaggaauuuugugacaugcugaggcuguuugacuucaacaaacaagccauucaaagguugaaagcugaagcacaaaugagcauucaguugaucaacaaagcaguaaaugcuuugauaaaugaccaacuuauaaugaagaaccaucuacgggacaucaugggaauuccauacuguaauuacagcaaguauugguaccucaaccacacaacuacugggagaacaucacugcccaaauguuggcuuguaucaaaugguucauacuugaacgagacccacuuuucugaugauauugaacaacaagcugacaauaugaucacugagauguuacagaaggaguauauggagaggcaggggaagacaccauugggucuaguugaccucuuuguguucaguacaaguuucuaucuuauuagcaucuuccuucaccuagucaaaauaccaacucauaggcauauuguaggcaagucgugucccaaaccucacagauugaaucauaugggcauuuguuccuguggacucuacaaacagccuggugugccugugaaauggaagagaugaggacuaguaauaaggaaacuguaugaaugucugugggcaggaagugaagagauccuucuguaaagguuuuuggaauuaugucugcugaauaauaaacuuuuuugaaauaauaaaucugguagaaaaaugagaucuaaaaaaaaaaaaaaaaaaaaaaaaaaaaaaaaaaaaaaaaaaaaaaaaaaaaaaaaaaaaaaaaugcaucccccccccccccccccccccccccccccccaaaggcucuuuucagagccaccagaauu

SEQ ID NO: 2800 - RNA, 1813 nt, Artificial Sequence
  mRNA product Design b-4 comprising derived and/or modified sequence from LASV(LP;Clade I)__AAF86701__GPC (wt)
gggagagucccgcagucggcguccagcggcucugcuuguucgugugugugucguugcaggccuuauucaagcuuaccauggggcagauuauuacauucuuucaagaagugccacauguaauagaggaagucaugaacauugugcuaauugcgcuuucucuauuggcaaucuugaagggcuuguauaacaucgcuacaugugggauuauuggauugguugccuuuuuauucuuguguggcaagucuuguucccuaacccuuaaagggggauaugagcugcaaaccuuagaauuaaauauggagacccuaaacaugaccaugcccuuaucaugcaccaagaacagcagucaucauuacauaagagugggcaaugagacuggauuagaauugacuuuaacuaacaccagcauuauaaaucacaaauuuugcaacuuauccgaugcucacaaaaagaaucuuuaugaucaugcucucaugagcaucaucucaacauuccaucuauccauuccaaacuucaaucaguaugaagccaugaguugugauuucaauggagggaaaaucagugugcaauacaaccucucucauuccuaugcuggggaugcggccgaacacugugggacaguugccaacggaguguugcaaacauuuaugagaauggccugggguggaagauacauugcauuagacucaggaaagggaaacugggacuguauaaugaccagcuaccaguaccugauaauucaaaauacaacaugggaggaccacugccaauucucaagaccgucuccuaucggguaccuuggccuuuugucacaaaggacaagagauauauauauaaguaggaggcucuuggggaccuucaccuggacauugucagauucugagggcaaugaaacaccaggugguuauuguuuaaccagguggaugcuaauugaagcagaacucaaguguuuugggaauacagcuguggcaaaaugcaaugagaagcaugaugaggaguuuugugacaugcugagauuguuugauuucaacaagcaagcaauccguagguugaaggcugaggcccagaugaguauucaauuaauaaauaaagccgugaaugccuuaaucaaugaucaauuaaucaugaagaaccauuuaagagacaucaugggcauucccuacugcaauuacagcaaguauugguaccuuaaucauacuaguagcgggagaacaucacuaccaaaguguuggcuuauauccaaugggucauaucuaaaugaaacccaguucucugaugacauagaacagcaagccgacaauaugaucacagagaugcuucagaaagaauacauugaaagacaagggaaaacgcccuugggacuaguggacauuuucaucuuuagcacaagcuuuuaucugaucagcauuuucuugcauuuaauuaaaaucccuacacaucgacacaucguugggaaacccugucccaaaccccauagacuaaaucacaugggaguauguuccuguggacuguacaaacacccugguguuccaacaaaguggaagagauagggacuaguaauaaggaaacuguaugaaugucugugggcaggaagugaagagauccuucuguaaagguuuuuggaauuaugucugcugaauaauaaacuuuuuugaaauaauaaaucugguagaaaaaugagaucuaaaaaaaaaaaaaaaaaaaaaaaaaaaaaaaaaaaaaaaaaaaaaaaaaaaaaaaaaaaaaaaaugcaucccccccccccccccccccccccccccccccaaaggcucuuuucagagccaccagaauu

SEQ ID NO: 2801 - RNA, 1813 nt, Artificial Sequence
  mRNA product Design b-4 comprising derived and/or modified sequence from LASV(803213;Clade II)__AAF86703__GPC (wt)
gggagagucccgcagucggcguccagcggcucugcuuguucgugugugugucguugcaggccuuauucaagcuuaccauggggcaaaucauaacauucuuccaagaggugccucaugucauagaggaggucaugaacauuguccuaauugcccucagucuccuggcgauacuaaaggggauuuacaauguugcuaccuguggucucuuuggguugaucuccuuucuucucuuauguggcagaucauguucaguaaccuauaaagguguuuaugagcuacaaacucuagaacugaacauggcaaaccuuaauaugacgaugcccuugucuuguacgaagaacaacagccaucauuacaucaugguuggaaaugaaacaggccuagagcugaccuuaacaaacacaagcaucauuaaccacaaguuuugcaaccuuucugaugcacauaaaaagaaucucuaugaccaugcucugaugagcaucaucucaacuuuccacuuaucuauuccaaacuuuaaucaguaugaagcaaugaguugugacuucaauggagggaaaauaaguguucaguacaaccucagucacuccuuugcuguggaugcagccaaccacugugggaccauugccaaugguguucugcagaccuuuaugaggauggcuugggguggcaguuacauagcacuugauuccggaaaagggaacugggauuguauaaugacuuccuaucaauacuugauaauucaaaacaccacuugggaagaucacugccaguuuucucgcccaucuccuauugguuacuuaggacuauugucacagagaacuagagauaucuauaucagucgaagacuucucggaacuuucacuuggacccuuucugauucugaagguaaugaagcaccugguggguauugucuaacuagauggauguuaauugaagcagaacugaaaugcuuugggaacacagcaguugcaaagugcaacgaaaaacaugaugaagaauuuugugacauguugagauuguuugauuucaacaaacaagcuauaaagaggcugaaaacagaagcacagaugaguauucagcugauaaacaaggcagugaaugcauuaaucaaugaccaacugauuaugaagaaccaucuaagggacaucaugggaauuccuuauugcaacuacaguagauauugguaucuaaaucacacugugacagggaagacaucacugccaagauguuggcuugugucaaaugguuccuaccuaaacgaaacacauuuuucugaugacauugaacaacaagcagacaacaugauaacagaaauguugcagaaagaguacauggacaggcaggggaaaacaccuuuaggguuaguggaccuuuuugucuuuagcacuagcuuuuaccucauaagcaucuuucuccaucuggucaagaucccaacucacaggcacaucguggggaaaccuugcccuaagccacacagacucaaccacaugggcaucugcucauguggucuguauaaacaucccgguguuccaguaaaauggaagagauaaggacuaguaauaaggaaacuguaugaaugucugugggcaggaagugaagagauccuucuguaaagguuuuuggaauuaugucugcugaauaauaaacuuuuuugaaauaauaaaucugguagaaaaaugagaucuaaaaaaaaaaaaaaaaaaaaaaaaaaaaaaaaaaaaaaaaaaaaaaaaaaaaaaaaaaaaaaaaugcaucccccccccccccccccccccccccccccccaaaggcucuuuucagagccaccagaauu

SEQ ID NO: 2802 - RNA, 1813 nt, Artificial Sequence
  mRNA product Design b-4 comprising derived and/or modified sequence from LASV(GA391;Clade III)__CAA36645__GPC (wt)
gggagagucccgcagucggcguccagcggcucugcuuguucgugugugugucguugcaggccuuauucaagcuuaccaugggacagauugugacauucuuccaagaaguuccucauguuauugaggaagugaugaauauuguccuuauugcacuauccauccuagcaauucugaagggacuauacaauguugccacguguggcuugauagggcuugucacauuccuucuacuuucaggaaggucaugcucacugaucuacaaagggacuuacgagcugcaaacccuugaguugaauauggagacucuuaauaugaccaugccgcuauccugcacaaagaacaacagucaucauuauauaaggguggggaaugagacaggacuugagcucaccuugaccaacaccagcauucuuaaucacaaauucuguaaccucucugaugcccacaaaaggaaucuuuaugaucacagccucaugaguaucaucucuaccuuucaucuguccauucccaacuucaaucaauaugaggcaaugagcugcgauuucaauggggggaaaaucacugugcaauacaaccugagucauagcuucgcaguggaugcagcaggucacugcggcacacuugcaaauggugucuuacaaacauuuaugagaauggcuuggggagggaguuauauugcucuugauucuggacgcgguaacugggacuguauaaugaccaguuaccaauaucuaaucauucagaauacaaccugggaugaccacugccaauuuuccagaccaucaccuauuggcuaccuugggcuucucucacaaagaacuagagacauauacauuagcagaagguuguuggggacauucaccuggacacuaucagacucagagggaaaugaaacaccagggggauacugccuuacuagauggauguugauugaggccgaauuaaagugcuuuggaaacacugcaguagccaagugcaaugagaaacaugaugaagaauuuugugacaugcuaagguuguucgauuucaacaaacaggccauaaggaggcucaaaacagaggcccaaaugagcauacagcugaucaacaaggcugucaaugcuuuaauaaaugaucagcucaucaugaagaaccacuugagagacaucaugggcauaccauauuguaacuacagcagauauugguaccuuaaccacacaucaacaggaaagaccucacuaccaagguguuggcuuaucucaaauggaucauaucucaaugagaccaaguuuucagaugacaucgaacaacaagcugacaacaugauaacagagaugcuacaaaaggaauacauagauagacagggcaaaacuccacugggguuaguugaccuauuuguuuuuagcacaaguuucuaucugauaagcaucuuucuccaccuggucaaaauaccaacccauagacacauuguagguaaaccuugcccaaaaccccacaggcugaaccacaugggcaucugcuccuguggucuauacaaacagccaggugugccugucagauggaagaggugaggacuaguaauaaggaaacuguaugaaugucugugggcaggaagugaagagauccuucuguaaagguuuuuggaauuaugucugcugaauaauaaacuuuuuugaaauaauaaaucugguagaaaaaugagaucuaaaaaaaaaaaaaaaaaaaaaaaaaaaaaaaaaaaaaaaaaaaaaaaaaaaaaaaaaaaaaaaaugcaucccccccccccccccccccccccccccccccaaaggcucuuuucagagccaccagaauu

SEQ ID NO: 2803 - RNA, 1816 nt, Artificial Sequence
  mRNA product Design b-4 comprising derived and/or modified sequence from LASV(AV;Clade V)__CCA30314__GPC (wt)
gggagagucccgcagucggcguccagcggcucugcuuguucgugugugugucguugcaggccuuauucaagcuuaccauggggcaaauagugacauucuuucaagaggugccucaugugauagaagaggugaugaacauuguucuuauagcauugucuauauuggcaguguugaaaggucucuacaacauugccacaugcggccucaucggcuugaucacuuuccucuuauuauguggaaggucuugcucauccaaccucuacaagggggucuaugaacuucaaucucuggaccugaacauggagacacucaacaugaccaugccccucuccugcacaaagaacaauagucaucacuacauaaggguuggcaaugacacagggcuggaacugaccuugaccaacacgagcauacucaaucacaaauucugcaaccuaucagaugcucacaagaaagaccuauaugaucacgcacucaugagcauaaucucaacuuuccaccugucuauacccaauuucaaccaauacgaagcaaugaguugugacuucaaugggggcaaaaucagugugcaguacaaucuaagccauucuuaugcuauagaugcagcuaaucauugcggcacagucgcgaauggcaucuugcagacuuucaugagaauggcauggggugggagcuauauugcucuugacucaggccguggaaacugggacuguauuaugacuagcuaucaauaucugauuauucagaacacaaccugggaaaaucacugucaguucucaagaccaucuccuauugguuaucuuggucuccucucacagaggacuagagacauuuacauuagcaggagguugcugggcacauucacguggacacugucagacucugaggguaaugcuacaccaggagguuauugucugaccagguggauguuaauugaagcugaguugaaaugcuuuggaaacacagcaguagcaaaguguaaugaaaagcaugaugaagaauuuugcgacaugcucagacuuuuugauuuuaauaagcaggcuauaaguagauugaaaucugaagcacaaaugagcauccaacugaucaacaaagcagugaaugcuuugaucaacgaucaauuaauuaugaagaaccacuugcgagacaucauggggauuccauauuguaauuacagcaaguauugguaccucaaucauacaauaacuggcaaaaccucauuaccuaaauguuggcuuguaucuaaugguucauacuugaaugaaacccauuuuucugacgacaucgagcaacaagcugacaauaugaucacagagaugcuacaaaaggaauacauggagaggcaagggaaaacgccuuuggguuuaguugaucuguuuguguuuagcacaaguuuuuaucuaauuaguaucuuccuccgacuagucaagauuccaacccauagacacauugugggcaaaccauguccuaagccccacagguugaaccacaugggcauuuguucuugcggcuuauacaagcagccuggcguccccgugagauggaagagauagggacuaguaauaaggaaacuguaugaaugucugugggcaggaagugaagagauccuucuguaaagguuuuuggaauuaugucugcugaauaauaaacuuuuuugaaauaauaaaucugguagaaaaaugagaucuaaaaaaaaaaaaaaaaaaaaaaaaaaaaaaaaaaaaaaaaaaaaaaaaaaaaaaaaaaaaaaaaugcaucccccccccccccccccccccccccccccccaaaggcucuuuucagagccaccagaauu

SEQ ID NO: 2804 - RNA, 1813 nt, Artificial Sequence
  mRNA product Design b-4 comprising derived and/or modified sequence from LASV(Togo/2016/7082;Clade VI)__AMR44577__GPC (wt)
gggagagucccgcagucggcguccagcggcucugcuuguucgugugugugucguugcaggccuuauucaagcuuaccauggggcaaauaauaaccuucuuccaggagguuccucauguuauagaggaggugaugaacauuguucugauagcacucucacuccuagcuauccugaaaggggucuacaauguggcaacaugugggauaauugggcuugugaccuuccucuuucucuguggaagaucuuguucacugaucuacaaaggcaguuaugagcugcaaacauuggaguuaaauauggagacccuaaacaugaccaugccucugucaugcacuaaaaauaguagccaccauuauauucgaguugggaacgagacuggcuuagagcugacauugaccaacaccagcauuauaaaucacaaauucuguaaccugucagaugcucacaaacguaaucuguaugaccacgcacucaugagcauccuuuccacauuccaucuguccaucccaaacuucaaccaguaugaggcgaugaguugugacuucaauggaggcaaaaucagugugcaauauaaucucagccaugcuuaugcaguugaugcugccgaacacugcggaacaguugcaaauggugugcuacaaacauucaugaggauggcuuggggaggaaguuacauugcacuugacucugggagaggcaauugggacuguauuaugacaagcuaccaauacuuaaucauucagaauacaacaugggaagaucacugccaauuuucaagaccuucuccuauugguuaucucggcuuauugucacaaagaacaagagacauuuauaucaguaggaggcugcuggguacauucaccuggacacuuucugacucagagggaaaugagacaccaggcggauacuguuuaacaagauggaugcugauagaggcugagcuaaaauguuuuggaaacacagcuguugcaaaguguaaugagaagcaugaugaggaauucugcgacauguuaagguuguuugacuucaacaaacaggcaauucagaggcucaaaucagaggcacaaaugagcauccaguuaauaaauaaagcagugaaugcauugauaaaugaucagcucauuaugaagaaccacuuaagggauaugauggguauaccguauugcaacuacaguaaguauugguaucucaaucacaccucaucagggagaacaucguugccuaaaugcuggcuuguuuccaauggaaguuaucugaaugagacccacuucucagaugauauugaacaacaggcagacaacaugauaacugaaauguuacaaaaggaauauaucgauaggcaggguaaaacaccuuuaggacuuguugaccuuuuuguuuucagcacgaguuuuuaccuuauaaguauauucuuacacuugauaaagauaccuacucauaggcacauaguuggaaagccaugccccaagccacaccgccucaaccacauggggaucugcucuuguggacuauacaagcagccuggugucccaaccagauggaagagauaaggacuaguaauaaggaaacuguaugaaugucugugggcaggaagugaagagauccuucuguaaagguuuuuggaauuaugucugcugaauaauaaacuuuuuugaaauaauaaaucugguagaaaaaugagaucuaaaaaaaaaaaaaaaaaaaaaaaaaaaaaaaaaaaaaaaaaaaaaaaaaaaaaaaaaaaaaaaaugcaucccccccccccccccccccccccccccccccaaaggcucuuuucagagccaccagaauu

SEQ ID NO: 2805 - RNA, 1813 nt, Artificial Sequence
  mRNA product Design b-4 comprising derived and/or modified sequence from LASV(KAK-428;Clade n.d. (VII))__ANH09740__GPC (wt)
gggagagucccgcagucggcguccagcggcucugcuuguucgugugugugucguugcaggccuuauucaagcuuaccaugggucaaauagugaccuucuuccaggaaguaccucauguuauagaggaagugaugaacauaguucugauagcacuuucucucuuagccauccugaagggccucuacaauuuugccaccuguggaguaauuggacugauaacauuccuuuuacuuuguggaagauccuguucagcgaccuacaaaggccaauaugaacuccaaacuuuagaacuaaauauggagucccuaaacaugaccaugccacugucuugcacaaaaaacaacagucaucauuauaucagagcuggcaacaacacaggccuggaguugacccucaccaacaccagcauuauaucucauaaauucugcaaccuuucugaugcucacaagaagaaccuuuaugaccacacucuuaugaguauaauaacuaccuuucauuuguccaucccaaauuucaaccaguaugaggcaaugaguugugacuuuaacggugggaaaaucagcauacaguacaaccucagucacuccuacgcuggugaugcugcgcaacacuguggaacaguugcaaauggggugcugcaaaccuuuaugagaauggcuuggggagguaguuaucuggcccuugauucaggaagaagagguugggacugcauaauuuccaguuaccaauacuugaucauccaaaacacaacuugggaugaccauugccaguuuucaaggccauccccgaucggguaucuuggguuuguaucgcagaagaccagggacaucuauauaaguagaagacuccuuggaacuuuuacauggacacuuucagacuccgagggacaugacaugccaggugguuacugcuugaccagauggaugcucauugaagcugauuuaaaguguuuuggaaacacagcugucgcuaaguguaaugagaaacaugacgaggaguucugugacauguggagguuguuugacuuuaauaagcaagccauucaaaggcucaaagcagaggcccagaugaacauccagcucauaaauaaagcugucaaugcucucauaaaugaccaauugaugaugaaaaaccauuuaagggauaucaugggcauucccuauugcaauuacaguaaauucugguaucucaauaacaccacgacugggagaaccucacugccaagaugcuggcugauuucaaauggguccuacuuaaaugagacucacuucucagaugauauugaacagcaagcugacaauaugauaacugagauguugcagaaagaauacauggacagacaaggaaaaacaccgcuaggacugguugaucucuuuguauucaguacaagcuuuuaccucauuaccauuuucuuacaucuugugaaaauaccaacccacagacacauaguuggcaagccgugcccuaaaccacacagacugaaucacaugggcaucugcuccugugggcucuacaaacagccuggugugccaguacgauggaagagaugaggacuaguaauaaggaaacuguaugaaugucugugggcaggaagugaagagauccuucuguaaagguuuuuggaauuaugucugcugaauaauaaacuuuuuugaaauaauaaaucugguagaaaaaugagaucuaaaaaaaaaaaaaaaaaaaaaaaaaaaaaaaaaaaaaaaaaaaaaaaaaaaaaaaaaaaaaaaaugcaucccccccccccccccccccccccccccccccaaaggcucuuuucagagccaccagaauu

SEQ ID NO: 2806 - RNA, 1813 nt, Artificial Sequence; identical to SEQ ID NO: 2800
  mRNA product Design b-4 comprising derived and/or modified sequence from LASV(Pinneo-NIG-1969;Clade I)__AIT17836__GPC (wt)

SEQ ID NO: 2807 - RNA, 1813 nt, Artificial Sequence
  mRNA product Design b-4 comprising derived and/or modified sequence from LASV(ISTH0009-NIG-2011;Clade II)__AIT17404__GPC (wt)
gggagagucccgcagucggcguccagcggcucugcuuguucgugugugugucguugcaggccuuauucaagcuuaccaugggacaaaucauaacauuuuuccaggaaguaccucaugucauagaggaagugaugaacauuguccugauugcucucagccuucuggcaauacugaaggggaucuacaauguugccaccuguggccuauuuggacugguguccuuucuccucuuaugugggagaucaugcucaacaacuuauaaggguguuuaugagcuacaaacucuagagcuggacauggcaagccuuaauaugacaaugccccuaucuugcacaaagaacaacagucaccauuacaucauggucggaaaugagacuggcuuggagcugacuuuaacaaauacaaguauuaucaaccacaaguuuuguaaccuuucugaugcacauaaaaagaaucucuaugaccaugcuuuaaugaguaucaucucaaccuuccacuuaucuauuccuaauuuuaaucaguaugaagcaaugaguugugacuucaauggggggaagauaaguguucaguacaaccuuagccacgcuuaugcuguagaugcagccaaucacugugggacuaucgccaauggcguucuucagacuuuuaugaggauggcuugggguggcaguuacauagcacuugauuccggaaaggggaguugggauuguauaaugacuuccuaccaauauuugauaauccagaacaccacuugggaagaucacugccaguuuucucgcccauccccuaucgguuaucuggggcuacugucacaaaggaccagagacauuuacaucagucgaagacuucuugggacuuuuacuuggacucucucugauucugaagguaaugaaacaccggguggguacugucuaacaagauggaugcugauugaggccgaguugaagugcuuugggaacacagcaguugcgaaaugcaaugagaaacaugaugaagaguuuugugacauguuaagacuguuugauuucaacaaacaagcuauaaggaggcuaaagacagaagcacagaugaguauccaacugauaaacaaagcagugaaugcauugaucaaugaccagcuuauuaugaagaaucacuugagagauaucaugggaauuccuuacugcaauuacagcaaguacugguaucuaaaucacacuguaacagggaagacaucguugccaaggugcuggcuugugucaaaugguuccuaccugaaugagacacauuuuucugaugacauugaacaacaggcagacaacaugauaacagaacuguugcaaaaggaguacauggacaggcaagggaaaacacccuuaggguuaguagaucuuuuugucuucagcaccagcuuuuaucucauuagcaucuuccuccaccugaucaaaaucccaacccacagacauaucacagggaaacccugcccuaaaccacacagacuuaaccacaugggcauaugcucauguggucuauacaaacauccugguguaccagucaaguggaaaagauagggacuaguaauaaggaaacuguaugaaugucugugggcaggaagugaagagauccuucuguaaagguuuuuggaauuaugucugcugaauaauaaacuuuuuugaaauaauaaaucugguagaaaaaugagaucuaaaaaaaaaaaaaaaaaaaaaaaaaaaaaaaaaaaaaaaaaaaaaaaaaaaaaaaaaaaaaaaaugcaucccccccccccccccccccccccccccccccaaaggcucuuuucagagccaccagaauu

SEQ ID NO: 2808 - RNA, 1813 nt, Artificial Sequence
  mRNA product Design b-4 comprising derived and/or modified sequence from LASV(ISTH2010-NIG-2012;Clade II)__AIT17482__GPC (wt)
gggagagucccgcagucggcguccagcggcucugcuuguucgugugugugucguugcaggccuuauucaagcuuaccaugggacaaaucauaacauuuuuccaggaaguaccucaugucauagaggaagugaugaacauuguccugauugcucucagccuucuggcaauauugaaggggaucuacaauguugcuaccuguggccucuuuggauugguguccuuccuccucuuauguggaaggucauguucaacaacuuacaaggguguuuaugagcuacaaacucuggagcuagacauggcaagccuuaauaugacaaugcccuuaucuugcacgaagaacaacagccaccauuacaucauggucggaaaugaaacuggcuuggagcuaacuuuaacaaauacaaguaucaucaaccacaaauuuuguaaccucucugaugcacauaagaagaaucuuuaugaucaugcuuuaaugaguaucauuucaaccuuccacuuauccauuccuaacuuuaaucaguaugaagcaaugagcugugacuucaaugggggaaagauaaguguucaguacaaccuuagccacgcuuaugcuguagaugcagccaaccacugugggaccaucgccaauggcguucuucagacuuuuaugaggauggcuugggguggcagcuauauagcacuugauuccggaaaggggaguugggauuguauaaugacuuccuaccaauauuugauaauccaaaacaucacuugggaagaucacugccaguuuucucgcccauccccuaucgguuaccuagggcuacugucacaaaggaccagggacauuuacaucagucgaagacuucuugggacuuuuacuuggacucucucugauucugaagguaaugaaacaccggguggguauugccuaacaagauggaugcugauugaagccgaguugaaaugcuuugggaacacagcaguugcgaaaugcaaugagaaacaugaugaagaguuuugugacauguuaagauuguuugacuuuaacaaacaggcuauaaggaggcuaaagacagaagcacagaugaguauccaacugauaaacaaagcagugaacgcacugaucaaugaccagcugauuaugaagaaucauuugagagauaucauggggauuccuuacugcaauuacagcaaguacugguaucuaaaucauacuguaacagggaagacaucguugccaaggugcuggcuugugucaaaugguuccuaccugaaugagacacauuuuucugaugacauugaacaacaggcagacaacaugauaacagaacugcugcaaaaggaguacauagacaggcaagggaaaacaccuuuaggguuaguagaucuuuuugucuucagcaccagcuuuuaucucauuagcaucuuccuccaccugguuaaaaucccaacccacagacaugucguaggaaaacccugcccuaaaccacacagacucaaccacaugggcauauguucauguggucuauacaaacauccuggugugccagucaaguggaaaagauagggacuaguaauaaggaaacuguaugaaugucugugggcaggaagugaagagauccuucuguaaagguuuuuggaauuaugucugcugaauaauaaacuuuuuugaaauaauaaaucugguagaaaaaugagaucuaaaaaaaaaaaaaaaaaaaaaaaaaaaaaaaaaaaaaaaaaaaaaaaaaaaaaaaaaaaaaaaaugcaucccccccccccccccccccccccccccccccaaaggcucuuuucagagccaccagaauu

SEQ ID NO: 2809 - RNA, 1813 nt, Artificial Sequence
  mRNA product Design b-4 comprising derived and/or modified sequence from LASV(Lassa virus/H.sapiens-wt/NGA/2015/ISTH_0543;Clade II)__AVO03639__GPC (wt)
gggagagucccgcagucggcguccagcggcucugcuuguucgugugugugucguugcaggccuuauucaagcuuaccaugggacaaaucauaacauuuuuccaggaagugccucaugucauagaggaaguaaugaacauuguccugauugcucucagccuucuggcaauauugaaggggaucuacaauguagccaccuguggccuuuuuggacugguguccuuucuccucuuauguggaagaucaugcucaacaacuuauaagggugucuacgagcuacaaacucuagagcuggacauggcaaaccuuaauaugacaaugccccuaucuugcacaaagaacaacagucaccauuacaucauggucggaaaugaaacuggcuuggagcugacuuuaacaaauacaaguauuaucaaccacaaguuuugcaaccuuucugaugcacauaaaaagaaucucuaugaccaugcuuuaaugaguaucaucucaaccuuccacuuaucuauuccuaauuuuaaucaguaugaagcaaugaguugugacuucaauggagggaagauaaguguucaguacaaccuuagccacacuuaugcuguagaugcagccaaucacugugggacuaucgccaauggcguucuucagacuuuuaugaggauggcuugggguggcaguuacauagcacuugauucuggaaaggggaguugggauuguauaaugacuuccuaccaauaucugguaauccagaacaccacuugggaagaucacugccaauuuucucgcccauccccuaucgguuaucuggggcuacugucacaaaggaccagagacauuuacaucagucgaagacuucuugggacuuucacuuggacucucucugauucugaagguaaugaaacaccggguggguacugucuaacaagauggaugcugauugaggccgaguugaagugcuuugggaacacagcaguugcgaaaugcaaugagaaacaugaugaagaguuuugugacauguuaagacuguucgauuuuaacaaacaagcuauaaggaggcugaagacagaagcacagaugaguauccaacuaauaaacaaagcagugaaugcauugaucaaugaccagcuuauuaugaagaaucacuuaagagauaucaugggaauuccuuacugcaauuacagcaaguacugguaucuaaaucacacugugacagggaagacaucguugccaaggugcuggcuuguaucaaaugguuccuaccugaaugagacacauuuuucugaugauauugaacaacaggcagacaacaugauaacagaacuguugcaaaaggaauacauagacaggcaagggaaaacacccuuaggguuaguagaucuuuuugucuucagcaccagcuuuuaucucauuagcauuuuccuccaccuggucaaaaucccaacucacagacauaucacagggaaacccugcccuaaaccacacagacuuaaccacaugggcauaugcucauguggucuauacaaacauccugguguaccagucaaguggaaaagauagggacuaguaauaaggaaacuguaugaaugucugugggcaggaagugaagagauccuucuguaaagguuuuuggaauuaugucugcugaauaauaaacuuuuuugaaauaauaaaucugguagaaaaaugagaucuaaaaaaaaaaaaaaaaaaaaaaaaaaaaaaaaaaaaaaaaaaaaaaaaaaaaaaaaaaaaaaaaugcaucccccccccccccccccccccccccccccccaaaggcucuuuucagagccaccagaauu

SEQ ID NO: 2810 - RNA, 1813 nt, Artificial Sequence
  mRNA product Design b-4 comprising derived and/or modified sequence from LASV(Lassa virus/H.sapiens-wt/NGA/2016/ISTH_0009;Clade II)__AVO03571__GPC (wt)
gggagagucccgcagucggcguccagcggcucugcuuguucgugugugugucguugcaggccuuauucaagcuuaccaugggacaaaucauaacauuuuuccaggaaguaccucaugucauagaggaagugaugaacauuguccugauugcucucagccuucuggcaauacugaaggggaucuacaauguugccaccuguggccuccuuggacugguguccuuucuccucuuauguggaaggucaugcucaacaacuuauaaggguguuuaugagcuacaaacucuagagcuggacauggcaagccuuaauaugacaaugccccugucuugcacaaagaacaacagucaccauuacaucauggucggaaaugagacuggcuuggagcugacuuuaacaaauacaaguauuaucaaccacaaguuuuguaaccuuucugaugcacauaaaaagaaucucuaugaccaugcucuaaugaguaucaucucaaccuuccacuuaucuauuccuaauuuuaaccaguaugaagcaaugaguugugacuucaauggggggaggauaaguguucaguacaaccuuagccacucuuaugcuguagaugcagccaaucacugugggacuaucgccaauggcguucuucagacuuucaugaggauggcuugggguggcaguuacauagcacuugauuccggaaaggggaguugggauuguauaaugacuuccuaccaauacuugauaauccagaacaccacuugggaagaucacugccaguuuucucgcccauccccuaucgguuauuuggggcuacugucacagaggaccagagacauuuacaucagucgaagacuucuugggacuuuuacuuggacucucucugauucugaagguaaugaaacaccggguggguacugucuaacaagauggaugcugauugaggccgaguugaagugcuuugggaacacagcaguugcgaaaugcaaugagaaacaugaugaagaguucugugacauguuaagacuguuugauuuuaauaaacaagccauaaggaggcugaagacagaagcacagaugaguauccaacugauaaacaaagcagugaaugcauugaucaaugaccagcuuauuaugaagaaccacuugagagauaucaugggaauuccuuacugcaauuacagcaaguacugguaucuaaaucacacuguaacagggaagacaucguugccaaggugcuggcuugugucaaaugguuccuaccugaaugagacacauuuuuccgaugacauugaacaacaggcagacaacaugauaacagaauuguugcagaaggaguacauagacaggcaagggaaaacacccuugggguuaguagaucuuuuugucuucagcaccagcuuuuaucucauuagcaucuuccuccaccuggucaaaauuccaacccacagacauaucacagggaaacccugccccaaaccacacagacuuaaccacaugggcauaugcucauguggucuauacaaccauccuggugugccagucaaguggaaaagauagggacuaguaauaaggaaacuguaugaaugucugugggcaggaagugaagagauccuucuguaaagguuuuuggaauuaugucugcugaauaauaaacuuuuuugaaauaauaaaucugguagaaaaaugagaucuaaaaaaaaaaaaaaaaaaaaaaaaaaaaaaaaaaaaaaaaaaaaaaaaaaaaaaaaaaaaaaaaugcaucccccccccccccccccccccccccccccccaaaggcucuuuucagagccaccagaauu

SEQ ID NO: 2811 - RNA, 1813 nt, Artificial Sequence
  mRNA product Design b-4 comprising derived and/or modified sequence from LASV(Lassa virus/H.sapiens-wt/NGA/2016/ISTH_0017;Clade II)__AVO03567__GPC (wt)
gggagagucccgcagucggcguccagcggcucugcuuguucgugugugugucguugcaggccuuauucaagcuuaccaugggacaaaucauaacauuuuuccaggaaguaccucaugucauagaggaagugaugaacauuguccugauugcucucagccuucuggcaauacugaaagggaucuacaauguugcuaccuguggccucuuuggguugguguccuuccuccucuuaugugggagaucaugcucaacaacuuacaaggguguuuaugagcuacaaacucuagagcuagacauggcaagccuuaauaugacaaugcccuuaucuugcacgaagaacaauucccaccauuacaucauggucggaaaugagacuggcuuggagcugacuuuaacaaauacaagcauuaucaaccacaaguuuuguaaccuuucugaugcacauaaaaagaaucuuuaugaccaugccuuaaugagcaucauuucaaccuuccacuuauccauuccuaacuuuaaucaguaugaagcaaugaguugugacuucaaugggggaaaaauaaguguucaguacaaccuuagccauacuuaugcuauagaugcagcuaaccacugugggaccauugccaauggcguucuucagacuuuuaugaggauggcuugggguggcaguuacauagcacuugauuccggaaagggcagcugggacugcauuaugacuuccuaccaauauuugauaauccagaacaccacuugggaagaucacugccaguuuucucgcccaucccccaucgguuaucuggggcuacugucacaaaggaccagagacauuuacaucagucgaagacuucuugggacuuuuacauggacccucucugacucugaagguaaugaaacaccagguggguacugucuaacgagauggaugcugauugaggccgaguugaagugcuuugggaacacagcaguugcaaaaugcaaugagaaacaugaugaagaguuuugugauauguuaagauuauuugacuuuaacaaacaagcuauaaggaggcugaagacagaagcgcagaugaguauccaacugauaaacaaagcagugaacgcacugaucaaugaccagcugauuaugaagaaucauuuaagagauaucaugggaauuccuuacugcaauuacagcaaguauugguaucuaaaucacacuguaacagggaagacaucauuaccaagaugcuggcuugugucgaaugguuccuaccugaaugagacacauuuuucugaugacauugaacaacaagcagauaacaugauaacagaacuuuugcaaaaggaauauauggauaggcaagggaaaacacccuuaggguuaguagaucuuuuugucuucagcaccagcuuuuaucucauuagcaucuuccuccaccuggucagaaucccaacucacagacaugucauagggaaacccugcccuaaaccacacagacucaaccacaugggcauaugcucauguggucuguacaaacauccuggugugccagucaaauggaaaagauagggacuaguaauaaggaaacuguaugaaugucugugggcaggaagugaagagauccuucuguaaagguuuuuggaauuaugucugcugaauaauaaacuuuuuugaaauaauaaaucugguagaaaaaugagaucuaaaaaaaaaaaaaaaaaaaaaaaaaaaaaaaaaaaaaaaaaaaaaaaaaaaaaaaaaaaaaaaaugcaucccccccccccccccccccccccccccccccaaaggcucuuuucagagccaccagaauu

SEQ ID NO: 2812 - RNA, 1813 nt, Artificial Sequence
  mRNA product Design b-4 comprising derived and/or modified sequence from LASV(Lassa virus/H.sapiens-wt/NGA/2018/ISTH_0959;Clade II)__AVV65099__GPC (wt)
gggagagucccgcagucggcguccagcggcucugcuuguucgugugugugucguugcaggccuuauucaagcuuaccaugggacaaaucauaacauuuuuccaggaaguaccucaugucauagaggaagugaugaacauuguccugauugcucucagccuuuuggcaauacugaaggggaucuacaauguuguuaccuguggccucuuuggauugguguccuuccuccucuuauguggaagaucauguucaacaacuuacaaggguguuuaugagcuacaaacucuggagcuggacauggcaagccuuaauaugacaaugcccuuaucuugcacgaagaacaacagccaccauuacaucauggucggaaaugagacuggcuuggagcugacuuuaacaaauacaaguaucaucaaccauaaauuuuguaaccucucugaugcacauaaaaagaaucuuuaugaucaugcuuuaaugaguaucauuucaaccuuccacuuauccauuccaaacuuuaaucaguaugaagcaaugagcugugacuucaaugggggaaagauaaguguucaguacaaccuuagccacgccuaugcuauagaugcagccaaccacugcgggacuauugccaauggcguucuucaaacuuuuaugaggauggcuugggguggcagcuauauagcacuugauuccggaaaggggaguugggacuguauaaugacuuccuaccaguauuugauaauccaaaacaccacuugggaagaucauugucaguuuucucgcccauccccuaucgguuaccuagggcuacugucacaaaggaccagggacauuuacaucagucgaagacuucuugggacuuuuacuuggacucucucugauucugaagguaaugaaacaccggguggguauugucuaacaagauggaugcugauugaggccgaguugaaaugcuuugggaacacagcaguugcgaaaugcaaugagaaacaugaugaagaguuuugugacauguuaagauuguuugacuuuaacaaacaagcuauaaggaggcuaaagacagaagcacagaugaguauccagcugauaaacaaagcagugaacgcacugaucaaugaccagcugauuaugaaaaaucauuugagagauaucauggggauuccuuacugcaauuacagcaaguacugguaucuaaaucauacuguaacagggaagacaucguugccaaggugcuggcuugugucaaaugguuccuaccugaaugagacacauuuuucugaugacauugaacaacaagcagacaauaugauaacagaacugcugcaaaaggaguacauagacaggcaagggaaaacaccuuuaggguuaguagaucuuuuugucuucagcaccagcuuuuaucucauuagcaucuuccuccaccugguuaaaaucccaacccacagacaugucauaggaaaacccugcccuaaaccacacagacuuaaucacaugggcauauguucauguggucuauacaaacauccuggugugccagucaaguggaaaagauagggacuaguaauaaggaaacuguaugaaugucugugggcaggaagugaagagauccuucuguaaagguuuuuggaauuaugucugcugaauaauaaacuuuuuugaaauaauaaaucugguagaaaaaugagaucuaaaaaaaaaaaaaaaaaaaaaaaaaaaaaaaaaaaaaaaaaaaaaaaaaaaaaaaaaaaaaaaaugcaucccccccccccccccccccccccccccccccaaaggcucuuuucagagccaccagaauu

SEQ ID NO: 2813 - RNA, 1813 nt, Artificial Sequence
  mRNA product Design b-4 comprising derived and/or modified sequence from LASV(LASV003-NIG-2008;Clade II)__AIT17580__GPC (wt)
gggagagucccgcagucggcguccagcggcucugcuuguucgugugugugucguugcaggccuuauucaagcuuaccauggggcaaaucauaacauuuuuccaggaagugccucaugucauagaagaagugaugaacauuguccugauugcccucagccuuuuggcaauauugaaagggaucuacaauguugcuacuuguggccucuuuggacugguguccuuucuucucuuauguggaagaucaugcucaacaacuuacaaagguguuuaugagcuacaaacucuagagcuagacauggcaagccuuaauaugacaaugcccuuaucuugcacaaagaauaauagccaccauuacaucauggucggaaaugaaacuggcuuagagcugacuuuaacaaauacaaguaucaucaaccacaaguuuuguaaccuuucugaugcacauaaaaagaaucuuuaugaccaugcuuuaaugagcaucaucucaaccuuccacuuauccauuccuaacuuuaaucaauaugaagcaaugaguugugacuucaauggggggaagauaaguguucaguacaaccuuagccacacuuaugcuguagaugcagcuaaccacugugggacuauugccaauggcguucuucagacuuucaugaggauggcuugggguggcagcuacauagcacuugauuccggaaaagggaguugggauuguauaaugacuuccuaccaauaucugauaauccagaacaccacuugggaagaucauugccaguuuucucgcccaucccccaucgguuaucuggggcuacugucacaaaggaccagggacauuuacaucagucgaagacuccuugggacuuuuacuuggacccucucugauucugaaagcaaugaaacuccagguggguauugucuaacaagguggauguugauugaggccgagcugaagugcuuugggaacacagcaguugcgaaaugcaaugaaaaacaugaugaagaguuuugugacaugcuaagauuguuugacuuuaacaaacaagcuauaaggaggcugaaagcagaagcacagaugagcauccaacuaauaaacaaagcagugaaugcacugaucaaugaccagcugauaaugaagaaucauuuaagagauaucaugggaauuccuuacugcaauuacagcaaauauugguacuugaaucacacuguaacagggaggacaucguuaccaagaugcuggcuugugucaaaugguuccuaccugaaugagacacauuuuucugacgacauugaacaacaagcagacaauaugauaacagaacuguugcagaaggaguacauggacaggcaagggaaaacaccuuuaggguuaguagaucuuuuugucuucagcaccagcuuuuaucucaucagcaucuuccuccaccugguuaaaaucccaacccacagacaugucauagggaaacccugcccuaaaccacacagacucaaccacaugggcauaugcucauguggucuguacaaacauccuggugugccagucaaguggaaaagauagggacuaguaauaaggaaacuguaugaaugucugugggcaggaagugaagagauccuucuguaaagguuuuuggaauuaugucugcugaauaauaaacuuuuuugaaauaauaaaucugguagaaaaaugagaucuaaaaaaaaaaaaaaaaaaaaaaaaaaaaaaaaaaaaaaaaaaaaaaaaaaaaaaaaaaaaaaaaugcaucccccccccccccccccccccccccccccccaaaggcucuuuucagagccaccagaauu

SEQ ID NO: 2814 - RNA, 1813 nt, Artificial Sequence
  mRNA product Design b-4 comprising derived and/or modified sequence from LASV(LASV035-NIG-2009;Clade II)__AIT17588__GPC (wt)
gggagagucccgcagucggcguccagcggcucugcuuguucgugugugugucguugcaggccuuauucaagcuuaccauggggcaaaucauaacauuuuuccaggaagugccucaugucauugaggaggugaugaacauugucuuaauugcucucagucuucuagcaauacugaaagggauuuacaauguugcuaccuguggccucuuuggguugguguccuuucuucucuuauguggaaggucaugcucaacaacuuacaaggguguuuaugagcuucaaacucuagagcuggauauggcaagccuuaauaugacaaugcccuuauccugcacgaagaacaacagccaccacuacaucaugguuggaaaugagacuggcuuggagcugacuuugacaaacacaaguaucaucaaccacaaguucugcaaccuuuccgaugcacauaaaaagaaucucuaugaccaugcuuuaaugagcaucaucucaacuuuccaccuauccaucccuaacuuuaaucaguaugaagcaaugaguugugacuucaauggggggaagauaaguguucaguacaaccucagccacgcuuaugcuguagaugcagcuaaccauugugggaccauugccaauggaguucuucaaacuuuuaugaggauggcuugggguggcaguuacauagcacuugauucuggaaaggggaguugggauuguauaaugacuuccuaccaauauuugauaauccaaaacaccacuugggaagaucacugccaguuuucucgcccauccccuauugguuaucuggggcuacugucacaaagaaccagggauauuuacaucagccgaagacuccuuggaacuuuuacuuggacucucucugauucugaaggcaaugaaacaccggguggauauuguuuaacaagauggaugcugauugaggccgaauuaaagugcuuugggaacacagcaguugcgaaaugcaaugagaaacaugaugaagaguuuugugacauguuaagguuguuugacuuuaacaaacaggcuauaaggaggcuaaaggcagaagcacagaugagcauccaacuaauaaacaaagcagugaacgcacugaucaaugaccagcucauuaugaagaaucauuuaagagauaucaugggaauuccuuacugcaauuacagcaaguauugguauuuaaaucacacuguaacagggaagacaucguugccaagaugcuggcuuguaucaaaugguuccuaccugaaugaaacacauuuuucugaugacauugaacaacaagcagauaacaugauaacagaauuguuacagaaagaguacauugacaggcaagggaaaacacccuuaggguugguggaucuuuuugucuucagcacuagcuucuaccuuauuagcaucuuccuccaccugguuaaaaucccaacccacagacaugucauagggaagcccugccccaagccacacagacucaaccacaugggcauaugcucauguggucuguacaaacauccugguguaccagucaaguggaaaagauagggacuaguaauaaggaaacuguaugaaugucugugggcaggaagugaagagauccuucuguaaagguuuuuggaauuaugucugcugaauaauaaacuuuuuugaaauaauaaaucugguagaaaaaugagaucuaaaaaaaaaaaaaaaaaaaaaaaaaaaaaaaaaaaaaaaaaaaaaaaaaaaaaaaaaaaaaaaaugcaucccccccccccccccccccccccccccccccaaaggcucuuuucagagccaccagaauu

SEQ ID NO: 2815 - RNA, 1813 nt, Artificial Sequence
  mRNA product Design b-4 comprising derived and/or modified sequence from LASV(LASV1000-NIG-2009;Clade II)__AIT17782__GPC (wt)
gggagagucccgcagucggcguccagcggcucugcuuguucgugugugugucguugcaggccuuauucaagcuuaccaugggacaaaucauaacauuuuuccaggaaguuccucaugucauagaggaagugaugaacauuguccugauugcucucagccuccuggcaauacuaaaagggaucuacaauguugcuaccuguggccucuuuggauugguguccuuccuccucuuauguggaagaucaugcucaacaacuuacaaggguguuuaugagcugcaaacucuagagcuagacauggcaagccuuaauaugacaaugccucuaucuugcacgaagaauaacagccaccauuacaucauggucggaaaugagacuggcuuggagcugacuuuaacaaacacaaguauuaucaaucacaaguuuuguaaccuuucugaugcacacaaaaagaaucuuuaugaccaugcuuuaaugagcaucaucucaaccuuccauuuaucuauucccaacuucaaucaguaugaagcaaugaguugugacuucaaugggggaaagauaaguguucaguacaaccuuagccacacuuaugcuguagaugcagccaaccacugugggacuaucgccaauggcguccuucagaccuuuaugaggauggcuugggguggcaguuacauagcacuugauuccggaaaggggaguugggacuguauaaugacuuccuaucaauaucugauaauccaaaacaccacuugggaagaucacugccaguuuucucgcccaucuccuaucgguuaucuggggcuacugucacaaaggaccagagacauuuacaucagucgaagacuucuugggacuuucacuuggacucucucugauucugaagguaaugaaacaccggguggguacugucuaacaagguggaugcugauugaggccgaguugaagugcuuugggaacacagcaguugcgaaaugcaaugagaaacaugaugaagaguuuugugacauguuaagauuguuugacuuuaacaaacaagcuauaaagaggcugaagacagaagcacagaugaguauucaacugauaaacaaagcagugaacgcacugaucaaugaccagcugauuaugaagaaucauuugagagacaucaugggaauuccuuacuguaauuacagcaaguauugguaucuaaaucacaccguaacagggaagacaucguugccaaggugcuggcuugugucaaaugguuccuaccugaaugagacacacuuuucugaugacauugaacaacaagcagauaacaugauaacagaacuauugcaaaaggaguacauagacaggcaagggaaaacacccuuaggguuaguagaccuuuuugucuuuagcaccagcuuuuaucucauuagcaucuuccuccaccuggucaaaaucccaacccauagacaugucguagggaaacccugcccuaaaccacacagacucaaccacaugggcauaugcucauguggucuauacaaacauccugguguaccagucaaauggaaaagauagggacuaguaauaaggaaacuguaugaaugucugugggcaggaagugaagagauccuucuguaaagguuuuuggaauuaugucugcugaauaauaaacuuuuuugaaauaauaaaucugguagaaaaaugagaucuaaaaaaaaaaaaaaaaaaaaaaaaaaaaaaaaaaaaaaaaaaaaaaaaaaaaaaaaaaaaaaaaugcaucccccccccccccccccccccccccccccccaaaggcucuuuucagagccaccagaauu

SEQ ID NO: 2816 - RNA, 1813 nt, Artificial Sequence
  mRNA product Design b-4 comprising derived and/or modified sequence from LASV(LASV221-NIG-2010;Clade II)__AIT17624__GPC (wt)
gggagagucccgcagucggcguccagcggcucugcuuguucgugugugugucguugcaggccuuauucaagcuuaccaugggacaaaucauaacauuuuuccaggaaguaccucaugucauagaggaagugaugaacauuguccugauugcucucagccuucuggcaauacugaaagggaucuacaauguugcuaccuguggccucuuuggauugguguccuuccuccucuuauguggaagaucaugcucaacaacuuacaaggguguuuaugagcuacaaacucuagagcuagacauggcaagccuuaauaugacaaugcccuuaucuugcacgaagaacaacucccaccauuacaucauggucggaaaugagacuggcuuggagcugacuuugacaaauacaagcauuaucaaccacaaguuuuguaaccuuucugaugcgcauaaaaagaaucuuuaugaccaugcuuuaaugaguaucaucucaaccuuccacuuguccauuccuaacuuuaaucaguaugaagcaaugaguugugauuucaaugggggaaagauaaguguucaguacaaccuuagccacacuuaugcuauagaugcagccaaccacugugggaccauugccaauggcguucuucagacuuucaugagaauggcuugggguggcaguuacauagcacuugauuccggaaaggggagcugggauugcauaaugacuuccuaccaauauuugauaauccaaaacaccacaugggaagaucacugccaguuuucucgcccaucccccaucgguuaucuggggcuacuaucacaaagaaccagggacauuuacauuagucgaagacuucuugggacuuucacuuggacucucucugacucugaagguaaugaaacaccggguggguauugucuaacaagauggaugcugauugaggccgaguugaagugcuuuggaaacacagcaguugcaaaaugcaaugaaaaacaugaugaagaguuuugugauauguugagauuguuugacuucaacaaacaagcuauaaggaggcuaaagacagaagcacagaugaguauccaacugauaaacaaagcggugaacgcacugaucaaugaccagcugaucaugaagaaucauuugagagauaucaugggaauuccuuacugcaauuacagcaaguauugguaucuaaaucacacuguaacagggaagacaucguugccaagaugcuggcuugugucgaaugguucuuaccugaaugagacacauuuuucugaugacauugaacaacaagcagacaacaugauaacagaaauguugcaaaaggaguacauggacaggcaagggaaaacacccuuaggguuaguagaucuuuuugucuucagcaccagcuuuuaucucauuagcaucuuccuccaccuaguuaaaauuccaacccacagacaugucauagggaaacccugcccuaaaccacacagacucaaccacaugggcauauguucauguggucuguauaagcauccuggcgugccagucaaguggaaaagauagggacuaguaauaaggaaacuguaugaaugucugugggcaggaagugaagagauccuucuguaaagguuuuuggaauuaugucugcugaauaauaaacuuuuuugaaauaauaaaucugguagaaaaaugagaucuaaaaaaaaaaaaaaaaaaaaaaaaaaaaaaaaaaaaaaaaaaaaaaaaaaaaaaaaaaaaaaaaugcaucccccccccccccccccccccccccccccccaaaggcucuuuucagagccaccagaauu

SEQ ID NO: 2817 - RNA, 1813 nt, Artificial Sequence
  mRNA product Design b-4 comprising derived and/or modified sequence from LASV(LASV237-NIG-2010;Clade II)__AIT17638__GPC (wt)
gggagagucccgcagucggcguccagcggcucugcuuguucgugugugugucguugcaggccuuauucaagcuuaccaugggacaaaucauaacauuuuuccaggaaguaccucaugucauagaggaagugaugaacauuguccugauugcucucagccuucuggcaauacugaaggggaucuacaauguugccaccuguggccuauuuggacugguguccuuucuccucuuauguggaagaucaugcucaacaacuuauaaggguguuuaugagcuacaaacucuagagcuggauauggcaagccuuaauaugacaaugccccuaucuugcacaaagaacaacagucaccauuacaucauggucggaaaugagacuggcuuggagcugacuuuaacaaauacaaguauuaucaaccacaaguuuuguaaccuuucugaugcacauaaaaaggaucucuaugaccaugcuuuaaugaguaucaucucaaccuuccacuuaucuauuccuaauuuuaaucaguaugaagcaaugaguugugacuucaauggggggaagauaaguguucaguacaaccuuagccacacuuaugcuguagaugcagccaaucacugugggacuaucgccaauggcguucuucagacuuuuaugaggauggcuugggguggcaguuacauagcacuugauuccggaaaggggaguugggauuguauaaugacuuccuaccaauauuugauaauccagaacaccacuugggaagaucacugccaguuuucucgcccauccccuaucgguuaucuggggcuacugucacaaaggaccagagacauuuacaucagucgaagacuucuugggacuuuuacuuggacucucucugauucugaagguaaugaaacaccggguggguacugucuaacaagauggaugcugauugaggccgaguugaagugcuuugggaacacagcaguugcgaaaugcaaugagaaacaugaugaagaguuuugugacauguuaagacuguuugauuucaacaaacaagcuauaaggaggcuaaagacagaagcacagaugaguauccaacugauaaacaaagcagugaaugcauugaucaaugaccagcuuauuaugaagaaucacuugagagauaucaugggaauuccuuacugcaauuacagcaaguacugguaucugaaucacacuguaacagggaagacaucguugccgaggugcuggcuugugucaaaugguuccuaccugaaugagacacauuuuucugaugacauugaacaacaggcagacaacaugauaacagaacuguugcaaaaggaguacauggacaggcaagggaaaacacccuuaggguuaguagaccuuuuugucuucagcaccagcuuuuaucucauuagcaucuuccuccaccugaucaaaaucccaacccacagacauaucacagggaaacccugcccuaaaccacacagacuuaaccacaugggcauaugcucauguggucuauacaaacauccugguguaccagucaaguggaaaagauagggacuaguaauaaggaaacuguaugaaugucugugggcaggaagugaagagauccuucuguaaagguuuuuggaauuaugucugcugaauaauaaacuuuuuugaaauaauaaaucugguagaaaaaugagaucuaaaaaaaaaaaaaaaaaaaaaaaaaaaaaaaaaaaaaaaaaaaaaaaaaaaaaaaaaaaaaaaaugcaucccccccccccccccccccccccccccccccaaaggcucuuuucagagccaccagaauu

SEQ ID NO: 2818 - RNA, 1813 nt, Artificial Sequence
  mRNA product Design b-4 comprising derived and/or modified sequence from LASV(LASV253-NIG-2011;Clade II)__AIT17670__GPC (wt)
gggagagucccgcagucggcguccagcggcucugcuuguucgugugugugucguugcaggccuuauucaagcuuaccauggggcaaaucauaacauuuuuucaggaagugccucaugucauagaagaagugaugaacauuguccugauugcccucagccuucuggcaauauugaaagggaucuacaauguugcuacuuguggccucuuuggacugguguccuuucuucucuuauguggaagaucaugcucaacaacuuacaaagguguuuaugagcuacaaacucuagagcuagacauggcaagccuuaauaugacaaugcccuuaucuugcacaaagaauaauagccaccauuacaucauggucggaaaugaaacuggcuuagagcugacuuuaacaaauacaaguaucaucaaccacaaguuuuguaaccuuucugaugcacauaaaaagaaucuuuaugaccaugcuuuaaugagcaucaucucaaccuuccacuuauccauuccuaacuucaaucaauaugaagcaaugaguugugacuucaauggggggaagauaaguguucaguacaaccuuagccacacuuaugcuguagaugcagcuaaccacugugggacuauugccaauggcguucuucagacuuuuaugaggauggcuugggguggcagcuacauagcacuugauuccggaaaagggagcugggauuguauaaugacuuccuaccaauauuugauaauccagaacaccacuugggaggaucacugccaguuuucucgcccaucccccaucgguuaucuggggcuacugucacaaaggaccagggacauuuacaucagucgaagacuccuuggaacuuuuacuuggacccucucugauucugaaggcaaugaaacuccagguggguauugucuaacaagguggauguugauugaggccgaguugaagugcuuugggaacacagcaguugcgaaaugcaaugagaaacaugaugaagaguuuugugacaugcuaagauuguuugacuuuaauaaacaagcuauaaggagacugaaagcagaagcacagaugaguauucaacuaauaaacaaagcagugaaugcacugaucaaugaccagcugauaaugaagaaucauuuaagagauaucauggggauuccuuacugcaauuacagcaaguauugguaucugaaucacacuguaacaggaaggacaucguuaccaagaugcuggcuugugucaaaugguuccuaccugaaugagacacauuuuucugacgacauugaacaacaagcagacaacaugauaacagaacuguugcagaaggaguacauagacaggcaagggaaaacaccuuuaggguuaguggaucuuuuugucuucagcaccagcuuuuaucucaucagcaucuuccuccaccugguuaaaaucccaacccacagacauaucauagggaaacccugcccuaaaccacacagacucaaccacaugggcauaugcucauguggucuguacaaacauccuggugugccaguuaaguggaaaagauagggacuaguaauaaggaaacuguaugaaugucugugggcaggaagugaagagauccuucuguaaagguuuuuggaauuaugucugcugaauaauaaacuuuuuugaaauaauaaaucugguagaaaaaugagaucuaaaaaaaaaaaaaaaaaaaaaaaaaaaaaaaaaaaaaaaaaaaaaaaaaaaaaaaaaaaaaaaaugcaucccccccccccccccccccccccccccccccaaaggcucuuuucagagccaccagaauu

SEQ ID NO: 2819 - RNA, 1813 nt, Artificial Sequence
  mRNA product Design b-4 comprising derived and/or modified sequence from LASV(LASV254-NIG-2011;Clade II)__AIT17674__GPC (wt)
gggagagucccgcagucggcguccagcggcucugcuuguucgugugugugucguugcaggccuuauucaagcuuaccaugggacaaaucauaacauuuuuccaggaaguaccucaugucauagaggaagugaugaacauuguucugauugcucucagccuucuggcaauauugaaagggaucuacaauguugcuaccuguggccucuuuggauugguguccuuucuucucuuauguggaagaucaugcucaacaacuuacaaggguguuuaugagcuacaaacucuagagcuagacaugacaaaccucaauaugacaaugccuuuauccugcacgaaaaacaacagccaccauuacaucauggucggaaaugagacuggucuggagcugacuuuaacaaauacaagcaucaucaaccacaaguuuuguaaccuuucugaugcacauaaaaagaaucuuuauaaccaugcuuuaaugaguauuauuucaacuuuccacuuauccauuccuaacuuuaaucaguaugaagcaaugaguugugacuucaaugggggcaagauaaguguccaguacaaccuuagccauaguuaugcuguggaugcagcuaaccacugugggaccauugccaauggcgugcuucagacuuuuaugaggauggcuugggguggcaguuacauagcacuugauuccggaaaggggaauugggauuguauaaugaccuccuaccaauauuugauaauccaaaacaccacuugggaagaucacugucaguuuucucgcccauccccuauugguuaucugggguuacugucacaaaggaccagggacauuuacaucagucgaagacuucuugggacuuuuacuuggacucucucugauucugaagguaaugaaacaccagguggguauugucuaacaagauggaugcugauugaggccgaguugaagugcuuugggaacacagcaguugcgaaauguaaugagaaacaugaugaggaguuuugugacauguuaagauuguuugacuuuaacaaacaagcuauaaggaggcugaagacagaggcacaggcgaauauccaacugauaaauaaagcagugaacgcacugaucaaugaccagcugaucaugaagaaucauuugagagauaucaugggaauuccuuacugcaauuacagcaaguauugguacuuaaaucacacuguaacagggaagacaucguugccaagaugcuggcuugugucaaauggcuccuacuugaaugagacacauuuuucugaugacauugaacaacaagcagacaauaugauaacagaacuguugcagaaggaguacauggacaggcaagggaaaacacccuuaggguugguagaucuuuuugucuucagcaccagcuuuuaucucauuagcaucuuccuccaccugguuaaaaucccaacccacagacaugucauagggaaacccugcccuaaaccacacagacucaaccacaugggcauaugcucauguggucuguacaaacauccugguguaccagucaaguggaaaagauagggacuaguaauaaggaaacuguaugaaugucugugggcaggaagugaagagauccuucuguaaagguuuuuggaauuaugucugcugaauaauaaacuuuuuugaaauaauaaaucugguagaaaaaugagaucuaaaaaaaaaaaaaaaaaaaaaaaaaaaaaaaaaaaaaaaaaaaaaaaaaaaaaaaaaaaaaaaaugcaucccccccccccccccccccccccccccccccaaaggcucuuuucagagccaccagaauu

SEQ ID NO: 2820 - RNA, 1813 nt, Artificial Sequence
  mRNA product Design b-4 comprising derived and/or modified sequence from LASV(Nig08-A19;Clade III)__ADU56618__GPC (wt)
gggagagucccgcagucggcguccagcggcucugcuuguucgugugugugucguugcaggccuuauucaagcuuaccaugggacaaauugugacauucuuccaggaagucccucauguuaucgaggaagugaugaauaucguccucauagcauugucaauuuuggcaauccuaaaaggacucuacaacauugcuacauguggcuugauaggccuugucacauuccucuuacuuucuggaaggucauguucaaugaccuacaaaggaguuuaugaacuacagacccuugaacugaacaugaacacucugaauaugacuaugccgcuaucuuguacaaagaacaauagucaccacuacaucauggugggaaacgagacagggcuugagcucaccuuaaccaacacaagcuugcuccaucacaaauucugcaaccuaucagaugcucauaagaaaaaucuuuaugaucacacucucaugagcauuaucuccacauuccauuuguccauuccuaacuuuaaucaguaugaggcaaugaguugugauuuuaaugguggcaagaucacugugcaauacaaucugagucauagcuaugcaauugaugcagcaaaccauuguggcacaguggcaaacgguguguugcaaacauuuaugaggauggcuuggggagguaguuacauugcccuugauuccggacgugggaaaugggauuguauaaugaccaguuaucaauacuuaaucauccagaacacaaccugggaagaucauugucaauuuuccagaccauccccaauuggauaucuugggcuccucucacagagaacuagagacauauacauuaguagaagacuacuaggaacauuuacuuggacacuuucugacucagaaggaaaugagacaccaggagguuacugucucacuagauggauguugauugaggcugaacuaaaguguuucgggaauacagcuguagcuaagugcaaugaaaaacacgaugaagaguuuugugacaugcuaaggcuauuugacuucaauaagcaagcuauaaggagguuaaaggcagaggcccaaaugagcauacagcugaucaacaaagcaguuaaugcucuaauaaacgaucagcugaucaugaagaaucaucuaagggacaucaugggaauaccauacugcaauuacagcaaguacugguaucucaaucacaccucaacagggaggaccucauuaccgagauguuggcuuguuucaaaugggucauaucucaaugaaacucacuuuucagaugacauugagcagcaagcugauaacaugauaacugaaauguugcaaaaagaauaccuggacagacaaggaaagaccccauugggauugguagaucuuuuugucuucaguacaaguuuuuacuuaaucaguauuuuccuccaucuggucaaaauaccaacccauagacacauuguagggaagccuugccccaaaccucauagguugaaccacaugggcaucugcucuuguggucuauauaaacagccaggaguacccguuagauggaagagauaaggacuaguaauaaggaaacuguaugaaugucugugggcaggaagugaagagauccuucuguaaagguuuuuggaauuaugucugcugaauaauaaacuuuuuugaaauaauaaaucugguagaaaaaugagaucuaaaaaaaaaaaaaaaaaaaaaaaaaaaaaaaaaaaaaaaaaaaaaaaaaaaaaaaaaaaaaaaaugcaucccccccccccccccccccccccccccccccaaaggcucuuuucagagccaccagaauu

SEQ ID NO: 2821 - RNA, 1816 nt, Artificial Sequence
  mRNA product Design b-4 comprising derived and/or modified sequence from LASV(G1180-SLE-2010;Clade IV)__AIT17168__GPC (wt)
gggagagucccgcagucggcguccagcggcucugcuuguucgugugugugucguugcaggccuuauucaagcuuaccaugggacagauagugacauucuuccaggaagugccucauguaauagaagaggugaugaacauuguucucauugcacugucuauacuagcagugcugaaaggucuguacaauuuugcaacauguggccucguuggucuacucacuuuccuccuguuguguggcagaucuugcacagcuagucguuacaaagggguuuaugagcuucagacucuggaacuaaacauggagacacucaauaugaccaugccucucuccugcacaaagaacaacagucaucauuauauaaugguggguaaugagacaggacuagaacugacuuugacuaacacgagcaucauuaaucauaaauuuugcaaucugucugaugcccacaaaaagaaccuuuaugaccacgcucuuaugagcauaauuucaacuuuccacuuauccauccccaacuucaaucaguaugaggcaaugagcugcgauuuuaaugggggaaagauuagugugcaguacaaccugagucacagcuaugcuggggaugcagccaaucauugugguacuguugcaaauggugucuugcagaccuucaugaggauggcuuggggugggagcuacauugcucuugacucaggccauggcaguugggacuguauuaugacuaguuaucaauaucugauaauccaaaauacaaccugggaagaucacugccaguucucaagaccaucucccauugguuaucucgggcuccuuucacaaagaaccagagauauuuacauuaguagaagacuacuaggcacauucacauggacacugucagauucugaaggcaaggacacaccagggggauauugucugaccagauggaugcuaauugaagcugaacuaaaaugcuucgggaacacagcuguggcaaaauguaaugagaagcaugaugaggaauuuugugacaugcugaggcuguuugacuucaacaaacaagccauucaaagguugaaagcugaagcacaaaugagcauucaauugaucaacaaggcaguaaaugcuuugauaaaugaccaacuuauaaugaagaaccauuuacgagacaucaugggaaucccauacuguaauuacagcaaguauugguaccucaaccacacaaccacugggaaaacaucacugccuaaguguuggcuuguaucaaaugguucauacuuaaaugagacccacuuuucugaugauauugagcaacaagcugacaacaugaucacugagauguuacagaaggaguauauggaaaggcagggcaagacaccauugggccuaguugaccucuuuguguuuagcacaaguuucuaucucauuagcaucuuccuucaccuggucaaaauaccaacucauaggcauauuguaggcaagucgugucccaaaccucauagauugaaucacaugggcauauguuccuguggacucuacaaacagcccggugugccugugaaauggaagagaugaggacuaguaauaaggaaacuguaugaaugucugugggcaggaagugaagagauccuucuguaaagguuuuuggaauuaugucugcugaauaauaaacuuuuuugaaauaauaaaucugguagaaaaaugagaucuaaaaaaaaaaaaaaaaaaaaaaaaaaaaaaaaaaaaaaaaaaaaaaaaaaaaaaaaaaaaaaaaugcaucccccccccccccccccccccccccccccccaaaggcucuuuucagagccaccagaauu

SEQ ID NO: 2822 - RNA, 1816 nt, Artificial Sequence
  mRNA product Design b-4 comprising derived and/or modified sequence from LASV(G1442-SLE-2011;Clade IV)__AIT17180__GPC (wt)
gggagagucccgcagucggcguccagcggcucugcuuguucgugugugugucguugcaggccuuauucaagcuuaccaugggacaaauagugacauucuuucaggaagugccucaugugauagaggagguaaugaacauugugcucauugcacuauccauacuggcagugcugaagggucuauacaauguugcaacaugcggccugauugguuuagucaccuuccuauuguuaugugguaggucuugcacaacaacucuuuacaaaggaguuuacgaacuucagacucuggaauuaaacauggagacacucaauaugacuaugccucucucuuguacaaagaacaacagucaccacuauauaaggguggguaaugagacaggacuagaguugacccugaccaacacaagcaucaucaaucacaaguuuugcaaucuaucugaugcucacaaaaagaaccucuaugaucaugcuuugaugagcauaaucucgacuuuucacuuguccauucccaacuucaaccaauaugaggcaaugagcugugacuucaauggagggaagauuagugugcaguauaaccugagucacagcuaugcuggagaugcagccaaccauugugguacaguugcaaaugguguuuuacaaaccuucaugaggauggcuuggggugggaguuacaucgcccuugacucaggucguggcaauugggacuguauuaugacuaguuaucaauaccuaauaauucagaauacgaccugggaugaucauugccaauucucaagaccaucccccaucgguuaucuugggcuccucucacaaaggaccagagauguuuauaucaguagaagacugcuaggcacauucacauggacacugucagauucugaaggcaaggacacaccaggaggguacugucugaccagguggaugcuaauugaagcugaacugaaaugcuuuggcaacacagcuguagcaaaauguaaugagaaacaugaugaagaauucugugacaugcuaaggcuguuugacuucaauaaacaagcuauucagagguugaaagccgaagcacaaaugaguauucaguugaucaacaaagcagugaaugcuuugauaaaugaccaacuaauaaugaaaaaccaucuacgggacaucauggggauuccauacugcaauuacagcaaguacugguaucucaacaacacagccacugggaaaacaucacugcccaaauguuggcuuauaucaaauggcucauauuugaacgaaacucacuucucugaugacauugaacaggaagcugacaauaugaucacugagauguuacaaaaagaauacauggagaggcaggggaagacaccauuaggucugguugaccucuuuguguucagcacaaguuucuaucucauuagcaucuuccuucaccuagucaaaauaccaacucacaggcauauugugggcaaaucauguccuaaaccccauagguugaaucacauggguauuugcucuuguggacuuuauaaacaacccggugugccuguaagauggaagagaugaggacuaguaauaaggaaacuguaugaaugucugugggcaggaagugaagagauccuucuguaaagguuuuuggaauuaugucugcugaauaauaaacuuuuuugaaauaauaaaucugguagaaaaaugagaucuaaaaaaaaaaaaaaaaaaaaaaaaaaaaaaaaaaaaaaaaaaaaaaaaaaaaaaaaaaaaaaaaugcaucccccccccccccccccccccccccccccccaaaggcucuuuucagagccaccagaauu

SEQ ID NO: 2823 - RNA, 1816 nt, Artificial Sequence
  mRNA product Design b-4 comprising derived and/or modified sequence from LASV(G3010-SLE-2013;Clade IV)__AIT17344__GPC (wt)
gggagagucccgcagucggcguccagcggcucugcuuguucgugugugugucguugcaggccuuauucaagcuuaccaugggacagauaguaacauucuuccaggaagugccucaugugauagaagaggugaugaacauuguucucauugcacugucuauauuagcagugcugaaaggucuguacaauuuugcaacauguggccucguugguuugguuaccuuccuccuguuaugugguaggucuugcacaaccagucuuuacaaagggguuuaugagcuucagacucuggaacuaaacauggagacacucaauaugaccaugccucucuccuguacaaagaacaacagucaucauuauauuaugguggguaaugagacaggacuagaacugaccuugaccaacacgagcaucauuaaucauaaauuuugcaaucugucugaugcccacaaaaagaaccucuauaaucacgcucuuaugagcauaauuucaacuuuccaucuguccauucccaacuucaaucaguaugaggcaaugagcugcgauuucaaugggggaaagauuagugugcaguacaaccugagucacaguuaugcuggggaugcggccagccauuguggcacuguugcaaauggugucuuacagacuuucaugaggauggcuugggguggaagcuauauugcucuugacucaggcuauggcaagugggacugcauuaugacuaguuaucaguaccugauaauucaaaauacaaccugggaagaucacugccaauucucaagaccaucucccauuggcuaucucgggcuccucucacaaaggaccagagauauuuauauuaguagaagacugcugggcacauucacauggacacugucggauucugaagguaaggacacaccagggggauauuguuugaccagauggaugcuaauugaagcugaacuaaagugcuucgggaacacagcuguagcaaaauguaaugagaagcaugaugaggaauuuugugacaugcugaggcuguuugacuucaacaaacaagccauucaaagauugaaaacugaagcacaaaugagcauucaguugaucaacaaggcaguaaaugccuuaauaaaugaccagcuuauaaugaagaaccaucuacgagacauaaugggaauuccauacuguaacuacagcaaguauugguaccucaaccacacaaccacugggaaaacaucacugccuaaauguuggcuuguaucaaauggcucauacuugaaugagacccacuuuucugaugauauugaacaacaggcugacaacaugaucacugagauguuacagaaagaguacauggagaggcaggggaagacaccauugggccuggucgaccuuuuuguguucagcacaaguuucuaucucaucaguaucuuucuucaccuagucaaaauaccaacucauagacauauuguaggaaagucgugucccaaaccucacagauugaaucacaugggcauauguuccuguggacucuacaaacagcccggugugccugugagauggaagagaugaggacuaguaauaaggaaacuguaugaaugucugugggcaggaagugaagagauccuucuguaaagguuuuuggaauuaugucugcugaauaauaaacuuuuuugaaauaauaaaucugguagaaaaaugagaucuaaaaaaaaaaaaaaaaaaaaaaaaaaaaaaaaaaaaaaaaaaaaaaaaaaaaaaaaaaaaaaaaugcaucccccccccccccccccccccccccccccccaaaggcucuuuucagagccaccagaauu

SEQ ID NO: 2824 - RNA, 1816 nt, Artificial Sequence
  mRNA product Design b-4 comprising derived and/or modified sequence from LASV(G502-SLE-2009;Clade IV)__AIT17126__GPC (wt)
gggagagucccgcagucggcguccagcggcucugcuuguucgugugugugucguugcaggccuuauucaagcuuaccaugggacagauagugacauucuuccaggaaguaccucauguaauagaagaggugaugaacauuguucucauugcacugucuauacuagcagugcugaaaggucuguauaauuuugcaacauguggccucguuggucuacucaccuuccuccuauuguguggcaggucuugcacaaccggacuuuacaaagggguuuaugagcuucaaacucuggaacuaaacauggagacacucaauaugaccaugccucucuccugcacaaagaacaacagucaucauuauauaaugguggguaaugagacaggacuagaacugacuuugacuaacacgagcaucauuaaucauaaauuuugcaaucugucugaugcccacaaaaagaaccuuuaugaccacgcucuuaugagcauaauuucaacuuuccacuuguccauccccaacuucaaucaguaugaggcaaugagcugcgauuuuaaugggggaaagauuaguguacaguacaaccugagccacaguuaugcuggggaugcggcugaucauuguggcacuguugcaaauggugucuugcagacuuucaugaggauggccuggggugggagcuacauugcucuugacucaggucguggcaggugggacuguauuaugacuaguuaucaauauuugauaauccaaaauacaaccugggaagaucacugccaguucucaagaccaucucccaucgguuaucucgggcuccucucacaaagaacuagagacauuuacauuaguagaaggcuacuaggcacauucacauggacacugucagauucugaaggcaaggacacaccaggaggauauugucugacuagauggaugcugauugaggcugaauuaaaaugcuucgggaacacagcuguagcaaaauguaaugagaagcaugaugaggaauuuugugacaugcugaggcuguuugacuucaacaaacaagccauucaaagguuaaaagcugaagcacagaugagcauucaauugaucaacaaggcaguaaaugcuuugauaaaugaccaacuuguaaugaagaaccacuuacgggacaucaugggaauuccauacuguaauuacagcagguauugguaucucaaccacacaaccacuggaagaacaucacugccuaaauguuggcuugugucaaauggcucauacuuaaacgagacccacuuuucugaugauauugagcaacaagcugacaacaugaucacugagauguuacagaaggaauauauggaaaggcagggaaagacaccauuaggucugguugaccucuuuguguucagcacaaguuucuaucuuauuagcaucuuccuucaccuggucaagauaccaacucauaggcauauugugggcaagucgugucccaaaccucauagauugaaucacaugggcauauguuccuguggacucuacaaacagcccgguguaccugugaaauggaagagaugaggacuaguaauaaggaaacuguaugaaugucugugggcaggaagugaagagauccuucuguaaagguuuuuggaauuaugucugcugaauaauaaacuuuuuugaaauaauaaaucugguagaaaaaugagaucuaaaaaaaaaaaaaaaaaaaaaaaaaaaaaaaaaaaaaaaaaaaaaaaaaaaaaaaaaaaaaaaaugcaucccccccccccccccccccccccccccccccaaaggcucuuuucagagccaccagaauu

SEQ ID NO: 2825 - RNA, 1816 nt, Artificial Sequence
  mRNA product Design b-4 comprising derived and/or modified sequence from LASV(G733-SLE-2010;Clade IV)__AIT17154__GPC (wt)
gggagagucccgcagucggcguccagcggcucugcuuguucgugugugugucguugcaggccuuauucaagcuuaccaugggacagauagugacauucuuccaggaagugccucauguaauagaagaggugaugaacauuguucucauugcacugucuauacuagcaguccugaagggucuguacaacuuugcaacauguggcaucguugguuuggucagcuuucuccuguuguguggcaggucuugcacaaccagucuuuacaaagggguuuaugagcuucagacucuggagcuaaacauggagacacuuaacaugaccaugccucucucuugcacaaagaacaacagucaucauuauauaauggugggcaaugagacgggauuggaacugaccuugaccaacacgagcauuaucaaucauaaauuuugcaaucuaucugaugcccauaagaagaaccucuaugaccacgcccuuaugaguauaaucucaaccuuccacuuguccauccccaacuucaaucaguaugaagcaaugagcugugauuucaaugggggaaagauuaguguacaguacaaccugagucacagcuaugcuggggaugcagccaaccauuguggcacaauugcaaauggugucuuacagacuuucaugaggauggccuggggugggagcuacauugcucuugacucaggccgugacaggugggacugcauaaugaccaguuaucaauaucugauaauccaaaacacaaccugggaagaucacugccaauucucaagaccaucucccaucgguuaucuugggcuccucucacaaaggaccagagauauauauauuaguaggagacuacugggcacauuuacauggacauugucagauucugaagguaaggacacaccaggaggguauugucuaaccagauggaugcugauugaggcugagcugaaaugcuuugggaacacagcuguggcaaaaugcaaugagaaacaugaugaggaauuuugugauaugcuaaggcuguuugacuucaacaaacaagccauucaaagguuaaaagcugaggcacaaaugagcauucaguugaucaacaaagcagugaaugcuuugauaaacgaccaacuaauaaugaagaaccaucuacgggacaucaugggaauuccauacuguaauuacagcaaguacugguaccucaaccacacaacuacugggaaaacaucacugccuaaauguuggcuugugucgaaugguucauacuuaaacgagacucacuuuucugaugacauugaacaacaagcugacaauaugaucacugagauguuacagaaggaauacauggaaaggcaggggaagacaccauugggucuaguugaccucuuuguguucagcacaaguuucuaucucauuagcaucuuccuucauuuggucaaaauaccaacucauaggcauguuguaggcaagucgugucccaagccucacagauugaaucacaugggcauaugcuccugcggacucuauggacagccugguguaccugugaaauggaagagaugaggacuaguaauaaggaaacuguaugaaugucugugggcaggaagugaagagauccuucuguaaagguuuuuggaauuaugucugcugaauaauaaacuuuuuugaaauaauaaaucugguagaaaaaugagaucuaaaaaaaaaaaaaaaaaaaaaaaaaaaaaaaaaaaaaaaaaaaaaaaaaaaaaaaaaaaaaaaaugcaucccccccccccccccccccccccccccccccaaaggcucuuuucagagccaccagaauu

SEQ ID NO: 2826 - RNA, 1816 nt, Artificial Sequence
  mRNA product Design b-4 comprising derived and/or modified sequence from MOPV/LASV reassortant(IGS-1;Clade IV)__AFY05576__GPC (wt)
gggagagucccgcagucggcguccagcggcucugcuuguucgugugugugucguugcaggccuuauucaagcuuaccaugggacaaauagugacauucuuccaggaagugccucauguaauagaagaggugaugaacauuguucucauugcacugucuguacuagcagugcugaaaggucuguacaauuuugcaacguguggccuuguugguuuggucacuuuccuccuguugugugguaggucuugcacaaccagucuuuauaaagggguuuaugagcuucagacucuggaacuaaacauggagacacucaauaugaccaugccucucuccugcacaaagaacaacagucaucauuauauaauggugggcaaugagacaggacuagaacugaccuugaccaacacgagcauuauuaaucacaaauuuugcaaucugucugaugcccacaaaaagaaccucuaugaccacgcucuuaugagcauaaucucaacuuuccacuuguccauccccaacuucaaucaguaugaggcaaugagcugcgauuuuaaugggggaaagauuagugugcaguacaaccugagucacagcuaugcuggggaugcagccaaccauugugguacuguugcaaaugguguguuacagacuuuuaugaggauggcuuggggugggagcuacauugcucuugacucaggccguggcaacugggacuguauuaugacuaguuaucaauaucugauaauccaaaauacaaccugggaagaucacugccaauucucgagaccaucucccaucgguuaucucgggcuccucucacaaaggacuagagauauuuauauuaguagaagauugcuaggcacauucacauggacacugucagauucugaaggugaagacacaccagggggauauugucugaccagguggaugcuaauugaggcugaacuaaaaugcuucgggaacacagcuguggcaaaauguaaugagaagcaugaugaggaauuuugugacaugcugaggcuguuugacuucaacaaacaagccauucaaagguugaaagcugaagcacaaaugagcauucaguugaucaacaaagcaguaaaugcuuugauaaaugaccaacuuauaaugaagaaccaucuacgggacaucaugggaauuccauacuguaauuacagcaaguauugguaccucaaccacacaacuacugggagaacaucacugcccaaauguuggcuuguaucaaaugguucauacuugaacgagacccacuuuucugaugauauugaacaacaagcugacaauaugaucacugagauguuacagaaggaguauauggagaggcaggggaagacaccauugggucuaguugaccucuuuguguucagcacaaguuucuaucuuauuagcaucuuccuucaccuagucaaaauaccaacucauaggcauauuguaggcaagucgugucccaaaccucacagauugaaucauaugggcauuuguuccuguggacucuacaaacagccuggugugccugugaaauggaagagaugaggacuaguaauaaggaaacuguaugaaugucugugggcaggaagugaagagauccuucuguaaagguuuuuggaauuaugucugcugaauaauaaacuuuuuugaaauaauaaaucugguagaaaaaugagaucuaaaaaaaaaaaaaaaaaaaaaaaaaaaaaaaaaaaaaaaaaaaaaaaaaaaaaaaaaaaaaaaaugcaucccccccccccccccccccccccccccccccaaaggcucuuuucagagccaccagaauu

SEQ ID NO: 2827 - RNA, 1816 nt, Artificial Sequence
  mRNA product Design b-4 comprising derived and/or modified sequence from LASV(LM765-SLE-2012;Clade IV)__AIT17814__GPC (wt)
gggagagucccgcagucggcguccagcggcucugcuuguucgugugugugucguugcaggccuuauucaagcuuaccaugggacaaauagugacauucuuccaggaagugccccaugucauagaagaggugaugaacauuguucucauugcacuguccauacuagcagugcugaaaggucuguacaauuuugcaacauguggccucguuggcuuggucacuuuccuccuguuguguggcaggucuuguacaacuagccuuuacaaagggguuuaugagcuucagacucuggaacuaaacauggaaacacucaauaugaccaugccucucuccugcacaaagaacaauagucaucauuauauaauggugggcaaugagacaggacuagaacugaccuugaccaacacgagcauuauugaucauaaauuuugcaaucugucugaugcccacagaaagaaccucuaugaccacgcucuuaugagcauuaucucaacuuuccacuugucuaucccuaacuucaaucaguaugaggcaaugagcugcgauuucaaugggggaaagauuaguguacaguacaaccugagucacagcuaugccaaggacgcagccgaccauuguggaacuguugcaaaugguguauuacagacuuucaugaggauggcuuggggugggagcuacaucgcucuugacucaggccguggcaggugggacuguauuaugacuaguuaucaauaucugauaauccaaaauacaaccugggaagaucacugccaauucucgagaccaucucccaucgguuaucucgggcuccucucacagaggaccagagauauuuauauuaguagaaggcuacuaggcacauucacauggacacugucagauucugaaggcaaggacacaccagggggauauugucuaaccagauggaugcuaauugaggcugagcuaaagugcuucgggaauacagcuguggcaaaauguaaugagaagcaugaugaggaauuuugugacaugcugagguuguuugacuuuaacaagcaagccauucaaagguugaaagcugaagcacaaaugagcauucaguugaucaacaaagcaguaaaugcuuugauaaaugaccaacuuauaaugaagaaccaucuacgggacaucauggggauuccauacuguaauuacagcaaguauugguaccucaaccacacaacuacuggaaaaacaucacugcccaaguguuggcuuguaucaaaugguucauaccugaacgagacccacuuuucugaugacauugaacaacaagcugacaacaugaucaccgagauguuacagaaggaguauauggagaggcaggggaagacaccauugggucugguugaccucuuuguguucagcacaagcuucuaucucauuagcaucuuccuucaccuaguuaaaauaccaacucauaggcauauuguaggcaagccgugucccaaaccucacagguugaaucauaugggcauuuguuccuguggacucuauaaacagccuggugugccuguaaaauggaagagaugaggacuaguaauaaggaaacuguaugaaugucugugggcaggaagugaagagauccuucuguaaagguuuuuggaauuaugucugcugaauaauaaacuuuuuugaaauaauaaaucugguagaaaaaugagaucuaaaaaaaaaaaaaaaaaaaaaaaaaaaaaaaaaaaaaaaaaaaaaaaaaaaaaaaaaaaaaaaaugcaucccccccccccccccccccccccccccccccaaaggcucuuuucagagccaccagaauu

SEQ ID NO: 2828 - RNA, 1816 nt, Artificial Sequence
  mRNA product Design b-4 comprising derived and/or modified sequence from LASV(LM776-SLE-2012;Clade IV)__AIT17824__GPC (wt)
gggagagucccgcagucggcguccagcggcucugcuuguucgugugugugucguugcaggccuuauucaagcuuaccaugggacagauagugacauucuuccaggaagugccucauguaauagaagaggugaugaacauuguccucauugcgcugucuauauuagcagugcugaaaggucuguacaacuuugcaacauguggccucguugguuugguuacuuuccuccuguuguguggcaggucuugcacaaccaguguuuauaaaggggucuaugagcuucagacucuggaguuaaacauggagacacucaauaugaccaugccucucuccugcacaaagaauaacagucaucauuauauaaugguagguaaugagacaggacuagaacugaccuugaccaacacaagcauuauuaaucauaaauuuugcaaucugucugaugcccacaaaaagaaccucuaugaccaugcccuuaugagcauaauuucaacuuuccacuuguccauccccaacuucaaucaguaugaagcaaugagcugugauuucaaugggggaaagauuagugugcaguacaaccugagucacagcuaugcuggggaugcugccaaccauuguggcacuguugcaaauggugucuuacagacuuucaugaggauggcuuggggugggagcuacauugcucuugacucaggccauggcaagugggacuguauuaugacuaguuaucaauaucugauaauccaaaauacaaccugggaagaucacugccaauucucaagaccaucuccuaucgguuaucuugggcuucucucacaaaggaccagagauauuuauaucaguagaagacuacuaggcacauucacauggacacugucagauucugaaggcaaggacacaccagggggauauugucugaccagauggaugcugauugaagcugaauuaaaaugcuucgggaacacagcuguagcaaaauguaaugagaagcaugaugaggaauuuugugacauguugaggcuguuugacuucaacaaacaagccauucaaagguugaaagcugaagcacaaaugagcauucaguugaucaacaaggcaguaaaugccuugauaaaugaucaacuuauaaugaagaaccaucuacgggacaucaugggaaucccauacuguaauuacagcaaauauugguaccucaaccacacaacuacugggaaaacaucacugccuaaauguuggcuugucucaaaugggucauacuugaacgagacccacuuuucugaugauauugaacaacaagcugacaacaugaucacugagauguuacagaaggaguauauggagaggcaggggaagacaccauugggccuaguugaccucuuuguguucagcacaaguuucuaucucaucagcaucuuccuucaccuagucaaaauaccaacucauaggcauauuguaggcaagucguguccuaaaccucacagauugaaucacaugggcauauguuccuguggacucuacaaacagcccggugugccugugagauggaaaagaugaggacuaguaauaaggaaacuguaugaaugucugugggcaggaagugaagagauccuucuguaaagguuuuuggaauuaugucugcugaauaauaaacuuuuuugaaauaauaaaucugguagaaaaaugagaucuaaaaaaaaaaaaaaaaaaaaaaaaaaaaaaaaaaaaaaaaaaaaaaaaaaaaaaaaaaaaaaaaugcaucccccccccccccccccccccccccccccccaaaggcucuuuucagagccaccagaauu

SEQ ID NO: 2829 - RNA, 1816 nt, Artificial Sequence
  mRNA product Design b-4 comprising derived and/or modified sequence from LASV(Mad39;Clade IV)__ANH09722__GPC (wt)
gggagagucccgcagucggcguccagcggcucugcuuguucgugugugugucguugcaggccuuauucaagcuuaccauggggcaaauugugacauucuuucaggaagugccucauguaauugaggaggugaugaacauuguacucauugcacuauccauacuggcagugcuaaagggucuguacaauguugcaacauguggccucauuggcuugguuaccuuccuccugcugugugguagaucuuguacaaccacucuuuauaaagggguuuaugagcuucaagcucuggaacuaaacauggaaacacucaacaugacuaugccucucucuugcacaaaaaacaacucucaucacuauauaagggugggcaaugaaacaggccuagaacugaccuugaccaacacaagccucauaaaucacaaguucugcaaucugucugaugcucacaaaaagaaccucuaugaucaugcucuuaugagcauaaucucaacuuuccauuuguccauccccaacuucaaucaguaugaagcaaugagcugugauuucaaugaugggaagaucaguguacaguacaaccuaagccacaccuacgcuggggauacagccaaccacugugguacuguugcgaacgguguuuuacagacuuucaugaggauggcuuggggugggaguuacauugcucuugauucaggccgugguggaugggacugcauuaugaccagcuaucaauauuugauaauucagaacacaaccugggaagaucacugucaguucucaagaccaucucccaucggguaccuugggcuccucucacaaagaaccagagacauuuauaucaguagaagacuacugggcacauucacauggacacuaucagauucugaggguaaagacacaccagggggguacugucuaacuagguggaugcugauugaagcugaauugaaaugcuuuggcaacacagcuguagcaaaaugcaaugagaagcaugaugaggaauuuugugauauguugaggcuauuugacuuuaacaaacaagccauucaaagauugaaagcugaagcacaaaugaguauucagcugaucaacaaagcagugaaugccuugauaaaugaucaacugauaaugaaaaaccauuugcgggacauuauggggauuccguacugcaacuacagcaaguauugguaucuuaaucacacagucaccggaaagacaucauuacccaaaugcuggcuuguaucaaauggcucauaccuaaacgagacccacuucucugaugauauugagcagcaagcugauaacaugauuacugagaugcuacagaaggaauacauggagagacaggggaagacaccacuuggucugguugaccucuuuguauuuagcacaaguuucuaucucauuagcauuuuccuucaccuagugaaaauaccaacucauaggcauguugugggcaaaccguguccuaaaccucacagacugaaccacauggguauauguucuuguggguucuacaagcaaccuggugugccugugagauggaagagaugaggacuaguaauaaggaaacuguaugaaugucugugggcaggaagugaagagauccuucuguaaagguuuuuggaauuaugucugcugaauaauaaacuuuuuugaaauaauaaaucugguagaaaaaugagaucuaaaaaaaaaaaaaaaaaaaaaaaaaaaaaaaaaaaaaaaaaaaaaaaaaaaaaaaaaaaaaaaaugcaucccccccccccccccccccccccccccccccaaaggcucuuuucagagccaccagaauu

SEQ ID NO: 2830 - RNA, 1816 nt, Artificial Sequence
  mRNA product Design b-4 comprising derived and/or modified sequence from LASV(Z0947-SLE-2011;Clade IV)__AIT17840__GPC (wt)
gggagagucccgcagucggcguccagcggcucugcuuguucgugugugugucguugcaggccuuauucaagcuuaccaugggacaaauagugacauucuuccaggaagugccccaugucauagaagaggugaugaacaucguucucauugcacugucuauacuagcaguguugaaaggucuguacaauuuugcaacauguggccucguuggcuuggucacuuuccuccuguuguguggcaggucuugcacaauuagccuuuacaaggggguuuaugagcuucagacucuggaacuaaacauggaaacacucaauaugaccaugccucucuccuguacaaagaacaacagucaucauuauauaauggugggcaaugagacaggacuagaacugaccuugaccaacacgagcauuauuaaucauaaauuuugcaaucugucugaugcccacaaaaagaaccucuaugaccaugcucuuaugagcauuaucucaacuuuccacuuguccaucccuaacuucaaucaguaugaggcaaugagcugcgauuucaaugggggaaagauuagugugcaguacaaccugagucacagcuaugccggggacgcagccaaccauugugguacuguugcaaaugguguauuacagacuuucaugaggauggcuuggggugggagcuacaucgcucuugacucaggccgugacaggugggacuguauuaugacuaguuaucaauaucugauaauccaaaauacaaccugggaagaucacugccaauucucgagaccaucucccaucgguuaucucgggcuccucucacaaaggaccagagauauuuauauuaguagaaggcuacuaggcacauucacauggacacugucagauucugaaggcaaggacacaccagggggauauugucuaaccagauggaugcuaauugaggcugagcuaaagugcuucgggaacacagccguggcaaaauguaaugagaagcaugaugaggaauuuugugacaugcugagguuguuugacuuuaacaaacaagccauucaaagguugaaagcugaagcacaaaugagcauucaguugaucaacaaagcaguaaaugcuuugauaaaugaccaacuuauaaugaagaaccaucuacgggacaucauggggauuccauacuguaauuacagcaaguauugguaccucaaccacacaacuacuggaaaaacaucacugcccaaguguuggcuuguaucaaaugguucauaccugaacgagacccacuuuucugaugacaucgaacaacaagcugacaacaugaucacugagauguuacagaaggaguauauggagaggcaggggaagacaccauugggucugguugaccucuuuguguucagcacaagcuucuaucucauuagcaucuuccuucaccuaguuaaaauaccaacucauaggcauauuguaggcaagccgugucccaaaccucacagguugaaucauaugggcauuuguuccuguggacucuauaaacagccuggugugccugugaaauggaagagaugaggacuaguaauaaggaaacuguaugaaugucugugggcaggaagugaagagauccuucuguaaagguuuuuggaauuaugucugcugaauaauaaacuuuuuugaaauaauaaaucugguagaaaaaugagaucuaaaaaaaaaaaaaaaaaaaaaaaaaaaaaaaaaaaaaaaaaaaaaaaaaaaaaaaaaaaaaaaaugcaucccccccccccccccccccccccccccccccaaaggcucuuuucagagccaccagaauu

SEQ ID NO: 2831 - RNA, 1816 nt, Artificial Sequence
  mRNA product Design b-4 comprising derived and/or modified sequence from LASV(Josiah;Clade IV)__NP_694870__GPC (opt1) R7279
gggagagucccgcagucggcguccagcggcucugcuuguucgugugugugucguugcaggccuuauucaagcuuaccaugggccagaucgugaccuucuuccaggaggucccccacgugaucgaggaggugaugaacaucguccugaucgcccucagcgugcuggccgugcugaaggggcucuacaacuucgcgaccugcggccuggucgggcuggugacguuccuccugcugugcggccgcuccugcaccaccagccucuacaaggggguguacgagcugcagacccuggagcucaacauggagacgcugaacaugaccaugccgcuguccugcaccaagaacaacagccaccacuacaucauggucggcaacgagaccggccucgagcugacgcugaccaacaccuccaucaucaaccacaaguucugcaaccucagcgacgcccacaagaagaaccuguacgaccacgcccugauguccaucaucagcaccuuccaccucuccauccccaacuucaaccaguacgaggccaugagcugcgacuucaacgggggcaagaucuccgugcaguacaaccugagccacuccuacgccggggacgcggccaaccacugcggcacgguggccaacgggguccugcagaccuucaugcggauggccuggggcggcagcuacaucgcgcucgacuccgggcgcggcaacugggacugcaucaugaccagcuaccaguaccugaucauccagaacaccacgugggaggaccacugccaguucucccggcccagccccaucggguaccugggccuccugucccagcgcacccgggacaucuacaucagccgccggcugcucggcaccuucaccuggacgcugagcgacuccgaggggaaggacaccccgggcggguacugccugacccgcuggaugcucaucgaggccgagcugaagugcuucggcaacaccgccguggccaagugcaacgagaagcacgacgaggaguucugcgacaugcugcggcuguucgacuucaacaagcaggccauccagcgccugaaggcggaggcccagaugagcauccagcugaucaacaaggccgugaacgcccucaucaacgaccagcugaucaugaagaaccaccuccgggacaucauggggauccccuacugcaacuacuccaaguacugguaccucaaccacacgaccaccggccgcaccagccugcccaagugcuggcuggucuccaacggcagcuaccucaacgagacgcacuucuccgacgacaucgagcagcaggccgacaacaugaucaccgagaugcugcagaaggaguacauggagcggcaggggaagacgccccugggccucguggaccuguucguguucagcaccuccuucuaccugaucagcaucuuccugcaccucgucaagaucccgacccaccgccacaucguggggaaguccugccccaagccccaccggcugaaccacaugggcaucugcagcugcgggcuguacaagcagcccggcgugccggucaaguggaagcgcugaggacuaguaauaaggaaacuguaugaaugucugugggcaggaagugaagagauccuucuguaaagguuuuuggaauuaugucugcugaauaauaaacuuuuuugaaauaauaaaucugguagaaaaaugagaucuaaaaaaaaaaaaaaaaaaaaaaaaaaaaaaaaaaaaaaaaaaaaaaaaaaaaaaaaaaaaaaaaugcaucccccccccccccccccccccccccccccccaaaggcucuuuucagagccaccagaauu

SEQ ID NO: 2832 - RNA, 1813 nt, Artificial Sequence
  mRNA product Design b-4 comprising derived and/or modified sequence from LASV(LP;Clade I)__AAF86701__GPC (opt1)
gggagagucccgcagucggcguccagcggcucugcuuguucgugugugugucguugcaggccuuauucaagcuuaccaugggccagaucaucaccuucuuccaggaggugccccacgucaucgaggaggugaugaacaucgugcugaucgcccucagccugcuggccauccucaaggggcuguacaacaucgcgaccugcggcaucaucgggcuggucgccuuccucuuccugugcggcaaguccugcagccugacgcucaagggcggguacgagcugcagacccuggagcucaacauggagacccugaacaugaccaugccgcuguccugcacgaagaacagcucccaccacuacauccgcgugggcaacgagaccgggcucgagcugacccugaccaacacgagcaucaucaaccacaaguucugcaaccucuccgacgcccacaagaagaaccuguacgaccacgcccugaugagcaucaucuccaccuuccaccucagcauccccaacuucaaccaguacgaggccauguccugcgacuucaacggcgggaagaucagcgugcaguacaaccugucccacagcuacgcgggcgacgccgccgagcacugcgggaccgucgccaacggcgugcugcagaccuucaugcggauggcguggggcgggcgcuacaucgcccucgacuccggcaaggggaacugggacugcaucaugacgagcuaccaguaccugaucauccagaacaccaccugggaggaccacugccaguucucccggcccagccccaucggcuaccugggccuccugucccagcgcacccgggacaucuacaucagccgccggcugcucgggacguucaccuggacccugagcgacuccgagggcaacgagacccccgggggcuacugccugacgcgcuggaugcucaucgaggccgagcugaagugcuucgggaacaccgccguggccaagugcaacgagaagcacgacgaggaguucugcgacaugcugcggcuguucgacuucaacaagcaggcgauccgccggcugaaggccgaggcccagaugagcauccagcugaucaacaaggccgucaacgcccucaucaacgaccagcugaucaugaagaaccaccuccgcgacaucaugggcauccccuacugcaacuacuccaaguacugguaccucaaccacaccagcuccggccggaccagccugcccaagugcuggcugaucuccaacgggagcuaccucaacgagacgcaguucuccgacgacaucgagcagcaggcggacaacaugaucaccgagaugcugcagaaggaguacaucgagcgccagggcaagaccccgcuggggcucguggacaucuucaucuucagcaccuccuucuaccugaucagcaucuuccugcaccugaucaagaucccgacgcaccggcacaucgugggcaagcccugccccaagccccaccgccucaaccacaugggggucugcuccugcggccuguacaagcacccgggcgugcccaccaaguggaagcggugaggacuaguaauaaggaaacuguaugaaugucugugggcaggaagugaagagauccuucuguaaagguuuuuggaauuaugucugcugaauaauaaacuuuuuugaaauaauaaaucugguagaaaaaugagaucuaaaaaaaaaaaaaaaaaaaaaaaaaaaaaaaaaaaaaaaaaaaaaaaaaaaaaaaaaaaaaaaaugcaucccccccccccccccccccccccccccccccaaaggcucuuuucagagccaccagaauu

SEQ ID NO: 2833 - RNA, 1813 nt, Artificial Sequence
  mRNA product Design b-4 comprising derived and/or modified sequence from LASV(803213;Clade II)__AAF86703__GPC (opt1)
gggagagucccgcagucggcguccagcggcucugcuuguucgugugugugucguugcaggccuuauucaagcuuaccaugggccagaucaucaccuucuuccaggaggugccccacgucaucgaggaggugaugaacaucgugcugaucgcccucagccugcuggccauccucaaggggaucuacaacgucgcgaccugcggccuguucgggcugaucuccuuccuccugcugugcggccgcagcugcuccgugacguacaaggggguguacgagcuccagacccuggagcugaacauggccaaccucaacaugaccaugccgcugagcugcaccaagaacaacucccaccacuacaucauggucggcaacgagacgggccuggagcucacccugaccaacaccagcaucaucaaccacaaguucugcaaccuguccgacgcccacaagaagaaccucuacgaccacgcccugaugagcaucaucuccacguuccaccugagcauccccaacuucaaccaguacgaggccauguccugcgacuucaacgggggcaagaucagcgugcaguacaaccucucccacagcuucgcgguggacgccgccaaccacugcgggaccaucgccaacggcguccugcagaccuucaugcggauggcguggggcggguccuacaucgcccuggacagcggcaaggggaacugggacugcaucaugaccuccuaccaguaccucaucauccagaacacgaccugggaggaccacugccaguucagccgccccucccccaucggcuaccuggggcugcucagccagcggacccgcgacaucuacaucagccggcgccugcugggcaccuucacguggacccucuccgacagcgagggcaacgaggcccccgggggcuacugccugacccgguggaugcugaucgaggccgagcucaagugcuucgggaacaccgccguggcgaagugcaacgagaagcacgacgaggaguucugcgacaugcugcgccuguucgacuucaacaagcaggccaucaagcggcucaagacggaggcccagauguccauccagcugaucaacaaggccgugaacgcccugaucaacgaccagcucaucaugaagaaccaccuccgcgacaucaugggcauccccuacugcaacuacagccgguacugguaccugaaccacaccgucaccgggaagaccucccugccccgcugcuggcuggugagcaacggcuccuaccugaacgagacgcacuucagcgacgacaucgagcagcaggcggacaacaugaucaccgagaugcuccagaaggaguacauggaccggcagggcaagaccccgcuggggcugguggaccucuucgucuucuccaccagcuucuaccugaucuccaucuuccugcaccuggugaagaucccgacgcaccgccacaucgugggcaagcccugccccaagccccaccggcucaaccacauggggaucugcagcugcggccuguacaagcacccggggguccccgugaaguggaagcgcugaggacuaguaauaaggaaacuguaugaaugucugugggcaggaagugaagagauccuucuguaaagguuuuuggaauuaugucugcugaauaauaaacuuuuuugaaauaauaaaucugguagaaaaaugagaucuaaaaaaaaaaaaaaaaaaaaaaaaaaaaaaaaaaaaaaaaaaaaaaaaaaaaaaaaaaaaaaaaugcaucccccccccccccccccccccccccccccccaaaggcucuuuucagagccaccagaauu

SEQ ID NO: 2834 - RNA, 1813 nt, Artificial Sequence
  mRNA product Design b-4 comprising derived and/or modified sequence from LASV(GA391;Clade III)__CAA36645__GPC (opt1)
gggagagucccgcagucggcguccagcggcucugcuuguucgugugugugucguugcaggccuuauucaagcuuaccaugggccagaucgugaccuucuuccaggaggucccccacgugaucgaggaggugaugaacaucguccugaucgcccucagcauccuggccauccugaaggggcucuacaacguggcgaccugcggccugaucgggcuggugacguuccuccugcuguccggccgcagcugcucccucaucuacaaggggaccuacgagcugcagacccuggagcucaacauggagacccugaacaugacgaugccgcugagcugcaccaagaacaacucccaccacuacauccgggucggcaacgagaccggccucgagcugacccugacgaacaccagcauccucaaccacaaguucugcaaccuguccgacgcccacaagcgcaaccuguacgaccacagccucauguccaucaucagcaccuuccaccuguccauccccaacuucaaccaguacgaggccaugagcugcgacuucaacgggggcaagaucaccgugcaguacaaccugucccacagcuucgccguggacgccgcggggcacugcggcacgcucgccaacgggguccugcagaccuucaugcggauggccuggggcggcuccuacaucgcccuggacagcgggcgcggcaacugggacugcaucaugaccuccuaccaguaccucaucauccagaacaccacgugggacgaccacugccaguucagccggcccucccccaucggguaccugggccugcucagccagcgcacccgggacaucuacaucagccgccggcugcugggcaccuucaccuggacgcucuccgacagcgaggggaacgagaccccgggcggguacugccugacccgcuggaugcugaucgaggcggagcucaagugcuucggcaacaccgccguggccaagugcaacgagaagcacgacgaggaguucugcgacaugcugcggcuguucgacuucaacaagcaggccauccgccggcucaagacggaggcccagauguccauccagcugaucaacaaggcggugaacgcccugaucaacgaccagcucaucaugaagaaccaccuccgcgacaucauggggauccccuacugcaacuacagccgguacugguaccugaaccacaccuccaccggcaagaccagccugccccgcugcuggcugaucuccaacggcagcuaccugaacgagacgaaguucuccgacgacaucgagcagcaggccgacaacaugaucaccgagaugcuccagaaggaguacaucgaccggcaggggaagacgccccugggccuggucgaccuguucguguucagcaccuccuucuaccucaucagcaucuuccugcaccuggugaagaucccgacccaccgccacaucgucgggaagcccugccccaagccccaccggcucaaccacaugggcaucugcuccugcgggcuguacaagcagccgggcgugcccgugcgcuggaagcggugaggacuaguaauaaggaaacuguaugaaugucugugggcaggaagugaagagauccuucuguaaagguuuuuggaauuaugucugcugaauaauaaacuuuuuugaaauaauaaaucugguagaaaaaugagaucuaaaaaaaaaaaaaaaaaaaaaaaaaaaaaaaaaaaaaaaaaaaaaaaaaaaaaaaaaaaaaaaaugcaucccccccccccccccccccccccccccccccaaaggcucuuuucagagccaccagaauu

SEQ ID NO: 2835 - RNA, 1816 nt, Artificial Sequence
  mRNA product Design b-4 comprising derived and/or modified sequence from LASV(AV;Clade V)__CCA30314__GPC (opt1)
gggagagucccgcagucggcguccagcggcucugcuuguucgugugugugucguugcaggccuuauucaagcuuaccaugggccagaucgugaccuucuuccaggaggucccccacgugaucgaggaggugaugaacaucguccugaucgcccucagcauccuggccgugcugaaggggcucuacaacaucgcgaccugcggccugaucgggcugaucacguuccuccugcugugcggccgcuccugcagcuccaaccucuacaaggggguguacgagcugcagagccuggaccucaacauggagacccugaacaugaccaugccgcuguccugcaccaagaacaacagccaccacuacauccgggucggcaacgacacgggccucgagcugacccugaccaacaccuccauccucaaccacaaguucugcaaccugagcgacgcccacaagaaggaccuguacgaccacgcccucauguccaucaucagcacguuccaccuguccauccccaacuucaaccaguacgaggccaugagcugcgacuucaacgggggcaagaucuccgugcaguacaaccugagccacuccuacgccaucgacgcggccaaccacugcgggaccguggccaacggcauccuccagaccuucaugcgcauggccuggggcgggagcuacaucgcgcuggacuccggccgggggaacugggacugcaucaugaccagcuaccaguaccugaucauccagaacacgaccugggagaaccacugccaguucucccgccccagccccaucggcuaccucgggcugcugagccagcggacccgcgacaucuacaucucccggcgccuccugggcaccuucacguggacccugagcgacuccgagggcaacgccacccccgggggcuacugccucacccgguggaugcugaucgaggccgagcugaagugcuucgggaacacggccgucgccaagugcaacgagaagcacgacgaggaguucugcgacaugcuccgccuguucgacuucaacaagcaggcgaucagccggcugaaguccgaggcccagaugagcauccagcucaucaacaaggccgugaacgcccugaucaacgaccagcugaucaugaagaaccaccuccgcgacaucaugggcauccccuacugcaacuacuccaaguacugguaccugaaccacaccaucaccgggaagaccagccugcccaagugcuggcucguguccaacggcagcuaccugaacgagacgcacuucuccgacgacaucgagcagcaggccgacaacaugaucaccgagaugcugcagaaggaguacauggagcggcagggcaagaccccgcucgggcuggucgaccuguucguguucagcaccuccuucuaccugaucagcaucuuccuccgccuggugaagaucccgacgcaccggcacaucgucggcaagcccugccccaagccccaccgccugaaccacauggggaucugcuccugcggccucuacaagcagccgggggugcccgugcgguggaagcgcugaggacuaguaauaaggaaacuguaugaaugucugugggcaggaagugaagagauccuucuguaaagguuuuuggaauuaugucugcugaauaauaaacuuuuuugaaauaauaaaucugguagaaaaaugagaucuaaaaaaaaaaaaaaaaaaaaaaaaaaaaaaaaaaaaaaaaaaaaaaaaaaaaaaaaaaaaaaaaugcaucccccccccccccccccccccccccccccccaaaggcucuuuucagagccaccagaauu

SEQ ID NO: 2836 - RNA, 1813 nt, Artificial Sequence
  mRNA product Design b-4 comprising derived and/or modified sequence from LASV(Togo/2016/7082;Clade VI)__AMR44577__GPC (opt1)
gggagagucccgcagucggcguccagcggcucugcuuguucgugugugugucguugcaggccuuauucaagcuuaccaugggccagaucaucaccuucuuccaggaggugccccacgucaucgaggaggugaugaacaucgugcugaucgcccucagccugcuggccauccucaagggggucuacaacguggcgaccugcggcaucaucgggcuggugacguuccuguuccucugcggccgcuccugcagccugaucuacaagggguccuacgagcugcagacccucgagcugaacauggagacccugaacaugaccaugccgcucagcugcacgaagaacuccagccaccacuacauccgggucggcaacgagaccggccuggagcugacccucaccaacacguccaucaucaaccacaaguucugcaaccugagcgacgcccacaagcgcaaccuguacgaccacgcccucauguccauccugagcaccuuccaccuguccauccccaacuucaaccaguacgaggccaugagcugcgacuucaacgggggcaagaucuccgugcaguacaaccucagccacgccuacgcgguggacgccgccgagcacugcgggaccgucgccaacggcgugcugcagaccuucaugcggauggcguggggcggguccuacaucgcccuggacagcggccgcgggaacugggacugcaucaugacguccuaccaguaccucaucauccagaacaccaccugggaggaccacugccaguucagccggcccucccccaucggcuaccuggggcugcucagccagcgcacccgggacaucuacaucagccgccggcugcugggcacguucaccuggacccucuccgacagcgagggcaacgagacccccgggggcuacugccugacgcgcuggaugcugaucgaggccgagcucaagugcuucgggaacaccgccguggccaagugcaacgagaagcacgacgaggaguucugcgacaugcugcggcuguucgacuucaacaagcaggcgauccagcgccucaaguccgaggcccagaugagcauccagcugaucaacaaggccgucaacgcccugaucaacgaccagcucaucaugaagaaccaccuccgggacaugaugggcauccccuacugcaacuacuccaaguacugguaccugaaccacaccagcuccgggcgcaccagccugcccaagugcuggcugguguccaacggcagcuaccugaacgagacgcacuucuccgacgacaucgagcagcaggccgacaacaugaucaccgagaugcuccagaaggaguacaucgaccggcagggcaagaccccgcuggggcugguggaccucuucgucuucagcaccuccuucuaccugaucagcaucuuccugcaccugaucaagaucccgacgcaccgccacaucgugggcaagcccugccccaagccccaccggcucaaccacauggggaucugcuccugcggccuguacaagcagccgggggugcccacccgcuggaagcggugaggacuaguaauaaggaaacuguaugaaugucugugggcaggaagugaagagauccuucuguaaagguuuuuggaauuaugucugcugaauaauaaacuuuuuugaaauaauaaaucugguagaaaaaugagaucuaaaaaaaaaaaaaaaaaaaaaaaaaaaaaaaaaaaaaaaaaaaaaaaaaaaaaaaaaaaaaaaaugcaucccccccccccccccccccccccccccccccaaaggcucuuuucagagccaccagaauu

SEQ ID NO: 2837 - RNA, 1813 nt, Artificial Sequence
  mRNA product Design b-4 comprising derived and/or modified sequence from LASV(KAK-428;Clade n.d. (VII))__ANH09740__GPC (opt1)
gggagagucccgcagucggcguccagcggcucugcuuguucgugugugugucguugcaggccuuauucaagcuuaccaugggccagaucgugaccuucuuccaggaggucccccacgugaucgaggaggugaugaacaucguccugaucgcccucagccugcuggccauccucaaggggcuguacaacuucgcgaccugcggcgugaucgggcugaucacguuccuccugcugugcggccgcuccugcagcgccaccuacaaggggcaguacgagcuccagacccuggagcugaacauggagucccucaacaugaccaugccgcugagcugcacgaagaacaacucccaccacuacauccgggccggcaacaacaccggccuggagcucacccugaccaacacgagcaucaucucccacaaguucugcaaccugagcgacgcccacaagaagaaccucuacgaccacacccugauguccaucaucaccaccuuccaccugagcauccccaacuucaaccaguacgaggccauguccugcgacuucaacgggggcaagaucagcauccaguacaaccucucccacagcuacgcgggggacgccgcccagcacugcggcacgguggccaacgggguccugcagaccuucaugcgcauggcguggggcggcuccuaccuggcccucgacagcgggcggcgcggcugggacugcaucaucuccagcuaccaguaccugaucauccagaacaccaccugggacgaccacugccaguucucccggcccagccccaucggguaccugggcuucgugagccagaagacgcgcgacaucuacaucucccggcgccuccugggcaccuucaccuggacccugagcgacuccgaggggcacgacaugccgggcggguacugccucacgcgguggaugcugaucgaggccgaccugaagugcuucggcaacaccgccguggccaagugcaacgagaagcacgacgaggaguucugcgacauguggcgccucuucgacuucaacaagcaggcgauccagcggcugaaggccgaggcccagaugaacauccagcugaucaacaaggccgucaacgcccucaucaacgaccagcugaugaugaagaaccaccuccgcgacaucauggggauccccuacugcaacuacagcaaguucugguaccugaacaacaccaccacgggccggaccucccugccccgcugcuggcugaucagcaacggcuccuaccucaacgagacccacuucagcgacgacaucgagcagcaggcggacaacaugaucaccgagaugcugcagaaggaguacauggaccggcaggggaagacgccccugggccucguggaccuguucguguucuccaccagcuucuaccugaucaccaucuuccuccaccuggucaagaucccgacccaccgccacaucguggggaagcccugccccaagccccaccggcugaaccacaugggcaucugcuccugcgggcuguacaagcagccgggcgugcccguccgcuggaagcggugaggacuaguaauaaggaaacuguaugaaugucugugggcaggaagugaagagauccuucuguaaagguuuuuggaauuaugucugcugaauaauaaacuuuuuugaaauaauaaaucugguagaaaaaugagaucuaaaaaaaaaaaaaaaaaaaaaaaaaaaaaaaaaaaaaaaaaaaaaaaaaaaaaaaaaaaaaaaaugcaucccccccccccccccccccccccccccccccaaaggcucuuuucagagccaccagaauu

SEQ ID NO: 2838 - RNA, 1813 nt, Artificial Sequence; identical to SEQ ID NO: 2832
  mRNA product Design b-4 comprising derived and/or modified sequence from LASV(Pinneo-NIG-1969;Clade I)__AIT17836__GPC (opt1)

SEQ ID NO: 2839 - RNA, 1813 nt, Artificial Sequence
  mRNA product Design b-4 comprising derived and/or modified sequence from LASV(ISTH0009-NIG-2011;Clade II)__AIT17404__GPC (opt1)
gggagagucccgcagucggcguccagcggcucugcuuguucgugugugugucguugcaggccuuauucaagcuuaccaugggccagaucaucaccuucuuccaggaggugccccacgucaucgaggaggugaugaacaucgugcugaucgcccucagccugcuggccauccucaaggggaucuacaacgucgcgaccugcggccuguucgggcugguguccuuccuccugcugugcggccgcagcugcuccacgaccuacaaggggguguacgagcuccagacccuggagcuggacauggccagccucaacaugaccaugccgcuguccugcacgaagaacaacagccaccacuacaucauggucggcaacgagaccggccuggagcucacccugaccaacacguccaucaucaaccacaaguucugcaaccugagcgacgcccacaagaagaaccucuacgaccacgcccugauguccaucaucagcaccuuccaccuguccauccccaacuucaaccaguacgaggccaugagcugcgacuucaacgggggcaagaucuccgugcaguacaaccucagccacgcguacgccguggacgccgccaaccacugcgggaccaucgcgaacggcguccugcagaccuucaugcggauggccuggggcggguccuacaucgcccuggacagcggcaagggguccugggacugcaucaugacgagcuaccaguaccucaucauccagaacaccaccugggaggaccacugccaguucucccgccccagccccaucggcuaccuggggcugcucagccagcggacccgcgacaucuacaucucccggcgccugcugggcacguucaccuggacccucagcgacuccgagggcaacgagacccccgggggcuacugccugacgcgguggaugcugaucgaggccgagcucaagugcuucgggaacaccgccguggcgaagugcaacgagaagcacgacgaggaguucugcgacaugcugcgccuguucgacuucaacaagcaggccauccggcgccucaagaccgaggcccagaugagcauccagcugaucaacaaggccgugaacgcccugaucaacgaccagcucaucaugaagaaccaccuccgggacaucaugggcaucccguacugcaacuacuccaaguacugguaccugaaccacaccgucacggggaagaccagccugccccgcugcuggcugguguccaacggcagcuaccugaacgagacccacuucuccgacgacaucgagcagcaggcggacaacaugaucaccgagcuccugcagaaggaguacauggaccggcagggcaagacgccccuggggcucguggaccuguucgucuucagcaccuccuucuaccugaucagcaucuuccugcaccucaucaagaucccgacccaccgccacaucaccggcaagcccugccccaagccccaccggcugaaccacauggggaucugcuccugcggccuguacaagcacccgggggugcccgugaaguggaagcgcugaggacuaguaauaaggaaacuguaugaaugucugugggcaggaagugaagagauccuucuguaaagguuuuuggaauuaugucugcugaauaauaaacuuuuuugaaauaauaaaucugguagaaaaaugagaucuaaaaaaaaaaaaaaaaaaaaaaaaaaaaaaaaaaaaaaaaaaaaaaaaaaaaaaaaaaaaaaaaugcaucccccccccccccccccccccccccccccccaaaggcucuuuucagagccaccagaauu

SEQ ID NO: 2840 - RNA, 1813 nt, Artificial Sequence
  mRNA product Design b-4 comprising derived and/or modified sequence from LASV(ISTH2010-NIG-2012;Clade II)__AIT17482__GPC (opt1)
gggagagucccgcagucggcguccagcggcucugcuuguucgugugugugucguugcaggccuuauucaagcuuaccaugggccagaucaucaccuucuuccaggaggugccccacgucaucgaggaggugaugaacaucgugcugaucgcccucagccugcuggccauccucaaggggaucuacaacgucgcgaccugcggccuguucgggcugguguccuuccuccugcugugcggccgcagcugcuccacgaccuacaaggggguguacgagcuccagacccuggagcuggacauggccagccucaacaugaccaugccgcuguccugcacgaagaacaacagccaccacuacaucauggucggcaacgagaccggccuggagcucacccugaccaacacguccaucaucaaccacaaguucugcaaccugagcgacgcccacaagaagaaccucuacgaccacgcccugauguccaucaucagcaccuuccaccuguccauccccaacuucaaccaguacgaggccaugagcugcgacuucaacgggggcaagaucuccgugcaguacaaccucagccacgcguacgccguggacgccgccaaccacugcgggaccaucgcgaacggcguccugcagaccuucaugcggauggccuggggcggguccuacaucgcccuggacagcggcaagggguccugggacugcaucaugacgagcuaccaguaccucaucauccagaacaucaccugggaggaccacugccaguucucccgccccagccccaucggcuaccuggggcugcucagccagcggacccgcgacaucuacaucucccggcgccugcugggcaccuucacguggacccucagcgacuccgagggcaacgagacccccgggggcuacugccugacccgguggaugcugaucgaggccgagcucaagugcuucgggaacacggccguggcgaagugcaacgagaagcacgacgaggaguucugcgacaugcugcgccuguucgacuucaacaagcaggccauccggcgccucaagaccgaggcccagaugagcauccagcugaucaacaaggccgugaacgcccugaucaacgaccagcucaucaugaagaaccaccuccgggacaucaugggcauccccuacugcaacuacuccaaguacugguaccugaaccacaccgucaccgggaagacgagccugccccgcugcuggcugguguccaacggcagcuaccugaacgagacccacuucuccgacgacaucgagcagcaggcggacaacaugaucaccgagcuccugcagaaggaguacaucgaccggcagggcaagaccccgcuggggcucguggaccuguucgucuucagcacguccuucuaccugaucagcaucuuccugcaccucgugaagaucccgacccaccgccacguggucggcaagcccugccccaagccccaccggcugaaccacauggggaucugcuccugcggccuguacaagcacccgggggugcccgugaaguggaagcgcugaggacuaguaauaaggaaacuguaugaaugucugugggcaggaagugaagagauccuucuguaaagguuuuuggaauuaugucugcugaauaauaaacuuuuuugaaauaauaaaucugguagaaaaaugagaucuaaaaaaaaaaaaaaaaaaaaaaaaaaaaaaaaaaaaaaaaaaaaaaaaaaaaaaaaaaaaaaaaugcaucccccccccccccccccccccccccccccccaaaggcucuuuucagagccaccagaauu

SEQ ID NO: 2841 - RNA, 1813 nt, Artificial Sequence
  mRNA product Design b-4 comprising derived and/or modified sequence from LASV(Lassa virus/H.sapiens-wt/NGA/2015/ISTH_0543;Clade II)__AVO03639__GPC (opt1)
gggagagucccgcagucggcguccagcggcucugcuuguucgugugugugucguugcaggccuuauucaagcuuaccaugggccagaucaucaccuucuuccaggaggugccccacgucaucgaggaggugaugaacaucgugcugaucgcccucagccugcuggccauccucaaggggaucuacaacgucgcgaccugcggccuguucgggcugguguccuuccuccugcugugcggccgcagcugcuccacgaccuacaaggggguguacgagcuccagacccuggagcuggacauggccaaccucaacaugaccaugccgcugagcugcacgaagaacaacucccaccacuacaucauggucggcaacgagaccggccuggagcucacccugaccaacacgagcaucaucaaccacaaguucugcaaccuguccgacgcccacaagaagaaccucuacgaccacgcccugaugagcaucaucuccaccuuccaccugagcauccccaacuucaaccaguacgaggccauguccugcgacuucaacgggggcaagaucagcgugcaguacaaccucucccacaccuacgcgguggacgccgccaaccacugcgggaccaucgccaacggcguccugcagacguucaugcggauggcguggggcgggagcuacaucgcccuggacuccggcaaggggagcugggacugcaucaugaccuccuaccaguaccucgugauccagaacaccaccugggaggaccacugccaguucagccgccccucccccaucggcuaccuggggcugcucagccagcggacgcgcgacaucuacaucagccggcgccugcugggcaccuucaccuggacccucuccgacagcgagggcaacgagacgcccgggggcuacugccugacccgguggaugcugaucgaggccgagcucaagugcuucgggaacaccgccguggccaagugcaacgagaagcacgacgaggaguucugcgacaugcugcgccuguucgacuucaacaagcaggcgauccggcgccucaagaccgaggcccagauguccauccagcugaucaacaaggccgucaacgcccugaucaacgaccagcucaucaugaagaaccaccuccgggacaucaugggcauccccuacugcaacuacagcaaguacugguaccugaaccacacggugaccgggaagaccucccugccccgcugcuggcuggugagcaacggcuccuaccugaacgagacccacuucagcgacgacaucgagcagcaggccgacaacaugaucacggagcuccugcagaaggaguacaucgaccggcagggcaagaccccgcuggggcucgucgaccuguucguguucuccaccagcuucuaccugaucuccaucuuccugcaccucgugaagaucccgacccaccgccacaucacgggcaagcccugccccaagccccaccggcugaaccacauggggaucugcagcugcggccuguacaagcacccggggguccccgugaaguggaagcgcugaggacuaguaauaaggaaacuguaugaaugucugugggcaggaagugaagagauccuucuguaaagguuuuuggaauuaugucugcugaauaauaaacuuuuuugaaauaauaaaucugguagaaaaaugagaucuaaaaaaaaaaaaaaaaaaaaaaaaaaaaaaaaaaaaaaaaaaaaaaaaaaaaaaaaaaaaaaaaugcaucccccccccccccccccccccccccccccccaaaggcucuuuucagagccaccagaauu

SEQ ID NO: 2842 - RNA, 1813 nt, Artificial Sequence
  mRNA product Design b-4 comprising derived and/or modified sequence from LASV(Lassa virus/H.sapiens-wt/NGA/2016/ISTH_0009;Clade II)__AVO03571__GPC (opt1)
gggagagucccgcagucggcguccagcggcucugcuuguucgugugugugucguugcaggccuuauucaagcuuaccaugggccagaucaucaccuucuuccaggaggugccccacgucaucgaggaggugaugaacaucgugcugaucgcccucagccugcuggccauccucaaggggaucuacaacgucgcgaccugcggccugcuggggcucguguccuuccugcugcucugcggccgcagcugcuccacgaccuacaaggggguguacgagcugcagacccuggagcucgacauggccagccugaacaugaccaugccgcuguccugcacgaagaacaacagccaccacuacaucauggucggcaacgagaccggccucgagcugacccugaccaacacguccaucaucaaccacaaguucugcaaccucagcgacgcccacaagaagaaccuguacgaccacgcccugauguccaucaucagcaccuuccaccucuccauccccaacuucaaccaguacgaggccaugagcugcgacuucaacgggggccggaucuccgugcaguacaaccugagccacuccuacgcgguggacgccgccaaccacugcgggaccaucgccaacggcguccugcagaccuucaugcgcauggcguggggcgggagcuacaucgcccucgacuccggcaaggggagcugggacugcaucaugacguccuaccaguaccugaucauccagaacaccaccugggaggaccacugccaguucagccggcccagccccaucggcuaccuggggcuccugucccagcgcacccgggacaucuacaucagccgccggcugcucggcacguucaccuggacccuguccgacagcgagggcaacgagacccccgggggcuacugccugacgcgcuggaugcucaucgaggccgagcugaagugcuucgggaacaccgccguggccaagugcaacgagaagcacgacgaggaguucugcgacaugcugcggcuguucgacuucaacaagcaggcgauccgccggcugaagaccgaggcccagauguccauccagcugaucaacaaggccgugaacgcccucaucaacgaccagcugaucaugaagaaccaccuccgcgacaucaugggcaucccguacugcaacuacagcaaguacugguaccucaaccacaccgucacggggaagaccucccugccccggugcuggcuggugagcaacggcuccuaccucaacgagacccacuucagcgacgacaucgagcagcaggccgacaacaugaucaccgagcugcugcagaaggaguacaucgaccgccagggcaagacgccccucgggcugguggaccuguucgucuucuccaccagcuucuaccugaucuccaucuuccuccaccuggugaagaucccgacccaccggcacaucaccggcaagcccugccccaagccccaccgccugaaccacauggggaucugcagcugcggccucuacaaccacccgggggugcccgucaaguggaagcggugaggacuaguaauaaggaaacuguaugaaugucugugggcaggaagugaagagauccuucuguaaagguuuuuggaauuaugucugcugaauaauaaacuuuuuugaaauaauaaaucugguagaaaaaugagaucuaaaaaaaaaaaaaaaaaaaaaaaaaaaaaaaaaaaaaaaaaaaaaaaaaaaaaaaaaaaaaaaaugcaucccccccccccccccccccccccccccccccaaaggcucuuuucagagccaccagaauu

SEQ ID NO: 2843 - RNA, 1813 nt, Artificial Sequence
  mRNA product Design b-4 comprising derived and/or modified sequence from LASV(Lassa virus/H.sapiens-wt/NGA/2016/ISTH_0017;Clade II)__AVO03567__GPC (opt1)
gggagagucccgcagucggcguccagcggcucugcuuguucgugugugugucguugcaggccuuauucaagcuuaccaugggccagaucaucaccuucuuccaggaggugccccacgucaucgaggaggugaugaacaucgugcugaucgcccucagccugcuggccauccucaaggggaucuacaacgucgcgaccugcggccuguucgggcugguguccuuccuccugcugugcggccgcagcugcuccacgaccuacaaggggguguacgagcuccagacccuggagcuggacauggccagccucaacaugaccaugccgcuguccugcacgaagaacaacagccaccacuacaucauggucggcaacgagaccggccuggagcucacccugaccaacacguccaucaucaaccacaaguucugcaaccugagcgacgcccacaagaagaaccucuacgaccacgcccugauguccaucaucagcaccuuccaccuguccauccccaacuucaaccaguacgaggccaugagcugcgacuucaacgggggcaagaucuccgugcaguacaaccucagccacaccuacgcgaucgacgccgccaaccacugcgggaccaucgccaacggcgugcugcagacguucaugcggauggcguggggcggguccuacaucgcccuggacagcggcaagggguccugggacugcaucaugaccagcuaccaguaccucaucauccagaacaccaccugggaggaccacugccaguucucccgccccagccccaucggcuaccuggggcugcucagccagcggacgcgcgacaucuacaucucccggcgccugcugggcaccuucaccuggacccucagcgacuccgagggcaacgagacgcccgggggcuacugccugacccgguggaugcugaucgaggccgagcucaagugcuucgggaacaccgccgucgccaagugcaacgagaagcacgacgaggaguucugcgacaugcugcgccuguucgacuucaacaagcaggcgauccggcgccucaagaccgaggcccagaugagcauccagcugaucaacaaggccgugaacgcccugaucaacgaccagcucaucaugaagaaccaccuccgggacaucaugggcauccccuacugcaacuacuccaaguacugguaccugaaccacacggugaccgggaagaccagccugccccgcugcuggcuggucuccaacggcagcuaccugaacgagacccacuucuccgacgacaucgagcagcaggccgacaacaugaucacggagcuccugcagaaggaguacauggaccggcagggcaagaccccgcuggggcucguggaccuguucguguucagcaccuccuucuaccugaucagcaucuuccugcaccucguccgcaucccgacccaccggcacgugaucggcaagcccugccccaagccccaccgccugaaccacauggggaucugcuccugcggccuguacaagcacccgggggugcccgucaaguggaagcggugaggacuaguaauaaggaaacuguaugaaugucugugggcaggaagugaagagauccuucuguaaagguuuuuggaauuaugucugcugaauaauaaacuuuuuugaaauaauaaaucugguagaaaaaugagaucuaaaaaaaaaaaaaaaaaaaaaaaaaaaaaaaaaaaaaaaaaaaaaaaaaaaaaaaaaaaaaaaaugcaucccccccccccccccccccccccccccccccaaaggcucuuuucagagccaccagaauu

SEQ ID NO: 2844 - RNA, 1813 nt, Artificial Sequence
  mRNA product Design b-4 comprising derived and/or modified sequence from LASV(Lassa virus/H.sapiens-wt/NGA/2018/ISTH_0959;Clade II)__AVV65099__GPC (opt1)
gggagagucccgcagucggcguccagcggcucugcuuguucgugugugugucguugcaggccuuauucaagcuuaccaugggccagaucaucaccuucuuccaggaggugccccacgucaucgaggaggugaugaacaucgugcugaucgcccucagccugcuggccauccucaaggggaucuacaacgucgugaccugcggccuguucgggcugguguccuuccuccugcugugcggccgcagcugcuccacgaccuacaagggggucuacgagcuccagacccuggagcuggacauggcgagccucaacaugaccaugccgcuguccugcacgaagaacaacagccaccacuacaucauggugggcaacgagaccggccuggagcucacccugaccaacacguccaucaucaaccacaaguucugcaaccugagcgacgcccacaagaagaaccucuacgaccacgcccugauguccaucaucagcaccuuccaccuguccauccccaacuucaaccaguacgaggccaugagcugcgacuucaacgggggcaagaucuccgugcaguacaaccucagccacgccuacgcgaucgacgccgccaaccacugcgggaccaucgccaacggcguccugcagaccuucaugcggauggcguggggcggguccuacaucgcccuggacagcggcaagggguccugggacugcaucaugacgagcuaccaguaccucaucauccagaacaccaccugggaggaccacugccaguucucccgccccagccccaucggcuaccuggggcugcucagccagcggacccgcgacaucuacaucucccggcgccugcugggcacguucaccuggacccucagcgacuccgagggcaacgagacccccgggggcuacugccugacgcgguggaugcugaucgaggccgagcucaagugcuucgggaacaccgccguggccaagugcaacgagaagcacgacgaggaguucugcgacaugcugcgccuguucgacuucaacaagcaggcgauccggcgccucaagaccgaggcccagaugagcauccagcugaucaacaaggccgugaacgcccugaucaacgaccagcucaucaugaagaaccaccuccgggacaucaugggcaucccguacugcaacuacuccaaguacugguaccugaaccacaccgucacggggaagaccagccugccccgcugcuggcugguguccaacggcagcuaccugaacgagacccacuucuccgacgacaucgagcagcaggccgacaacaugaucaccgagcuccugcagaaggaguacaucgaccggcagggcaagacgccccuggggcucguggaccuguucgucuucagcaccuccuucuaccugaucagcaucuuccugcaccucgugaagaucccgacccaccgccacgugaucggcaagcccugccccaagccccaccggcugaaccacauggggaucugcuccugcggccuguacaagcacccggggguccccgugaaguggaagcgcugaggacuaguaauaaggaaacuguaugaaugucugugggcaggaagugaagagauccuucuguaaagguuuuuggaauuaugucugcugaauaauaaacuuuuuugaaauaauaaaucugguagaaaaaugagaucuaaaaaaaaaaaaaaaaaaaaaaaaaaaaaaaaaaaaaaaaaaaaaaaaaaaaaaaaaaaaaaaaugcaucccccccccccccccccccccccccccccccaaaggcucuuuucagagccaccagaauu

SEQ ID NO: 2845 - RNA, 1813 nt, Artificial Sequence
  mRNA product Design b-4 comprising derived and/or modified sequence from LASV(LASV003-NIG-2008;Clade II)__AIT17580__GPC (opt1)
gggagagucccgcagucggcguccagcggcucugcuuguucgugugugugucguugcaggccuuauucaagcuuaccaugggccagaucaucaccuucuuccaggaggugccccacgucaucgaggaggugaugaacaucgugcugaucgcccucagccugcuggccauccucaaggggaucuacaacgucgcgaccugcggccuguucgggcugguguccuuccuccugcugugcggccgcagcugcuccacgaccuacaaggggguguacgagcuccagacccuggagcuggacauggccagccucaacaugaccaugccgcuguccugcacgaagaacaacagccaccacuacaucauggucggcaacgagaccggccuggagcucacccugaccaacacguccaucaucaaccacaaguucugcaaccugagcgacgcccacaagaagaaccucuacgaccacgcccugauguccaucaucagcaccuuccaccuguccauccccaacuucaaccaguacgaggccaugagcugcgacuucaacgggggcaagaucuccgugcaguacaaccucagccacaccuacgcgguggacgccgccaaccacugcgggaccaucgccaacggcguccugcagacguucaugcggauggcguggggcggguccuacaucgcccuggacagcggcaagggguccugggacugcaucaugaccagcuaccaguaccucaucauccagaacaccaccugggaggaccacugccaguucucccgccccagccccaucggcuaccuggggcugcucagccagcggacgcgcgacaucuacaucucccggcgccugcugggcaccuucaccuggacccucagcgacuccgagagcaacgagacgccgggcggguacugccugacccgguggaugcugaucgaggccgagcucaagugcuucggcaacaccgccguggccaagugcaacgagaagcacgacgaggaguucugcgacaugcugcgccuguucgacuucaacaagcaggcgauccggcgccucaaggccgaggcccagauguccauccagcugaucaacaaggccgugaacgcccugaucaacgaccagcucaucaugaagaaccaccuccgggacaucauggggauccccuacugcaacuacagcaaguacugguaccugaaccacaccgucacgggccgcaccucccugccccggugcuggcuggugagcaacggguccuaccugaacgagacccacuucagcgacgacaucgagcagcaggcggacaacaugaucaccgagcuccugcagaaggaguacauggaccgccagggcaagacgccccugggccucguggaccuguucgucuucuccaccagcuucuaccugaucuccaucuuccugcaccucgugaagaucccgacccaccggcacgugaucgggaagcccugccccaagccccaccgccugaaccacaugggcaucugcagcugcgggcuguacaagcacccgggcguccccgugaaguggaagcggugaggacuaguaauaaggaaacuguaugaaugucugugggcaggaagugaagagauccuucuguaaagguuuuuggaauuaugucugcugaauaauaaacuuuuuugaaauaauaaaucugguagaaaaaugagaucuaaaaaaaaaaaaaaaaaaaaaaaaaaaaaaaaaaaaaaaaaaaaaaaaaaaaaaaaaaaaaaaaugcaucccccccccccccccccccccccccccccccaaaggcucuuuucagagccaccagaauu

SEQ ID NO: 2846 - RNA, 1813 nt, Artificial Sequence
  mRNA product Design b-4 comprising derived and/or modified sequence from LASV(LASV035-NIG-2009;Clade II)__AIT17588__GPC (opt1)
gggagagucccgcagucggcguccagcggcucugcuuguucgugugugugucguugcaggccuuauucaagcuuaccaugggccagaucaucaccuucuuccaggaggugccccacgucaucgaggaggugaugaacaucgugcugaucgcccucagccugcuggccauccucaaggggaucuacaacgucgcgaccugcggccuguucgggcugguguccuuccuccugcugugcggccgcagcugcuccacgaccuacaaggggguguacgagcuccagacccuggagcuggacauggccagccucaacaugaccaugccgcuguccugcacgaagaacaacagccaccacuacaucauggucggcaacgagaccggccuggagcucacccugaccaacacguccaucaucaaccacaaguucugcaaccugagcgacgcccacaagaagaaccucuacgaccacgcccugauguccaucaucagcaccuuccaccuguccauccccaacuucaaccaguacgaggccaugagcugcgacuucaacgggggcaagaucuccgugcaguacaaccucagccacgcguacgccguggacgccgccaaccacugcgggaccaucgcgaacggcguccugcagaccuucaugcggauggccuggggcggguccuacaucgcccuggacagcggcaagggguccugggacugcaucaugacgagcuaccaguaccucaucauccagaacaccaccugggaggaccacugccaguucucccgccccagccccaucggcuaccuggggcugcucagccagcggacccgcgacaucuacaucucccggcgccugcugggcacguucaccuggacccucagcgacuccgagggcaacgagacccccgggggcuacugccugacgcgguggaugcugaucgaggccgagcucaagugcuucgggaacaccgccguggcgaagugcaacgagaagcacgacgaggaguucugcgacaugcugcgccuguucgacuucaacaagcaggccauccggcgccucaaggccgaggcccagaugagcauccagcugaucaacaaggccgugaacgcgcugaucaacgaccagcucaucaugaagaaccaccuccgggacaucaugggcauccccuacugcaacuacuccaaguacugguaccugaaccacaccgucaccgggaagacgagccugccccgcugcuggcugguguccaacggcagcuaccugaacgagacccacuucuccgacgacaucgagcagcaggccgacaacaugaucaccgagcuccugcagaaggaguacaucgaccggcagggcaagaccccgcuggggcucguggaccuguucgucuucagcacguccuucuaccugaucagcaucuuccugcaccucgugaagaucccgacccaccgccacgugaucggcaagcccugccccaagccccaccggcugaaccacauggggaucugcuccugcggccuguacaagcacccggggguccccgugaaguggaagcgcugaggacuaguaauaaggaaacuguaugaaugucugugggcaggaagugaagagauccuucuguaaagguuuuuggaauuaugucugcugaauaauaaacuuuuuugaaauaauaaaucugguagaaaaaugagaucuaaaaaaaaaaaaaaaaaaaaaaaaaaaaaaaaaaaaaaaaaaaaaaaaaaaaaaaaaaaaaaaaugcaucccccccccccccccccccccccccccccccaaaggcucuuuucagagccaccagaauu

SEQ ID NO: 2847 - RNA, 1813 nt, Artificial Sequence
  mRNA product Design b-4 comprising derived and/or modified sequence from LASV(LASV1000-NIG-2009;Clade II)__AIT17782__GPC (opt1)
gggagagucccgcagucggcguccagcggcucugcuuguucgugugugugucguugcaggccuuauucaagcuuaccaugggccagaucaucaccuucuuccaggaggugccccacgucaucgaggaggugaugaacaucgugcugaucgcccucagccugcuggccauccucaaggggaucuacaacgucgcgaccugcggccuguucgggcugguguccuuccuccugcugugcggccgcagcugcuccacgaccuacaaggggguguacgagcuccagacccuggagcuggacauggccagccucaacaugaccaugccgcuguccugcacgaagaacaacagccaccacuacaucauggucggcaacgagaccggccuggagcucacccugaccaacacguccaucaucaaccacaaguucugcaaccugagcgacgcccacaagaagaaccucuacgaccacgcccugauguccaucaucagcaccuuccaccuguccauccccaacuucaaccaguacgaggccaugagcugcgacuucaacgggggcaagaucuccgugcaguacaaccucagccacaccuacgcgguggacgccgccaaccacugcgggaccaucgccaacggcguccugcagacguucaugcggauggcguggggcggguccuacaucgcccuggacagcggcaagggguccugggacugcaucaugaccagcuaccaguaccucaucauccagaacaccaccugggaggaccacugccaguucucccgccccagccccaucggcuaccuggggcugcucagccagcggacgcgcgacaucuacaucucccggcgccugcugggcaccuucaccuggacccucagcgacuccgagggcaacgagacgcccgggggcuacugccugacccgguggaugcugaucgaggccgagcucaagugcuucgggaacaccgccguggccaagugcaacgagaagcacgacgaggaguucugcgacaugcugcgccuguucgacuucaacaagcaggcgaucaagcggcucaagaccgaggcccagaugagcauccagcugaucaacaaggccgugaacgcccugaucaacgaccagcucaucaugaagaaccaccuccgcgacaucaugggcauccccuacugcaacuacuccaaguacugguaccugaaccacacggucaccgggaagaccagccugccccggugcuggcugguguccaacggcagcuaccugaacgagacccacuucuccgacgacaucgagcagcaggccgacaacaugaucacggagcuccugcagaaggaguacaucgaccgccagggcaagaccccgcuggggcucguggaccuguucgucuucagcaccuccuucuaccugaucagcaucuuccugcaccucgugaagaucccgacccaccggcacguggucggcaagcccugccccaagccccaccgccugaaccacauggggaucugcuccugcggccuguacaagcacccgggggugcccgugaaguggaagcggugaggacuaguaauaaggaaacuguaugaaugucugugggcaggaagugaagagauccuucuguaaagguuuuuggaauuaugucugcugaauaauaaacuuuuuugaaauaauaaaucugguagaaaaaugagaucuaaaaaaaaaaaaaaaaaaaaaaaaaaaaaaaaaaaaaaaaaaaaaaaaaaaaaaaaaaaaaaaaugcaucccccccccccccccccccccccccccccccaaaggcucuuuucagagccaccagaauu

SEQ ID NO: 2848 - RNA, 1813 nt, Artificial Sequence
  mRNA product Design b-4 comprising derived and/or modified sequence from LASV(LASV221-NIG-2010;Clade II)__AIT17624__GPC (opt1)
gggagagucccgcagucggcguccagcggcucugcuuguucgugugugugucguugcaggccuuauucaagcuuaccaugggccagaucaucaccuucuuccaggaggugccccacgucaucgaggaggugaugaacaucgugcugaucgcccucagccugcuggccauccucaaggggaucuacaacgucgcgaccugcggccuguucgggcugguguccuuccuccugcugugcggccgcagcugcuccacgaccuacaaggggguguacgagcuccagacccuggagcuggacauggccagccucaacaugaccaugccgcuguccugcacgaagaacaacagccaccacuacaucauggucggcaacgagaccggccuggagcucacccugaccaacacguccaucaucaaccacaaguucugcaaccugagcgacgcccacaagaagaaccucuacgaccacgcccugauguccaucaucagcaccuuccaccuguccauccccaacuucaaccaguacgaggccaugagcugcgacuucaacgggggcaagaucuccgugcaguacaaccucagccacaccuacgcgaucgacgccgccaaccacugcgggaccaucgccaacggcgugcugcagacguucaugcggauggcguggggcggguccuacaucgcccuggacagcggcaagggguccugggacugcaucaugaccagcuaccaguaccucaucauccagaacaccaccugggaggaccacugccaguucucccgccccagccccaucggcuaccuggggcugcucagccagcggacgcgcgacaucuacaucucccggcgccugcugggcaccuucaccuggacccucagcgacuccgagggcaacgagacgcccgggggcuacugccugacccgguggaugcugaucgaggccgagcucaagugcuucgggaacaccgccgucgccaagugcaacgagaagcacgacgaggaguucugcgacaugcugcgccuguucgacuucaacaagcaggcgauccggcgccucaagaccgaggcccagaugagcauccagcugaucaacaaggccgugaacgcccugaucaacgaccagcucaucaugaagaaccaccuccgggacaucaugggcauccccuacugcaacuacuccaaguacugguaccugaaccacacggugaccgggaagaccagccugccccgcugcuggcuggucuccaacggcagcuaccugaacgagacccacuucuccgacgacaucgagcagcaggccgacaacaugaucacggagaugcuccagaaggaguacauggaccggcagggcaagaccccgcuggggcugguggaccucuucguguucagcaccuccuucuaccugaucagcaucuuccugcaccuggucaagaucccgacccaccgccacgugaucggcaagcccugccccaagccccaccggcucaaccacauggggaucugcuccugcggccuguacaagcacccgggggugcccgucaaguggaagcgcugaggacuaguaauaaggaaacuguaugaaugucugugggcaggaagugaagagauccuucuguaaagguuuuuggaauuaugucugcugaauaauaaacuuuuuugaaauaauaaaucugguagaaaaaugagaucuaaaaaaaaaaaaaaaaaaaaaaaaaaaaaaaaaaaaaaaaaaaaaaaaaaaaaaaaaaaaaaaaugcaucccccccccccccccccccccccccccccccaaaggcucuuuucagagccaccagaauu

SEQ ID NO: 2849 - RNA, 1813 nt, Artificial Sequence
  mRNA product Design b-4 comprising derived and/or modified sequence from LASV(LASV237-NIG-2010;Clade II)__AIT17638__GPC (opt1)
gggagagucccgcagucggcguccagcggcucugcuuguucgugugugugucguugcaggccuuauucaagcuuaccaugggccagaucaucaccuucuuccaggaggugccccacgucaucgaggaggugaugaacaucgugcugaucgcccucagccugcuggccauccucaaggggaucuacaacgucgcgaccugcggccuguucgggcugguguccuuccuccugcugugcggccgcagcugcuccacgaccuacaaggggguguacgagcuccagacccuggagcuggacauggccagccucaacaugaccaugccgcuguccugcacgaagaacaacagccaccacuacaucauggucggcaacgagaccggccuggagcucacccugaccaacacguccaucaucaaccacaaguucugcaaccugagcgacgcccacaagaaggaccucuacgaccacgcccugauguccaucaucagcaccuuccaccuguccauccccaacuucaaccaguacgaggccaugagcugcgacuucaacgggggcaagaucuccgugcaguacaaccucagccacaccuacgcgguggacgccgccaaccacugcgggaccaucgccaacggcguccugcagacguucaugcggauggcguggggcggguccuacaucgcccuggacagcggcaagggguccugggacugcaucaugaccagcuaccaguaccucaucauccagaacaccaccugggaggaccacugccaguucucccgccccagccccaucggcuaccuggggcugcucagccagcggacgcgcgacaucuacaucucccggcgccugcugggcaccuucaccuggacccucagcgacuccgagggcaacgagacgcccgggggcuacugccugacccgguggaugcugaucgaggccgagcucaagugcuucgggaacaccgccguggccaagugcaacgagaagcacgacgaggaguucugcgacaugcugcgccuguucgacuucaacaagcaggcgauccggcgccucaagaccgaggcccagaugagcauccagcugaucaacaaggccgugaacgcccugaucaacgaccagcucaucaugaagaaccaccuccgggacaucaugggcauccccuacugcaacuacuccaaguacugguaccugaaccacacggucaccgggaagaccagccugccccgcugcuggcugguguccaacggcagcuaccugaacgagacccacuucuccgacgacaucgagcagcaggccgacaacaugaucacggagcuccugcagaaggaguacauggaccggcagggcaagaccccgcuggggcucguggaccuguucgucuucagcaccuccuucuaccugaucagcaucuuccugcaccucaucaagaucccgacccaccgccacaucacgggcaagcccugccccaagccccaccggcugaaccacauggggaucugcuccugcggccuguacaagcacccgggggugcccgugaaguggaagcgcugaggacuaguaauaaggaaacuguaugaaugucugugggcaggaagugaagagauccuucuguaaagguuuuuggaauuaugucugcugaauaauaaacuuuuuugaaauaauaaaucugguagaaaaaugagaucuaaaaaaaaaaaaaaaaaaaaaaaaaaaaaaaaaaaaaaaaaaaaaaaaaaaaaaaaaaaaaaaaugcaucccccccccccccccccccccccccccccccaaaggcucuuuucagagccaccagaauu

SEQ ID NO: 2850 - RNA, 1813 nt, Artificial Sequence
  mRNA product Design b-4 comprising derived and/or modified sequence from LASV(LASV253-NIG-2011;Clade II)__AIT17670__GPC (opt1)
gggagagucccgcagucggcguccagcggcucugcuuguucgugugugugucguugcaggccuuauucaagcuuaccaugggccagaucaucaccuucuuccaggaggugccccacgucaucgaggaggugaugaacaucgugcugaucgcccucagccugcuggccauccucaaggggaucuacaacgucgcgaccugcggccuguucgggcugguguccuuccuccugcugugcggccgcagcugcuccacgaccuacaaggggguguacgagcuccagacccuggagcuggacauggccagccucaacaugaccaugccgcuguccugcacgaagaacaacagccaccacuacaucauggucggcaacgagaccggccuggagcucacccugaccaacacguccaucaucaaccacaaguucugcaaccugagcgacgcccacaagaagaaccucuacgaccacgcccugauguccaucaucagcaccuuccaccuguccauccccaacuucaaccaguacgaggccaugagcugcgacuucaacgggggcaagaucuccgugcaguacaaccucagccacaccuacgcgguggacgccgccaaccacugcgggaccaucgccaacggcguccugcagacguucaugcggauggcguggggcggguccuacaucgcccuggacagcggcaagggguccugggacugcaucaugaccagcuaccaguaccucaucauccagaacaccaccugggaggaccacugccaguucucccgccccagccccaucggcuaccuggggcugcucagccagcggacgcgcgacaucuacaucucccggcgccugcugggcaccuucaccuggacccucagcgacuccgagggcaacgagacgcccgggggcuacugccugacccgguggaugcugaucgaggccgagcucaagugcuucgggaacaccgccguggccaagugcaacgagaagcacgacgaggaguucugcgacaugcugcgccuguucgacuucaacaagcaggcgauccggcgccucaaggccgaggcccagaugagcauccagcugaucaacaaggccgugaacgcccugaucaacgaccagcucaucaugaagaaccaccuccgggacaucaugggcaucccguacugcaacuacuccaaguacugguaccugaaccacaccgucacggggcgcaccagccugccccggugcuggcugguguccaacggcagcuaccugaacgagacccacuucuccgacgacaucgagcagcaggcggacaacaugaucaccgagcuccugcagaaggaguacaucgaccgccagggcaagacgccccuggggcucguggaccuguucgucuucagcaccuccuucuaccugaucagcaucuuccugcaccucgugaagaucccgacccaccggcacaucaucggcaagcccugccccaagccccaccgccugaaccacauggggaucugcuccugcggccuguacaagcacccgggggugcccgucaaguggaagcggugaggacuaguaauaaggaaacuguaugaaugucugugggcaggaagugaagagauccuucuguaaagguuuuuggaauuaugucugcugaauaauaaacuuuuuugaaauaauaaaucugguagaaaaaugagaucuaaaaaaaaaaaaaaaaaaaaaaaaaaaaaaaaaaaaaaaaaaaaaaaaaaaaaaaaaaaaaaaaugcaucccccccccccccccccccccccccccccccaaaggcucuuuucagagccaccagaauu

SEQ ID NO: 2851 - RNA, 1813 nt, Artificial Sequence
  mRNA product Design b-4 comprising derived and/or modified sequence from LASV(LASV254-NIG-2011;Clade II)__AIT17674__GPC (opt1)
gggagagucccgcagucggcguccagcggcucugcuuguucgugugugugucguugcaggccuuauucaagcuuaccaugggccagaucaucaccuucuuccaggaggugccccacgucaucgaggaggugaugaacaucgugcugaucgcccucagccugcuggccauccucaaggggaucuacaacgucgcgaccugcggccuguucgggcugguguccuuccuccugcugugcggccgcagcugcuccacgaccuacaaggggguguacgagcuccagacccuggagcuggacaugaccaaccucaacaugacgaugccgcugagcugcaccaagaacaacucccaccacuacaucauggucggcaacgagaccggccuggagcucacccugacgaacaccagcaucaucaaccacaaguucugcaaccuguccgacgcccacaagaagaaccucuacaaccacgcccugaugagcaucaucuccaccuuccaccugagcauccccaacuucaaccaguacgaggccauguccugcgacuucaacgggggcaagaucagcgugcaguacaaccucucccacagcuacgccguggacgcggccaaccacugcgggaccaucgccaacggcguccugcagacguucaugcggauggccuggggcggguccuacaucgcgcuggacagcggcaaggggaacugggacugcaucaugaccuccuaccaguaccucaucauccagaacaccaccugggaggaccacugccaguucagccgccccucccccaucggcuaccuggggcugcucagccagcggacgcgcgacaucuacaucagccggcgccugcugggcaccuucaccuggacccucuccgacagcgagggcaacgagacgcccgggggcuacugccugacccgguggaugcugaucgaggccgagcucaagugcuucgggaacaccgccguggccaagugcaacgagaagcacgacgaggaguucugcgacaugcugcgccuguucgacuucaacaagcaggccauccggcgccucaagaccgaggcgcaggccaacauccagcugaucaacaaggccgugaacgcccugaucaacgaccagcucaucaugaagaaccaccuccgggacaucaugggcauccccuacugcaacuacuccaaguacugguaccugaaccacacggucaccgggaagaccagccugccccgcugcuggcugguguccaacggcagcuaccugaacgagacccacuucuccgacgacaucgagcagcaggccgacaacaugaucacggagcuccugcagaaggaguacauggaccggcagggcaagaccccgcuggggcucguggaccuguucgucuucagcaccuccuucuaccugaucagcaucuuccugcaccucgugaagaucccgacccaccgccacgugaucggcaagcccugccccaagccccaccggcugaaccacauggggaucugcuccugcggccuguacaagcacccggggguccccgugaaguggaagcgcugaggacuaguaauaaggaaacuguaugaaugucugugggcaggaagugaagagauccuucuguaaagguuuuuggaauuaugucugcugaauaauaaacuuuuuugaaauaauaaaucugguagaaaaaugagaucuaaaaaaaaaaaaaaaaaaaaaaaaaaaaaaaaaaaaaaaaaaaaaaaaaaaaaaaaaaaaaaaaugcaucccccccccccccccccccccccccccccccaaaggcucuuuucagagccaccagaauu

SEQ ID NO: 2852 - RNA, 1813 nt, Artificial Sequence
  mRNA product Design b-4 comprising derived and/or modified sequence from LASV(Nig08-A19;Clade III)__ADU56618__GPC (opt1)
gggagagucccgcagucggcguccagcggcucugcuuguucgugugugugucguugcaggccuuauucaagcuuaccaugggccagaucgugaccuucuuccaggaggucccccacgugaucgaggaggugaugaacaucguccugaucgcccucagcauccuggccauccugaaggggcucuacaacaucgcgaccugcggccugaucgggcuggugacguuccuccugcuguccggccgcagcugcuccaugaccuacaaggggguguacgagcuccagacccuggagcugaacaugaacacccucaacaugacgaugccgcugagcugcaccaagaacaacucccaccacuacaucauggucggcaacgagaccggccuggagcucacccugacgaacaccagccugcuccaccacaaguucugcaaccuguccgacgcccacaagaagaaccuguacgaccacacccucaugagcaucaucuccaccuuccaccugagcauccccaacuucaaccaguacgaggccauguccugcgacuucaacgggggcaagaucacggugcaguacaaccugagccacuccuacgccaucgacgccgcgaaccacugcgggaccguggccaacggcguccuccagaccuucaugcggauggccuggggcgggagcuacaucgcccuggacuccggccgcgggaagugggacugcaucaugaccagcuaccaguaccugaucauccagaacacgaccugggaggaccacugccaguucucccggcccagccccaucggcuaccucgggcugcugucccagcgcacccgggacaucuacaucagccgccggcuccugggcaccuucacguggacccugagcgacuccgagggcaacgagacccccgggggcuacugccucacccgcuggaugcugaucgaggcggagcugaagugcuucgggaacacggccguggccaagugcaacgagaagcacgacgaggaguucugcgacaugcuccggcuguucgacuucaacaagcaggccauccgccggcugaaggccgaggcgcagaugagcauccagcucaucaacaaggccgugaacgcccugaucaacgaccagcugaucaugaagaaccaccuccgcgacaucaugggcauccccuacugcaacuacuccaaguacugguaccugaaccacaccagcaccgggcggaccucccugccccgcugcuggcucgucagcaacggcuccuaccugaacgagacgcacuucagcgacgacaucgagcagcaggccgacaacaugaucaccgagaugcugcagaaggaguaccucgaccggcagggcaagaccccgcuggggcugguggaccuguucguguucuccaccagcuucuaccucaucuccaucuuccugcaccuggucaagaucccgacgcaccgccacaucgugggcaagcccugccccaagccccaccggcucaaccacauggggaucugcagcugcggccuguacaagcagccgggggugcccguccgcuggaagcggugaggacuaguaauaaggaaacuguaugaaugucugugggcaggaagugaagagauccuucuguaaagguuuuuggaauuaugucugcugaauaauaaacuuuuuugaaauaauaaaucugguagaaaaaugagaucuaaaaaaaaaaaaaaaaaaaaaaaaaaaaaaaaaaaaaaaaaaaaaaaaaaaaaaaaaaaaaaaaugcaucccccccccccccccccccccccccccccccaaaggcucuuuucagagccaccagaauu

SEQ ID NO: 2853 - RNA, 1816 nt, Artificial Sequence
  mRNA product Design b-4 comprising derived and/or modified sequence from LASV(G1180-SLE-2010;Clade IV)__AIT17168__GPC (opt1)
gggagagucccgcagucggcguccagcggcucugcuuguucgugugugugucguugcaggccuuauucaagcuuaccaugggccagaucgugaccuucuuccaggaggucccccacgugaucgaggaggugaugaacaucguccugaucgcccucagcauccuggccgugcugaaggggcucuacaacuucgcgaccugcggccugguggggcugcucaccuuccugcugcucugcggccgcuccugcaccgccagccgguacaagggggucuacgagcugcagacccuggagcucaacauggagacccugaacaugacgaugccgcuguccugcaccaagaacaacagccaccacuacaucauggugggcaacgagaccggccucgagcugacccugacgaacaccuccaucaucaaccacaaguucugcaaccucagcgacgcccacaagaagaaccuguacgaccacgcccugauguccaucaucagcaccuuccaccucuccauccccaacuucaaccaguacgaggccaugagcugcgacuucaacgggggcaagaucuccgugcaguacaaccugagccacuccuacgcgggggacgccgccaaccacugcggcaccgucgccaacggggugcugcagacguucaugcgcauggcguggggcggcagcuacaucgcccucgacuccgggcacggcagcugggacugcaucaugaccuccuaccaguaccugaucauccagaacaccaccugggaggaccacugccaguucagccggcccucccccaucggguaccugggccuccugagccagcgcacgcgggacaucuacaucagccgccggcugcucggcaccuucaccuggacccuguccgacagcgaggggaaggacacgccgggcggguacugccugacccgcuggaugcucaucgaggccgagcugaagugcuucggcaacaccgccguggccaagugcaacgagaagcacgacgaggaguucugcgacaugcugcggcuguucgacuucaacaagcaggcgauccagcgccugaaggccgaggcccagauguccauccagcugaucaacaaggccgucaacgcccucaucaacgaccagcugaucaugaagaaccaccuccgggacaucauggggauccccuacugcaacuacagcaaguacugguaccucaaccacaccacgaccggcaagaccucccugcccaagugcuggcuggugagcaacggcuccuaccucaacgagacccacuucagcgacgacaucgagcagcaggcggacaacaugaucacggagaugcugcagaaggaguacauggagcgccaggggaagacgccccugggccucguggaccuguucgucuucuccaccagcuucuaccugaucuccaucuuccugcaccucgugaagaucccgacccaccggcacaucgugggcaagagcugccccaagccccaccgccugaaccacauggggaucugcuccugcgggcuguacaagcagcccggcgucccggugaaguggaagcggugaggacuaguaauaaggaaacuguaugaaugucugugggcaggaagugaagagauccuucuguaaagguuuuuggaauuaugucugcugaauaauaaacuuuuuugaaauaauaaaucugguagaaaaaugagaucuaaaaaaaaaaaaaaaaaaaaaaaaaaaaaaaaaaaaaaaaaaaaaaaaaaaaaaaaaaaaaaaaugcaucccccccccccccccccccccccccccccccaaaggcucuuuucagagccaccagaauu

SEQ ID NO: 2854 - RNA, 1816 nt, Artificial Sequence
  mRNA product Design b-4 comprising derived and/or modified sequence from LASV(G1442-SLE-2011;Clade IV)__AIT17180__GPC (opt1)
gggagagucccgcagucggcguccagcggcucugcuuguucgugugugugucguugcaggccuuauucaagcuuaccaugggccagaucgugaccuucuuccaggaggucccccacgugaucgaggaggugaugaacaucguccugaucgcccucagcauccuggccgugcugaaggggcucuacaacguggcgaccugcggccugaucgggcuggucacguuccuccugcugugcggccgcuccugcaccaccacccucuacaaggggguguacgagcugcagacgcuggagcucaacauggagacccugaacaugaccaugccgcugagcugcaccaagaacaacucccaccacuacauccgggugggcaacgagacgggccucgagcugacccugaccaacaccagcaucaucaaccacaaguucugcaaccucuccgacgcccacaagaagaaccuguacgaccacgcccugaugagcaucaucuccacguuccaccucagcauccccaacuucaaccaguacgaggccauguccugcgacuucaacgggggcaagaucagcguccaguacaaccugucccacagcuacgccggggacgcggccaaccacugcggcaccguggccaacggggugcugcagaccuucaugcgcauggccuggggcggcuccuacaucgcgcucgacagcgggcggggcaacugggacugcaucaugaccuccuaccaguaccugaucauccagaacacgaccugggacgaccacugccaguucagccgccccucccccaucggguaccugggccuccugagccagcggacccgcgacgucuacaucucccggcgccugcucggcaccuucacguggacccugagcgacagcgaggggaaggacaccccgggcggguacugccugacccgguggaugcucaucgaggccgagcugaagugcuucggcaacacggccguggccaagugcaacgagaagcacgacgaggaguucugcgacaugcugcgccucuucgacuucaacaagcaggccauccagcggcugaaggcggaggcccagauguccauccagcugaucaacaaggccgugaacgcccucaucaacgaccagcugaucaugaagaaccaccuccgcgacaucauggggauccccuacugcaacuacagcaaguacugguaccugaacaacaccgccaccggcaagaccucccugcccaagugcuggcugaucagcaacggcuccuaccucaacgagacgcacuucagcgacgacaucgagcaggaggcggacaacaugaucaccgagaugcugcagaaggaguacauggagcggcaggggaagacgccccugggccucgucgaccuguucguguucuccaccagcuucuaccugaucuccaucuuccugcaccucgugaagaucccgacccaccgccacaucgucggcaagagcugccccaagccccaccggcugaaccacauggggaucugcuccugcgggcuguacaagcagcccggcgugccggugcgcuggaagcggugaggacuaguaauaaggaaacuguaugaaugucugugggcaggaagugaagagauccuucuguaaagguuuuuggaauuaugucugcugaauaauaaacuuuuuugaaauaauaaaucugguagaaaaaugagaucuaaaaaaaaaaaaaaaaaaaaaaaaaaaaaaaaaaaaaaaaaaaaaaaaaaaaaaaaaaaaaaaaugcaucccccccccccccccccccccccccccccccaaaggcucuuuucagagccaccagaauu

SEQ ID NO: 2855 - RNA, 1816 nt, Artificial Sequence
  mRNA product Design b-4 comprising derived and/or modified sequence from LASV(G3010-SLE-2013;Clade IV)__AIT17344__GPC (opt1)
gggagagucccgcagucggcguccagcggcucugcuuguucgugugugugucguugcaggccuuauucaagcuuaccaugggccagaucgugaccuucuuccaggaggucccccacgugaucgaggaggugaugaacaucguccugaucgcccucagcauccuggccgugcugaaggggcucuacaacuucgcgaccugcggccugguggggcuggucacguuccuccugcugugcggccgcuccugcaccaccagccucuacaaggggguguacgagcugcagacccuggagcucaacauggagacgcugaacaugaccaugccgcuguccugcaccaagaacaacagccaccacuacaucauggugggcaacgagaccggccucgagcugacgcugaccaacaccuccaucaucaaccacaaguucugcaaccucagcgacgcccacaagaagaaccuguacaaccacgcccugauguccaucaucagcaccuuccaccucuccauccccaacuucaaccaguacgaggccaugagcugcgacuucaacgggggcaagaucuccguccaguacaaccugagccacuccuacgccggggacgcggccagccacugcggcacgguggccaacggggugcugcagaccuucaugcggauggccuggggcggcuccuacaucgcgcucgacagcggguacggcaagugggacugcaucaugaccuccuaccaguaccugaucauccagaacaccacgugggaggaccacugccaguucagccgccccucccccaucggguaccugggccuccugagccagcggacccgcgacaucuacaucagccggcgccugcucggcaccuucaccuggacgcuguccgacagcgaggggaaggacaccccgggcggguacugccugacccgguggaugcucaucgaggccgagcugaagugcuucggcaacaccgccgucgccaagugcaacgagaagcacgacgaggaguucugcgacaugcugcgccucuucgacuucaacaagcaggccauccagcggcugaagacggaggcgcagauguccauccagcugaucaacaaggccgugaacgcccucaucaacgaccagcugaucaugaagaaccaccuccgcgacaucauggggauccccuacugcaacuacagcaaguacugguaccugaaccacaccaccaccggcaagacgucccugcccaagugcuggcuggugagcaacggcuccuaccucaacgagacccacuucagcgacgacaucgagcagcaggccgacaacaugaucaccgagaugcugcagaaggaguacauggagcggcaggggaagacgccccugggccucgucgaccuguucguguucuccaccagcuucuaccugaucuccaucuuccugcaccucgugaagaucccgacccaccgccacaucgucggcaagagcugccccaagccccaccggcugaaccacauggggaucugcuccugcgggcuguacaagcagcccggcgugccggugcgcuggaagcggugaggacuaguaauaaggaaacuguaugaaugucugugggcaggaagugaagagauccuucuguaaagguuuuuggaauuaugucugcugaauaauaaacuuuuuugaaauaauaaaucugguagaaaaaugagaucuaaaaaaaaaaaaaaaaaaaaaaaaaaaaaaaaaaaaaaaaaaaaaaaaaaaaaaaaaaaaaaaaugcaucccccccccccccccccccccccccccccccaaaggcucuuuucagagccaccagaauu

SEQ ID NO: 2856 - RNA, 1816 nt, Artificial Sequence
  mRNA product Design b-4 comprising derived and/or modified sequence from LASV(G502-SLE-2009;Clade IV)__AIT17126__GPC (opt1)
gggagagucccgcagucggcguccagcggcucugcuuguucgugugugugucguugcaggccuuauucaagcuuaccaugggccagaucgugaccuucuuccaggaggucccccacgugaucgaggaggugaugaacaucguccugaucgcccucagcauccuggccgugcugaaggggcucuacaacuucgcgaccugcggccugguggggcugcucacguuccugcugcucugcggccgcuccugcaccaccgggcuguacaagggcgucuacgagcugcagacccucgagcugaacauggagacgcugaacaugaccaugccgcucagcugcaccaagaacaacucccaccacuacaucauggugggcaacgagaccgggcuggagcugacgcucaccaacaccagcaucaucaaccacaaguucugcaaccuguccgacgcccacaagaagaaccuguacgaccacgcccucaugagcaucaucuccaccuuccaccugagcauccccaacuucaaccaguacgaggccauguccugcgacuucaacggcgggaagaucagcgugcaguacaaccugucccacagcuacgccggcgacgcggccgaccacugcgggacggucgccaacggcgugcuccagaccuucaugcggauggccuggggcggguccuacaucgcgcuggacagcggccgcgggcggugggacugcaucaugaccuccuaccaguaccugaucauccagaacaccacgugggaggaccacugccaguucagccgccccucccccaucggcuaccucggccugcugagccagcggacccgcgacaucuacaucucccggcgccuccuggggaccuucaccuggacgcugagcgacagcgagggcaaggacacccccgggggcuacugccucacccgguggaugcugaucgaggccgagcugaagugcuucgggaacaccgccguggccaagugcaacgagaagcacgacgaggaguucugcgacaugcuccgccuguucgacuucaacaagcaggccauccagcggcugaaggcggaggcccagauguccauccagcucaucaacaaggccgucaacgcccugaucaacgaccagcuggugaugaagaaccaccuccgcgacaucaugggcauccccuacugcaacuacagccgguacugguaccugaaccacacgaccaccggccgcaccucccugcccaagugcuggcucgugagcaacggguccuaccugaacgagacgcacuucagcgacgacaucgagcagcaggccgacaacaugaucaccgagaugcugcagaaggaguacauggagcggcagggcaagaccccgcucgggcuggucgaccuguucguguucuccaccagcuucuaccugaucuccaucuuccuccaccuggugaagaucccgacgcaccgccacaucgucggcaagagcugccccaagccccaccggcugaaccacauggggaucugcuccugcggccucuacaagcagcccggcgugccggugaaguggaagcgcugaggacuaguaauaaggaaacuguaugaaugucugugggcaggaagugaagagauccuucuguaaagguuuuuggaauuaugucugcugaauaauaaacuuuuuugaaauaauaaaucugguagaaaaaugagaucuaaaaaaaaaaaaaaaaaaaaaaaaaaaaaaaaaaaaaaaaaaaaaaaaaaaaaaaaaaaaaaaaugcaucccccccccccccccccccccccccccccccaaaggcucuuuucagagccaccagaauu

SEQ ID NO: 2857 - RNA, 1816 nt, Artificial Sequence
  mRNA product Design b-4 comprising derived and/or modified sequence from LASV(G733-SLE-2010;Clade IV)__AIT17154__GPC (opt1)
gggagagucccgcagucggcguccagcggcucugcuuguucgugugugugucguugcaggccuuauucaagcuuaccaugggccagaucgugaccuucuuccaggaggucccccacgugaucgaggaggugaugaacaucguccugaucgcccucagcauccuggccgugcugaaggggcucuacaacuucgcgaccugcggcaucguggggcuggucuccuuccugcuccugugcggccgcagcugcacgaccucccuguacaaggggguguacgagcuccagacccuggagcugaacauggagacccucaacaugacgaugccgcugagcugcaccaagaacaacucccaccacuacaucauggugggcaacgagaccggccuggagcucacccugacgaacaccagcaucaucaaccacaaguucugcaaccuguccgacgcccacaagaagaaccucuacgaccacgcccugaugagcaucaucuccaccuuccaccugagcauccccaacuucaaccaguacgaggccauguccugcgacuucaacgggggcaagaucagcguccaguacaaccucucccacagcuacgccggggacgcggccaaccacugcggcaccaucgccaacggggugcugcagacguucaugcggauggccuggggcggcuccuacaucgcgcuggacagcgggcgcgaccggugggacugcaucaugaccuccuaccaguaccucaucauccagaacaccaccugggaggaccacugccaguucagccgccccucccccaucggcuaccuggggcugcucagccagcggacgcgcgacaucuacaucagccggcgccugcugggcaccuucaccuggacccucuccgacagcgagggcaaggacacgcccgggggcuacugccugacccgguggaugcugaucgaggccgagcucaagugcuucgggaacaccgccguggccaagugcaacgagaagcacgacgaggaguucugcgacaugcugcgccuguucgacuucaacaagcaggccauccagcggcucaaggcggaggcccagauguccauccagcugaucaacaaggccgucaacgcccugaucaacgaccagcucaucaugaagaaccaccuccgcgacaucaugggcauccccuacugcaacuacagcaaguacugguaccugaaccacaccacgaccgggaagaccucccugcccaagugcuggcuggugagcaacggcuccuaccugaacgagacccacuucagcgacgacaucgagcagcaggccgacaacaugaucacggagaugcuccagaaggaguacauggagcggcagggcaagaccccgcuggggcugguggaccucuucgucuucuccaccagcuucuaccugaucuccaucuuccugcaccuggugaagaucccgacccaccgccacguggucggcaagagcugccccaagccccaccggcucaaccacauggggaucugcuccugcggccuguacgggcagcccggcgugccggugaaguggaagcgcugaggacuaguaauaaggaaacuguaugaaugucugugggcaggaagugaagagauccuucuguaaagguuuuuggaauuaugucugcugaauaauaaacuuuuuugaaauaauaaaucugguagaaaaaugagaucuaaaaaaaaaaaaaaaaaaaaaaaaaaaaaaaaaaaaaaaaaaaaaaaaaaaaaaaaaaaaaaaaugcaucccccccccccccccccccccccccccccccaaaggcucuuuucagagccaccagaauu

SEQ ID NO: 2858 - RNA, 1816 nt, Artificial Sequence
  mRNA product Design b-4 comprising derived and/or modified sequence from MOPV/LASV reassortant(IGS-1;Clade IV)__AFY05576__GPC (opt1)
gggagagucccgcagucggcguccagcggcucugcuuguucgugugugugucguugcaggccuuauucaagcuuaccaugggccagaucgugaccuucuuccaggaggucccccacgugaucgaggaggugaugaacaucguccugaucgcccucagcgugcuggccgugcugaaggggcucuacaacuucgcgaccugcggccuggucgggcuggugacguuccuccugcugugcggccgcuccugcaccaccagccucuacaaggggguguacgagcugcagacccuggagcucaacauggagacgcugaacaugaccaugccgcuguccugcaccaagaacaacagccaccacuacaucauggucggcaacgagaccggccucgagcugacgcugaccaacaccuccaucaucaaccacaaguucugcaaccucagcgacgcccacaagaagaaccuguacgaccacgcccugauguccaucaucagcaccuuccaccucuccauccccaacuucaaccaguacgaggccaugagcugcgacuucaacgggggcaagaucuccgugcaguacaaccugagccacuccuacgccggggacgcggccaaccacugcggcacgguggccaacgggguccugcagaccuucaugcggauggccuggggcggcagcuacaucgcgcucgacuccgggcgcggcaacugggacugcaucaugaccagcuaccaguaccugaucauccagaacaccacgugggaggaccacugccaguucucccggcccagccccaucggguaccugggccuccugucccagcgcacccgggacaucuacaucagccgccggcugcucggcaccuucaccuggacgcugagcgacuccgagggggaggacaccccgggcggguacugccugacccgcuggaugcucaucgaggccgagcugaagugcuucggcaacaccgccguggccaagugcaacgagaagcacgacgaggaguucugcgacaugcugcggcuguucgacuucaacaagcaggccauccagcgccugaaggcggaggcccagaugagcauccagcugaucaacaaggccgugaacgcccucaucaacgaccagcugaucaugaagaaccaccuccgggacaucauggggauccccuacugcaacuacuccaaguacugguaccucaaccacacgaccaccggccgcaccagccugcccaagugcuggcuggucuccaacggcagcuaccucaacgagacgcacuucuccgacgacaucgagcagcaggccgacaacaugaucaccgagaugcugcagaaggaguacauggagcggcaggggaagacgccccugggccucguggaccuguucguguucagcaccuccuucuaccugaucagcaucuuccugcaccucgucaagaucccgacccaccgccacaucguggggaaguccugccccaagccccaccggcugaaccacaugggcaucugcagcugcgggcuguacaagcagcccggcgugccggucaaguggaagcgcugaggacuaguaauaaggaaacuguaugaaugucugugggcaggaagugaagagauccuucuguaaagguuuuuggaauuaugucugcugaauaauaaacuuuuuugaaauaauaaaucugguagaaaaaugagaucuaaaaaaaaaaaaaaaaaaaaaaaaaaaaaaaaaaaaaaaaaaaaaaaaaaaaaaaaaaaaaaaaugcaucccccccccccccccccccccccccccccccaaaggcucuuuucagagccaccagaauu

SEQ ID NO: 2859 - RNA, 1816 nt, Artificial Sequence
  mRNA product Design b-4 comprising derived and/or modified sequence from LASV(LM765-SLE-2012;Clade IV)__AIT17814__GPC (opt1)
gggagagucccgcagucggcguccagcggcucugcuuguucgugugugugucguugcaggccuuauucaagcuuaccaugggccagaucgugaccuucuuccaggaggucccccacgugaucgaggaggugaugaacaucguccugaucgcccucagcauccuggccgugcugaaggggcucuacaacuucgcgaccugcggccugguggggcuggucacguuccuccugcugugcggccgcuccugcaccaccagccucuacaaggggguguacgagcugcagacccuggagcucaacauggagacgcugaacaugaccaugccgcuguccugcaccaagaacaacagccaccacuacaucauggugggcaacgagaccggccucgagcugacgcugaccaacaccuccaucaucgaccacaaguucugcaaccucagcgacgcccaccggaagaaccuguacgaccacgcccugauguccaucaucagcaccuuccaccucuccauccccaacuucaaccaguacgaggccaugagcugcgacuucaacgggggcaagaucuccguccaguacaaccugagccacuccuacgccaaggacgcggccgaccacugcgggacgguggccaacggcgugcugcagaccuucaugcgcauggccuggggcgggagcuacaucgcgcucgacuccggccgggggcgcugggacugcaucaugaccagcuaccaguaccugaucauccagaacaccacgugggaggaccacugccaguucucccggcccagccccaucggcuaccuggggcuccugucccagcgcacccgggacaucuacaucagccgccggcugcucggcaccuucaccuggacgcugagcgacuccgagggcaaggacacccccgggggcuacugccugacccgcuggaugcucaucgaggccgagcugaagugcuucgggaacaccgccgucgccaagugcaacgagaagcacgacgaggaguucugcgacaugcugcggcuguucgacuucaacaagcaggccauccagcgccugaaggcggaggcccagaugagcauccagcugaucaacaaggccgugaacgcccucaucaacgaccagcugaucaugaagaaccaccuccgggacaucaugggcauccccuacugcaacuacuccaaguacugguaccucaaccacacgaccaccgggaagaccagccugcccaagugcuggcugguguccaacggcagcuaccucaacgagacgcacuucuccgacgacaucgagcagcaggccgacaacaugaucaccgagaugcugcagaaggaguacauggagcgccagggcaagaccccgcuggggcucgucgaccuguucguguucagcaccuccuucuaccugaucagcaucuuccugcaccucgugaagaucccgacgcaccggcacaucgucggcaagcccugccccaagccccaccgccugaaccacauggggaucugcuccugcggccuguacaagcagccgggggugcccgugaaguggaagcggugaggacuaguaauaaggaaacuguaugaaugucugugggcaggaagugaagagauccuucuguaaagguuuuuggaauuaugucugcugaauaauaaacuuuuuugaaauaauaaaucugguagaaaaaugagaucuaaaaaaaaaaaaaaaaaaaaaaaaaaaaaaaaaaaaaaaaaaaaaaaaaaaaaaaaaaaaaaaaugcaucccccccccccccccccccccccccccccccaaaggcucuuuucagagccaccagaauu

SEQ ID NO: 2860 - RNA, 1816 nt, Artificial Sequence
  mRNA product Design b-4 comprising derived and/or modified sequence from LASV(LM776-SLE-2012;Clade IV)__AIT17824__GPC (opt1)
gggagagucccgcagucggcguccagcggcucugcuuguucgugugugugucguugcaggccuuauucaagcuuaccaugggccagaucgugaccuucuuccaggaggucccccacgugaucgaggaggugaugaacaucguccugaucgcccucagcauccuggccgugcugaaggggcucuacaacuucgcgaccugcggccugguggggcuggucacguuccuccugcugugcggccgcuccugcaccaccagcguguacaaggggguguacgagcuccagacccuggagcugaacauggagacgcucaacaugaccaugccgcuguccugcaccaagaacaacagccaccacuacaucauggucggcaacgagaccggccuggagcucacgcugaccaacaccuccaucaucaaccacaaguucugcaaccugagcgacgcccacaagaagaaccucuacgaccacgcccugauguccaucaucagcaccuuccaccuguccauccccaacuucaaccaguacgaggccaugagcugcgacuucaacgggggcaagaucuccgugcaguacaaccucagccacuccuacgccggggacgcggccaaccacugcggcacgguggccaacgggguccugcagaccuucaugcggauggccuggggcggcagcuacaucgcgcuggacuccgggcacggcaagugggacugcaucaugaccagcuaccaguaccucaucauccagaacaccacgugggaggaccacugccaguucucccgccccagccccaucggguaccugggccugcucucccagcggacccgcgacaucuacaucagccggcgccugcugggcaccuucaccuggacgcucagcgacuccgaggggaaggacaccccgggcggguacugccugacccgguggaugcugaucgaggccgagcucaagugcuucggcaacaccgccguggccaagugcaacgagaagcacgacgaggaguucugcgacaugcugcgccuguucgacuucaacaagcaggccauccagcggcucaaggcggaggcccagaugagcauccagcugaucaacaaggccgugaacgcccugaucaacgaccagcucaucaugaagaaccaccuccgcgacaucauggggauccccuacugcaacuacuccaaguacugguaccugaaccacacgaccaccggcaagaccagccugcccaagugcuggcuggucuccaacggcagcuaccugaacgagacgcacuucuccgacgacaucgagcagcaggccgacaacaugaucaccgagaugcuccagaaggaguacauggagcggcaggggaagacgccccugggccugguggaccucuucguguucagcaccuccuucuaccugaucagcaucuuccugcaccuggucaagaucccgacccaccgccacaucguggggaaguccugccccaagccccaccggcucaaccacaugggcaucugcagcugcgggcuguacaagcagcccggcgugccgguccgcuggaagcggugaggacuaguaauaaggaaacuguaugaaugucugugggcaggaagugaagagauccuucuguaaagguuuuuggaauuaugucugcugaauaauaaacuuuuuugaaauaauaaaucugguagaaaaaugagaucuaaaaaaaaaaaaaaaaaaaaaaaaaaaaaaaaaaaaaaaaaaaaaaaaaaaaaaaaaaaaaaaaugcaucccccccccccccccccccccccccccccccaaaggcucuuuucagagccaccagaauu

SEQ ID NO: 2861 - RNA, 1816 nt, Artificial Sequence
  mRNA product Design b-4 comprising derived and/or modified sequence from LASV(Mad39;Clade IV)__ANH09722__GPC (opt1)
gggagagucccgcagucggcguccagcggcucugcuuguucgugugugugucguugcaggccuuauucaagcuuaccaugggccagaucgugaccuucuuccaggaggucccccacgugaucgaggaggugaugaacaucguccugaucgcccucagcauccuggccgugcugaaggggcucuacaacguggcgaccugcggccugaucgggcuggucacguuccuccugcugugcggccgcuccugcaccaccacccucuacaaggggguguacgagcugcaggcccuggagcucaacauggagacgcugaacaugaccaugccgcugagcugcaccaagaacaacucccaccacuacauccgggugggcaacgagaccggccucgagcugacgcugaccaacaccagccucaucaaccacaaguucugcaaccuguccgacgcccacaagaagaaccuguacgaccacgcccucaugagcaucaucuccaccuuccaccugagcauccccaacuucaaccaguacgaggccauguccugcgacuucaacgacgggaagaucagcguccaguacaaccugucccacacguacgcgggcgacaccgccaaccacugcgggaccguggccaacggcgugcuccagaccuucaugcgcauggccuggggcgggagcuacaucgcgcuggacuccggccgcgggggcugggacugcaucaugacgagcuaccaguaccugaucauccagaacaccaccugggaggaccacugccaguucucccggcccagccccaucggguaccucggccugcugucccagcggacccgcgacaucuacaucagccggcgccuccugggcacguucaccuggacccuguccgacagcgaggggaaggacaccccgggcggguacugccucacgcgguggaugcugaucgaggccgagcugaagugcuucggcaacaccgccgucgccaagugcaacgagaagcacgacgaggaguucugcgacaugcuccgccuguucgacuucaacaagcaggccauccagcggcugaaggcggaggcccagaugagcauccagcucaucaacaaggccgugaacgcccugaucaacgaccagcugaucaugaagaaccaccuccgcgacaucauggggauccccuacugcaacuacuccaaguacugguaccugaaccacaccgugaccggcaagacgagccugcccaagugcuggcucgucuccaacggcagcuaccugaacgagacccacuucuccgacgacaucgagcagcaggccgacaacaugaucaccgagaugcugcagaaggaguacauggagcggcaggggaagacgccccucggccugguggaccuguucguguucagcaccuccuucuaccugaucagcaucuuccuccaccuggucaagaucccgacccaccgccacgugguggggaagcccugccccaagccccaccggcugaaccacaugggcaucugcuccugcggguucuacaagcagccgggcguccccgugcgcuggaagcggugaggacuaguaauaaggaaacuguaugaaugucugugggcaggaagugaagagauccuucuguaaagguuuuuggaauuaugucugcugaauaauaaacuuuuuugaaauaauaaaucugguagaaaaaugagaucuaaaaaaaaaaaaaaaaaaaaaaaaaaaaaaaaaaaaaaaaaaaaaaaaaaaaaaaaaaaaaaaaugcaucccccccccccccccccccccccccccccccaaaggcucuuuucagagccaccagaauu

SEQ ID NO: 2862 - RNA, 1816 nt, Artificial Sequence
  mRNA product Design b-4 comprising derived and/or modified sequence from LASV(Z0947-SLE-2011;Clade IV)__AIT17840__GPC (opt1)
gggagagucccgcagucggcguccagcggcucugcuuguucgugugugugucguugcaggccuuauucaagcuuaccaugggccagaucgugaccuucuuccaggaggucccccacgugaucgaggaggugaugaacaucguccugaucgcccucagcauccuggccgugcugaaggggcucuacaacuucgcgaccugcggccugguggggcuggucacguuccuccugcugugcggccgcuccugcaccaucagccucuacaaggggguguacgagcugcagacccuggagcucaacauggagacccugaacaugacgaugccgcuguccugcaccaagaacaacagccaccacuacaucauggugggcaacgagaccggccucgagcugacccugacgaacaccuccaucaucaaccacaaguucugcaaccucagcgacgcccacaagaagaaccuguacgaccacgcccugauguccaucaucagcaccuuccaccucuccauccccaacuucaaccaguacgaggccaugagcugcgacuucaacgggggcaagaucuccguccaguacaaccugagccacuccuacgccggggacgcggccaaccacugcggcaccguggccaacggggugcugcagacguucaugcggauggccuggggcggcagcuacaucgcgcucgacuccgggcgcgaccggugggacugcaucaugaccagcuaccaguaccugaucauccagaacaccaccugggaggaccacugccaguucucccgccccagccccaucggcuaccuggggcuccugucccagcggacgcgcgacaucuacaucagccggcgccugcucggcaccuucaccuggacccugagcgacuccgagggcaaggacacgcccgggggcuacugccugacccgguggaugcucaucgaggccgagcugaagugcuucgggaacaccgccgucgccaagugcaacgagaagcacgacgaggaguucugcgacaugcugcgccucuucgacuucaacaagcaggccauccagcggcugaaggcggaggcccagaugagcauccagcugaucaacaaggccgugaacgcccucaucaacgaccagcugaucaugaagaaccaccuccgcgacaucaugggcauccccuacugcaacuacuccaaguacugguaccugaaccacaccacgaccgggaagaccagccugcccaagugcuggcugguguccaacggcagcuaccucaacgagacccacuucuccgacgacaucgagcagcaggccgacaacaugaucacggagaugcugcagaaggaguacauggagcggcagggcaagaccccgcuggggcucgucgaccuguucguguucagcaccuccuucuaccugaucagcaucuuccugcaccucgugaagaucccgacccaccgccacaucgucggcaagcccugccccaagccccaccggcugaaccacauggggaucugcuccugcggccuguacaagcagccgggggugcccgugaaguggaagcgcugaggacuaguaauaaggaaacuguaugaaugucugugggcaggaagugaagagauccuucuguaaagguuuuuggaauuaugucugcugaauaauaaacuuuuuugaaauaauaaaucugguagaaaaaugagaucuaaaaaaaaaaaaaaaaaaaaaaaaaaaaaaaaaaaaaaaaaaaaaaaaaaaaaaaaaaaaaaaaugcaucccccccccccccccccccccccccccccccaaaggcucuuuucagagccaccagaauu

SEQ ID NO: 2863 - RNA, 1816 nt, Artificial Sequence
  mRNA product Design b-4 comprising derived and/or modified sequence from LASV(Josiah;Clade IV)__NP_694870__GPC (opt2)
gggagagucccgcagucggcguccagcggcucugcuuguucgugugugugucguugcaggccuuauucaagcuuaccaugggccagaucgucaccuucuuccaggaggucccccacgucaucgaggaggucaugaacaucguccucaucgcccucuccguccucgccguccucaagggccucuacaacuucgccaccugcggccucgucggccucgucaccuuccuccuccucugcggccgcuccugcaccaccucccucuacaagggcgucuacgagcuccagacccucgagcucaacauggagacccucaacaugaccaugccccucuccugcaccaagaacaacucccaccacuacaucauggucggcaacgagaccggccucgagcucacccucaccaacaccuccaucaucaaccacaaguucugcaaccucuccgacgcccacaagaagaaccucuacgaccacgcccucauguccaucaucuccaccuuccaccucuccauccccaacuucaaccaguacgaggccauguccugcgacuucaacggcggcaagaucuccguccaguacaaccucucccacuccuacgccggcgacgccgccaaccacugcggcaccgucgccaacggcguccuccagaccuucaugcgcauggccuggggcggcuccuacaucgcccucgacuccggccgcggcaacugggacugcaucaugaccuccuaccaguaccucaucauccagaacaccaccugggaggaccacugccaguucucccgccccucccccaucggcuaccucggccuccucucccagcgcacccgcgacaucuacaucucccgccgccuccucggcaccuucaccuggacccucuccgacuccgagggcaaggacacccccggcggcuacugccucacccgcuggaugcucaucgaggccgagcucaagugcuucggcaacaccgccgucgccaagugcaacgagaagcacgacgaggaguucugcgacaugcuccgccucuucgacuucaacaagcaggccauccagcgccucaaggccgaggcccagauguccauccagcucaucaacaaggccgucaacgcccucaucaacgaccagcucaucaugaagaaccaccuccgcgacaucaugggcauccccuacugcaacuacuccaaguacugguaccucaaccacaccaccaccggccgcaccucccuccccaagugcuggcucgucuccaacggcuccuaccucaacgagacccacuucuccgacgacaucgagcagcaggccgacaacaugaucaccgagaugcuccagaaggaguacauggagcgccagggcaagaccccccucggccucgucgaccucuucgucuucuccaccuccuucuaccucaucuccaucuuccuccaccucgucaagauccccacccaccgccacaucgucggcaaguccugccccaagccccaccgccucaaccacaugggcaucugcuccugcggccucuacaagcagcccggcguccccgucaaguggaagcgcugaggacuaguaauaaggaaacuguaugaaugucugugggcaggaagugaagagauccuucuguaaagguuuuuggaauuaugucugcugaauaauaaacuuuuuugaaauaauaaaucugguagaaaaaugagaucuaaaaaaaaaaaaaaaaaaaaaaaaaaaaaaaaaaaaaaaaaaaaaaaaaaaaaaaaaaaaaaaaugcaucccccccccccccccccccccccccccccccaaaggcucuuuucagagccaccagaauu

SEQ ID NO: 2864 - RNA, 1813 nt, Artificial Sequence
  mRNA product Design b-4 comprising derived and/or modified sequence from LASV(LP;Clade I)__AAF86701__GPC (opt2)
gggagagucccgcagucggcguccagcggcucugcuuguucgugugugugucguugcaggccuuauucaagcuuaccaugggccagaucaucaccuucuuccaggaggucccccacgucaucgaggaggucaugaacaucguccucaucgcccucucccuccucgccauccucaagggccucuacaacaucgccaccugcggcaucaucggccucgucgccuuccucuuccucugcggcaaguccugcucccucacccucaagggcggcuacgagcuccagacccucgagcucaacauggagacccucaacaugaccaugccccucuccugcaccaagaacuccucccaccacuacauccgcgucggcaacgagaccggccucgagcucacccucaccaacaccuccaucaucaaccacaaguucugcaaccucuccgacgcccacaagaagaaccucuacgaccacgcccucauguccaucaucuccaccuuccaccucuccauccccaacuucaaccaguacgaggccauguccugcgacuucaacggcggcaagaucuccguccaguacaaccucucccacuccuacgccggcgacgccgccgagcacugcggcaccgucgccaacggcguccuccagaccuucaugcgcauggccuggggcggccgcuacaucgcccucgacuccggcaagggcaacugggacugcaucaugaccuccuaccaguaccucaucauccagaacaccaccugggaggaccacugccaguucucccgccccucccccaucggcuaccucggccuccucucccagcgcacccgcgacaucuacaucucccgccgccuccucggcaccuucaccuggacccucuccgacuccgagggcaacgagacccccggcggcuacugccucacccgcuggaugcucaucgaggccgagcucaagugcuucggcaacaccgccgucgccaagugcaacgagaagcacgacgaggaguucugcgacaugcuccgccucuucgacuucaacaagcaggccauccgccgccucaaggccgaggcccagauguccauccagcucaucaacaaggccgucaacgcccucaucaacgaccagcucaucaugaagaaccaccuccgcgacaucaugggcauccccuacugcaacuacuccaaguacugguaccucaaccacaccuccuccggccgcaccucccuccccaagugcuggcucaucuccaacggcuccuaccucaacgagacccaguucuccgacgacaucgagcagcaggccgacaacaugaucaccgagaugcuccagaaggaguacaucgagcgccagggcaagaccccccucggccucgucgacaucuucaucuucuccaccuccuucuaccucaucuccaucuuccuccaccucaucaagauccccacccaccgccacaucgucggcaagcccugccccaagccccaccgccucaaccacaugggcgucugcuccugcggccucuacaagcaccccggcguccccaccaaguggaagcgcugaggacuaguaauaaggaaacuguaugaaugucugugggcaggaagugaagagauccuucuguaaagguuuuuggaauuaugucugcugaauaauaaacuuuuuugaaauaauaaaucugguagaaaaaugagaucuaaaaaaaaaaaaaaaaaaaaaaaaaaaaaaaaaaaaaaaaaaaaaaaaaaaaaaaaaaaaaaaaugcaucccccccccccccccccccccccccccccccaaaggcucuuuucagagccaccagaauu

SEQ ID NO: 2865 - RNA, 1813 nt, Artificial Sequence
  mRNA product Design b-4 comprising derived and/or modified sequence from LASV(803213;Clade II)__AAF86703__GPC (opt2)
gggagagucccgcagucggcguccagcggcucugcuuguucgugugugugucguugcaggccuuauucaagcuuaccaugggccagaucaucaccuucuuccaggaggucccccacgucaucgaggaggucaugaacaucguccucaucgcccucucccuccucgccauccucaagggcaucuacaacgucgccaccugcggccucuucggccucaucuccuuccuccuccucugcggccgcuccugcuccgucaccuacaagggcgucuacgagcuccagacccucgagcucaacauggccaaccucaacaugaccaugccccucuccugcaccaagaacaacucccaccacuacaucauggucggcaacgagaccggccucgagcucacccucaccaacaccuccaucaucaaccacaaguucugcaaccucuccgacgcccacaagaagaaccucuacgaccacgcccucauguccaucaucuccaccuuccaccucuccauccccaacuucaaccaguacgaggccauguccugcgacuucaacggcggcaagaucuccguccaguacaaccucucccacuccuucgccgucgacgccgccaaccacugcggcaccaucgccaacggcguccuccagaccuucaugcgcauggccuggggcggcuccuacaucgcccucgacuccggcaagggcaacugggacugcaucaugaccuccuaccaguaccucaucauccagaacaccaccugggaggaccacugccaguucucccgccccucccccaucggcuaccucggccuccucucccagcgcacccgcgacaucuacaucucccgccgccuccucggcaccuucaccuggacccucuccgacuccgagggcaacgaggcccccggcggcuacugccucacccgcuggaugcucaucgaggccgagcucaagugcuucggcaacaccgccgucgccaagugcaacgagaagcacgacgaggaguucugcgacaugcuccgccucuucgacuucaacaagcaggccaucaagcgccucaagaccgaggcccagauguccauccagcucaucaacaaggccgucaacgcccucaucaacgaccagcucaucaugaagaaccaccuccgcgacaucaugggcauccccuacugcaacuacucccgcuacugguaccucaaccacaccgucaccggcaagaccucccucccccgcugcuggcucgucuccaacggcuccuaccucaacgagacccacuucuccgacgacaucgagcagcaggccgacaacaugaucaccgagaugcuccagaaggaguacauggaccgccagggcaagaccccccucggccucgucgaccucuucgucuucuccaccuccuucuaccucaucuccaucuuccuccaccucgucaagauccccacccaccgccacaucgucggcaagcccugccccaagccccaccgccucaaccacaugggcaucugcuccugcggccucuacaagcaccccggcguccccgucaaguggaagcgcugaggacuaguaauaaggaaacuguaugaaugucugugggcaggaagugaagagauccuucuguaaagguuuuuggaauuaugucugcugaauaauaaacuuuuuugaaauaauaaaucugguagaaaaaugagaucuaaaaaaaaaaaaaaaaaaaaaaaaaaaaaaaaaaaaaaaaaaaaaaaaaaaaaaaaaaaaaaaaugcaucccccccccccccccccccccccccccccccaaaggcucuuuucagagccaccagaauu

SEQ ID NO: 2866 - RNA, 1813 nt, Artificial Sequence
  mRNA product Design b-4 comprising derived and/or modified sequence from LASV(GA391;Clade III)__CAA36645__GPC (opt2)
gggagagucccgcagucggcguccagcggcucugcuuguucgugugugugucguugcaggccuuauucaagcuuaccaugggccagaucgucaccuucuuccaggaggucccccacgucaucgaggaggucaugaacaucguccucaucgcccucuccauccucgccauccucaagggccucuacaacgucgccaccugcggccucaucggccucgucaccuuccuccuccucuccggccgcuccugcucccucaucuacaagggcaccuacgagcuccagacccucgagcucaacauggagacccucaacaugaccaugccccucuccugcaccaagaacaacucccaccacuacauccgcgucggcaacgagaccggccucgagcucacccucaccaacaccuccauccucaaccacaaguucugcaaccucuccgacgcccacaagcgcaaccucuacgaccacucccucauguccaucaucuccaccuuccaccucuccauccccaacuucaaccaguacgaggccauguccugcgacuucaacggcggcaagaucaccguccaguacaaccucucccacuccuucgccgucgacgccgccggccacugcggcacccucgccaacggcguccuccagaccuucaugcgcauggccuggggcggcuccuacaucgcccucgacuccggccgcggcaacugggacugcaucaugaccuccuaccaguaccucaucauccagaacaccaccugggacgaccacugccaguucucccgccccucccccaucggcuaccucggccuccucucccagcgcacccgcgacaucuacaucucccgccgccuccucggcaccuucaccuggacccucuccgacuccgagggcaacgagacccccggcggcuacugccucacccgcuggaugcucaucgaggccgagcucaagugcuucggcaacaccgccgucgccaagugcaacgagaagcacgacgaggaguucugcgacaugcuccgccucuucgacuucaacaagcaggccauccgccgccucaagaccgaggcccagauguccauccagcucaucaacaaggccgucaacgcccucaucaacgaccagcucaucaugaagaaccaccuccgcgacaucaugggcauccccuacugcaacuacucccgcuacugguaccucaaccacaccuccaccggcaagaccucccucccccgcugcuggcucaucuccaacggcuccuaccucaacgagaccaaguucuccgacgacaucgagcagcaggccgacaacaugaucaccgagaugcuccagaaggaguacaucgaccgccagggcaagaccccccucggccucgucgaccucuucgucuucuccaccuccuucuaccucaucuccaucuuccuccaccucgucaagauccccacccaccgccacaucgucggcaagcccugccccaagccccaccgccucaaccacaugggcaucugcuccugcggccucuacaagcagcccggcguccccguccgcuggaagcgcugaggacuaguaauaaggaaacuguaugaaugucugugggcaggaagugaagagauccuucuguaaagguuuuuggaauuaugucugcugaauaauaaacuuuuuugaaauaauaaaucugguagaaaaaugagaucuaaaaaaaaaaaaaaaaaaaaaaaaaaaaaaaaaaaaaaaaaaaaaaaaaaaaaaaaaaaaaaaaugcaucccccccccccccccccccccccccccccccaaaggcucuuuucagagccaccagaauu

SEQ ID NO: 2867 - RNA, 1816 nt, Artificial Sequence
  mRNA product Design b-4 comprising derived and/or modified sequence from LASV(AV;Clade V)__CCA30314__GPC (opt2)
gggagagucccgcagucggcguccagcggcucugcuuguucgugugugugucguugcaggccuuauucaagcuuaccaugggccagaucgucaccuucuuccaggaggucccccacgucaucgaggaggucaugaacaucguccucaucgcccucuccauccucgccguccucaagggccucuacaacaucgccaccugcggccucaucggccucaucaccuuccuccuccucugcggccgcuccugcuccuccaaccucuacaagggcgucuacgagcuccagucccucgaccucaacauggagacccucaacaugaccaugccccucuccugcaccaagaacaacucccaccacuacauccgcgucggcaacgacaccggccucgagcucacccucaccaacaccuccauccucaaccacaaguucugcaaccucuccgacgcccacaagaaggaccucuacgaccacgcccucauguccaucaucuccaccuuccaccucuccauccccaacuucaaccaguacgaggccauguccugcgacuucaacggcggcaagaucuccguccaguacaaccucucccacuccuacgccaucgacgccgccaaccacugcggcaccgucgccaacggcauccuccagaccuucaugcgcauggccuggggcggcuccuacaucgcccucgacuccggccgcggcaacugggacugcaucaugaccuccuaccaguaccucaucauccagaacaccaccugggagaaccacugccaguucucccgccccucccccaucggcuaccucggccuccucucccagcgcacccgcgacaucuacaucucccgccgccuccucggcaccuucaccuggacccucuccgacuccgagggcaacgccacccccggcggcuacugccucacccgcuggaugcucaucgaggccgagcucaagugcuucggcaacaccgccgucgccaagugcaacgagaagcacgacgaggaguucugcgacaugcuccgccucuucgacuucaacaagcaggccaucucccgccucaaguccgaggcccagauguccauccagcucaucaacaaggccgucaacgcccucaucaacgaccagcucaucaugaagaaccaccuccgcgacaucaugggcauccccuacugcaacuacuccaaguacugguaccucaaccacaccaucaccggcaagaccucccuccccaagugcuggcucgucuccaacggcuccuaccucaacgagacccacuucuccgacgacaucgagcagcaggccgacaacaugaucaccgagaugcuccagaaggaguacauggagcgccagggcaagaccccccucggccucgucgaccucuucgucuucuccaccuccuucuaccucaucuccaucuuccuccgccucgucaagauccccacccaccgccacaucgucggcaagcccugccccaagccccaccgccucaaccacaugggcaucugcuccugcggccucuacaagcagcccggcguccccguccgcuggaagcgcugaggacuaguaauaaggaaacuguaugaaugucugugggcaggaagugaagagauccuucuguaaagguuuuuggaauuaugucugcugaauaauaaacuuuuuugaaauaauaaaucugguagaaaaaugagaucuaaaaaaaaaaaaaaaaaaaaaaaaaaaaaaaaaaaaaaaaaaaaaaaaaaaaaaaaaaaaaaaaugcaucccccccccccccccccccccccccccccccaaaggcucuuuucagagccaccagaauu

SEQ ID NO: 2868 - RNA, 1813 nt, Artificial Sequence
  mRNA product Design b-4 comprising derived and/or modified sequence from LASV(Togo/2016/7082;Clade VI)__AMR44577__GPC (opt2)
gggagagucccgcagucggcguccagcggcucugcuuguucgugugugugucguugcaggccuuauucaagcuuaccaugggccagaucaucaccuucuuccaggaggucccccacgucaucgaggaggucaugaacaucguccucaucgcccucucccuccucgccauccucaagggcgucuacaacgucgccaccugcggcaucaucggccucgucaccuuccucuuccucugcggccgcuccugcucccucaucuacaagggcuccuacgagcuccagacccucgagcucaacauggagacccucaacaugaccaugccccucuccugcaccaagaacuccucccaccacuacauccgcgucggcaacgagaccggccucgagcucacccucaccaacaccuccaucaucaaccacaaguucugcaaccucuccgacgcccacaagcgcaaccucuacgaccacgcccucauguccauccucuccaccuuccaccucuccauccccaacuucaaccaguacgaggccauguccugcgacuucaacggcggcaagaucuccguccaguacaaccucucccacgccuacgccgucgacgccgccgagcacugcggcaccgucgccaacggcguccuccagaccuucaugcgcauggccuggggcggcuccuacaucgcccucgacuccggccgcggcaacugggacugcaucaugaccuccuaccaguaccucaucauccagaacaccaccugggaggaccacugccaguucucccgccccucccccaucggcuaccucggccuccucucccagcgcacccgcgacaucuacaucucccgccgccuccucggcaccuucaccuggacccucuccgacuccgagggcaacgagacccccggcggcuacugccucacccgcuggaugcucaucgaggccgagcucaagugcuucggcaacaccgccgucgccaagugcaacgagaagcacgacgaggaguucugcgacaugcuccgccucuucgacuucaacaagcaggccauccagcgccucaaguccgaggcccagauguccauccagcucaucaacaaggccgucaacgcccucaucaacgaccagcucaucaugaagaaccaccuccgcgacaugaugggcauccccuacugcaacuacuccaaguacugguaccucaaccacaccuccuccggccgcaccucccuccccaagugcuggcucgucuccaacggcuccuaccucaacgagacccacuucuccgacgacaucgagcagcaggccgacaacaugaucaccgagaugcuccagaaggaguacaucgaccgccagggcaagaccccccucggccucgucgaccucuucgucuucuccaccuccuucuaccucaucuccaucuuccuccaccucaucaagauccccacccaccgccacaucgucggcaagcccugccccaagccccaccgccucaaccacaugggcaucugcuccugcggccucuacaagcagcccggcguccccacccgcuggaagcgcugaggacuaguaauaaggaaacuguaugaaugucugugggcaggaagugaagagauccuucuguaaagguuuuuggaauuaugucugcugaauaauaaacuuuuuugaaauaauaaaucugguagaaaaaugagaucuaaaaaaaaaaaaaaaaaaaaaaaaaaaaaaaaaaaaaaaaaaaaaaaaaaaaaaaaaaaaaaaaugcaucccccccccccccccccccccccccccccccaaaggcucuuuucagagccaccagaauu

SEQ ID NO: 2869 - RNA, 1813 nt, Artificial Sequence
  mRNA product Design b-4 comprising derived and/or modified sequence from LASV(KAK-428;Clade n.d. (VII))__ANH09740__GPC (opt2)
gggagagucccgcagucggcguccagcggcucugcuuguucgugugugugucguugcaggccuuauucaagcuuaccaugggccagaucgucaccuucuuccaggaggucccccacgucaucgaggaggucaugaacaucguccucaucgcccucucccuccucgccauccucaagggccucuacaacuucgccaccugcggcgucaucggccucaucaccuuccuccuccucugcggccgcuccugcuccgccaccuacaagggccaguacgagcuccagacccucgagcucaacauggagucccucaacaugaccaugccccucuccugcaccaagaacaacucccaccacuacauccgcgccggcaacaacaccggccucgagcucacccucaccaacaccuccaucaucucccacaaguucugcaaccucuccgacgcccacaagaagaaccucuacgaccacacccucauguccaucaucaccaccuuccaccucuccauccccaacuucaaccaguacgaggccauguccugcgacuucaacggcggcaagaucuccauccaguacaaccucucccacuccuacgccggcgacgccgcccagcacugcggcaccgucgccaacggcguccuccagaccuucaugcgcauggccuggggcggcuccuaccucgcccucgacuccggccgccgcggcugggacugcaucaucuccuccuaccaguaccucaucauccagaacaccaccugggacgaccacugccaguucucccgccccucccccaucggcuaccucggcuucgucucccagaagacccgcgacaucuacaucucccgccgccuccucggcaccuucaccuggacccucuccgacuccgagggccacgacaugcccggcggcuacugccucacccgcuggaugcucaucgaggccgaccucaagugcuucggcaacaccgccgucgccaagugcaacgagaagcacgacgaggaguucugcgacauguggcgccucuucgacuucaacaagcaggccauccagcgccucaaggccgaggcccagaugaacauccagcucaucaacaaggccgucaacgcccucaucaacgaccagcucaugaugaagaaccaccuccgcgacaucaugggcauccccuacugcaacuacuccaaguucugguaccucaacaacaccaccaccggccgcaccucccucccccgcugcuggcucaucuccaacggcuccuaccucaacgagacccacuucuccgacgacaucgagcagcaggccgacaacaugaucaccgagaugcuccagaaggaguacauggaccgccagggcaagaccccccucggccucgucgaccucuucgucuucuccaccuccuucuaccucaucaccaucuuccuccaccucgucaagauccccacccaccgccacaucgucggcaagcccugccccaagccccaccgccucaaccacaugggcaucugcuccugcggccucuacaagcagcccggcguccccguccgcuggaagcgcugaggacuaguaauaaggaaacuguaugaaugucugugggcaggaagugaagagauccuucuguaaagguuuuuggaauuaugucugcugaauaauaaacuuuuuugaaauaauaaaucugguagaaaaaugagaucuaaaaaaaaaaaaaaaaaaaaaaaaaaaaaaaaaaaaaaaaaaaaaaaaaaaaaaaaaaaaaaaaugcaucccccccccccccccccccccccccccccccaaaggcucuuuucagagccaccagaauu

SEQ ID NO: 2870 - RNA, 1813 nt, Artificial Sequence; identical to SEQ ID NO: 2864
  mRNA product Design b-4 comprising derived and/or modified sequence from LASV(Pinneo-NIG-1969;Clade I)__AIT17836__GPC (opt2)

SEQ ID NO: 2871 - RNA, 1813 nt, Artificial Sequence
  mRNA product Design b-4 comprising derived and/or modified sequence from LASV(ISTH0009-NIG-2011;Clade II)__AIT17404__GPC (opt2)
gggagagucccgcagucggcguccagcggcucugcuuguucgugugugugucguugcaggccuuauucaagcuuaccaugggccagaucaucaccuucuuccaggaggucccccacgucaucgaggaggucaugaacaucguccucaucgcccucucccuccucgccauccucaagggcaucuacaacgucgccaccugcggccucuucggccucgucuccuuccuccuccucugcggccgcuccugcuccaccaccuacaagggcgucuacgagcuccagacccucgagcucgacauggccucccucaacaugaccaugccccucuccugcaccaagaacaacucccaccacuacaucauggucggcaacgagaccggccucgagcucacccucaccaacaccuccaucaucaaccacaaguucugcaaccucuccgacgcccacaagaagaaccucuacgaccacgcccucauguccaucaucuccaccuuccaccucuccauccccaacuucaaccaguacgaggccauguccugcgacuucaacggcggcaagaucuccguccaguacaaccucucccacgccuacgccgucgacgccgccaaccacugcggcaccaucgccaacggcguccuccagaccuucaugcgcauggccuggggcggcuccuacaucgcccucgacuccggcaagggcuccugggacugcaucaugaccuccuaccaguaccucaucauccagaacaccaccugggaggaccacugccaguucucccgccccucccccaucggcuaccucggccuccucucccagcgcacccgcgacaucuacaucucccgccgccuccucggcaccuucaccuggacccucuccgacuccgagggcaacgagacccccggcggcuacugccucacccgcuggaugcucaucgaggccgagcucaagugcuucggcaacaccgccgucgccaagugcaacgagaagcacgacgaggaguucugcgacaugcuccgccucuucgacuucaacaagcaggccauccgccgccucaagaccgaggcccagauguccauccagcucaucaacaaggccgucaacgcccucaucaacgaccagcucaucaugaagaaccaccuccgcgacaucaugggcauccccuacugcaacuacuccaaguacugguaccucaaccacaccgucaccggcaagaccucccucccccgcugcuggcucgucuccaacggcuccuaccucaacgagacccacuucuccgacgacaucgagcagcaggccgacaacaugaucaccgagcuccuccagaaggaguacauggaccgccagggcaagaccccccucggccucgucgaccucuucgucuucuccaccuccuucuaccucaucuccaucuuccuccaccucaucaagauccccacccaccgccacaucaccggcaagcccugccccaagccccaccgccucaaccacaugggcaucugcuccugcggccucuacaagcaccccggcguccccgucaaguggaagcgcugaggacuaguaauaaggaaacuguaugaaugucugugggcaggaagugaagagauccuucuguaaagguuuuuggaauuaugucugcugaauaauaaacuuuuuugaaauaauaaaucugguagaaaaaugagaucuaaaaaaaaaaaaaaaaaaaaaaaaaaaaaaaaaaaaaaaaaaaaaaaaaaaaaaaaaaaaaaaaugcaucccccccccccccccccccccccccccccccaaaggcucuuuucagagccaccagaauu

SEQ ID NO: 2872 - RNA, 1813 nt, Artificial Sequence
  mRNA product Design b-4 comprising derived and/or modified sequence from LASV(ISTH2010-NIG-2012;Clade II)__AIT17482__GPC (opt2)
gggagagucccgcagucggcguccagcggcucugcuuguucgugugugugucguugcaggccuuauucaagcuuaccaugggccagaucaucaccuucuuccaggaggucccccacgucaucgaggaggucaugaacaucguccucaucgcccucucccuccucgccauccucaagggcaucuacaacgucgccaccugcggccucuucggccucgucuccuuccuccuccucugcggccgcuccugcuccaccaccuacaagggcgucuacgagcuccagacccucgagcucgacauggccucccucaacaugaccaugccccucuccugcaccaagaacaacucccaccacuacaucauggucggcaacgagaccggccucgagcucacccucaccaacaccuccaucaucaaccacaaguucugcaaccucuccgacgcccacaagaagaaccucuacgaccacgcccucauguccaucaucuccaccuuccaccucuccauccccaacuucaaccaguacgaggccauguccugcgacuucaacggcggcaagaucuccguccaguacaaccucucccacgccuacgccgucgacgccgccaaccacugcggcaccaucgccaacggcguccuccagaccuucaugcgcauggccuggggcggcuccuacaucgcccucgacuccggcaagggcuccugggacugcaucaugaccuccuaccaguaccucaucauccagaacaucaccugggaggaccacugccaguucucccgccccucccccaucggcuaccucggccuccucucccagcgcacccgcgacaucuacaucucccgccgccuccucggcaccuucaccuggacccucuccgacuccgagggcaacgagacccccggcggcuacugccucacccgcuggaugcucaucgaggccgagcucaagugcuucggcaacaccgccgucgccaagugcaacgagaagcacgacgaggaguucugcgacaugcuccgccucuucgacuucaacaagcaggccauccgccgccucaagaccgaggcccagauguccauccagcucaucaacaaggccgucaacgcccucaucaacgaccagcucaucaugaagaaccaccuccgcgacaucaugggcauccccuacugcaacuacuccaaguacugguaccucaaccacaccgucaccggcaagaccucccucccccgcugcuggcucgucuccaacggcuccuaccucaacgagacccacuucuccgacgacaucgagcagcaggccgacaacaugaucaccgagcuccuccagaaggaguacaucgaccgccagggcaagaccccccucggccucgucgaccucuucgucuucuccaccuccuucuaccucaucuccaucuuccuccaccucgucaagauccccacccaccgccacgucgucggcaagcccugccccaagccccaccgccucaaccacaugggcaucugcuccugcggccucuacaagcaccccggcguccccgucaaguggaagcgcugaggacuaguaauaaggaaacuguaugaaugucugugggcaggaagugaagagauccuucuguaaagguuuuuggaauuaugucugcugaauaauaaacuuuuuugaaauaauaaaucugguagaaaaaugagaucuaaaaaaaaaaaaaaaaaaaaaaaaaaaaaaaaaaaaaaaaaaaaaaaaaaaaaaaaaaaaaaaaugcaucccccccccccccccccccccccccccccccaaaggcucuuuucagagccaccagaauu

SEQ ID NO: 2873 - RNA, 1813 nt, Artificial Sequence
  mRNA product Design b-4 comprising derived and/or modified sequence from LASV(Lassa virus/H.sapiens-wt/NGA/2015/ISTH_0543;Clade II)__AVO03639__GPC (opt2)
gggagagucccgcagucggcguccagcggcucugcuuguucgugugugugucguugcaggccuuauucaagcuuaccaugggccagaucaucaccuucuuccaggaggucccccacgucaucgaggaggucaugaacaucguccucaucgcccucucccuccucgccauccucaagggcaucuacaacgucgccaccugcggccucuucggccucgucuccuuccuccuccucugcggccgcuccugcuccaccaccuacaagggcgucuacgagcuccagacccucgagcucgacauggccaaccucaacaugaccaugccccucuccugcaccaagaacaacucccaccacuacaucauggucggcaacgagaccggccucgagcucacccucaccaacaccuccaucaucaaccacaaguucugcaaccucuccgacgcccacaagaagaaccucuacgaccacgcccucauguccaucaucuccaccuuccaccucuccauccccaacuucaaccaguacgaggccauguccugcgacuucaacggcggcaagaucuccguccaguacaaccucucccacaccuacgccgucgacgccgccaaccacugcggcaccaucgccaacggcguccuccagaccuucaugcgcauggccuggggcggcuccuacaucgcccucgacuccggcaagggcuccugggacugcaucaugaccuccuaccaguaccucgucauccagaacaccaccugggaggaccacugccaguucucccgccccucccccaucggcuaccucggccuccucucccagcgcacccgcgacaucuacaucucccgccgccuccucggcaccuucaccuggacccucuccgacuccgagggcaacgagacccccggcggcuacugccucacccgcuggaugcucaucgaggccgagcucaagugcuucggcaacaccgccgucgccaagugcaacgagaagcacgacgaggaguucugcgacaugcuccgccucuucgacuucaacaagcaggccauccgccgccucaagaccgaggcccagauguccauccagcucaucaacaaggccgucaacgcccucaucaacgaccagcucaucaugaagaaccaccuccgcgacaucaugggcauccccuacugcaacuacuccaaguacugguaccucaaccacaccgucaccggcaagaccucccucccccgcugcuggcucgucuccaacggcuccuaccucaacgagacccacuucuccgacgacaucgagcagcaggccgacaacaugaucaccgagcuccuccagaaggaguacaucgaccgccagggcaagaccccccucggccucgucgaccucuucgucuucuccaccuccuucuaccucaucuccaucuuccuccaccucgucaagauccccacccaccgccacaucaccggcaagcccugccccaagccccaccgccucaaccacaugggcaucugcuccugcggccucuacaagcaccccggcguccccgucaaguggaagcgcugaggacuaguaauaaggaaacuguaugaaugucugugggcaggaagugaagagauccuucuguaaagguuuuuggaauuaugucugcugaauaauaaacuuuuuugaaauaauaaaucugguagaaaaaugagaucuaaaaaaaaaaaaaaaaaaaaaaaaaaaaaaaaaaaaaaaaaaaaaaaaaaaaaaaaaaaaaaaaugcaucccccccccccccccccccccccccccccccaaaggcucuuuucagagccaccagaauu

SEQ ID NO: 2874 - RNA, 1813 nt, Artificial Sequence
  mRNA product Design b-4 comprising derived and/or modified sequence from LASV(Lassa virus/H.sapiens-wt/NGA/2016/ISTH_0009;Clade II)__AVO03571__GPC (opt2)
gggagagucccgcagucggcguccagcggcucugcuuguucgugugugugucguugcaggccuuauucaagcuuaccaugggccagaucaucaccuucuuccaggaggucccccacgucaucgaggaggucaugaacaucguccucaucgcccucucccuccucgccauccucaagggcaucuacaacgucgccaccugcggccuccucggccucgucuccuuccuccuccucugcggccgcuccugcuccaccaccuacaagggcgucuacgagcuccagacccucgagcucgacauggccucccucaacaugaccaugccccucuccugcaccaagaacaacucccaccacuacaucauggucggcaacgagaccggccucgagcucacccucaccaacaccuccaucaucaaccacaaguucugcaaccucuccgacgcccacaagaagaaccucuacgaccacgcccucauguccaucaucuccaccuuccaccucuccauccccaacuucaaccaguacgaggccauguccugcgacuucaacggcggccgcaucuccguccaguacaaccucucccacuccuacgccgucgacgccgccaaccacugcggcaccaucgccaacggcguccuccagaccuucaugcgcauggccuggggcggcuccuacaucgcccucgacuccggcaagggcuccugggacugcaucaugaccuccuaccaguaccucaucauccagaacaccaccugggaggaccacugccaguucucccgccccucccccaucggcuaccucggccuccucucccagcgcacccgcgacaucuacaucucccgccgccuccucggcaccuucaccuggacccucuccgacuccgagggcaacgagacccccggcggcuacugccucacccgcuggaugcucaucgaggccgagcucaagugcuucggcaacaccgccgucgccaagugcaacgagaagcacgacgaggaguucugcgacaugcuccgccucuucgacuucaacaagcaggccauccgccgccucaagaccgaggcccagauguccauccagcucaucaacaaggccgucaacgcccucaucaacgaccagcucaucaugaagaaccaccuccgcgacaucaugggcauccccuacugcaacuacuccaaguacugguaccucaaccacaccgucaccggcaagaccucccucccccgcugcuggcucgucuccaacggcuccuaccucaacgagacccacuucuccgacgacaucgagcagcaggccgacaacaugaucaccgagcuccuccagaaggaguacaucgaccgccagggcaagaccccccucggccucgucgaccucuucgucuucuccaccuccuucuaccucaucuccaucuuccuccaccucgucaagauccccacccaccgccacaucaccggcaagcccugccccaagccccaccgccucaaccacaugggcaucugcuccugcggccucuacaaccaccccggcguccccgucaaguggaagcgcugaggacuaguaauaaggaaacuguaugaaugucugugggcaggaagugaagagauccuucuguaaagguuuuuggaauuaugucugcugaauaauaaacuuuuuugaaauaauaaaucugguagaaaaaugagaucuaaaaaaaaaaaaaaaaaaaaaaaaaaaaaaaaaaaaaaaaaaaaaaaaaaaaaaaaaaaaaaaaugcaucccccccccccccccccccccccccccccccaaaggcucuuuucagagccaccagaauu

SEQ ID NO: 2875 - RNA, 1813 nt, Artificial Sequence
  mRNA product Design b-4 comprising derived and/or modified sequence from LASV(Lassa virus/H.sapiens-wt/NGA/2016/ISTH_0017;Clade II)__AVO03567__GPC (opt2)
gggagagucccgcagucggcguccagcggcucugcuuguucgugugugugucguugcaggccuuauucaagcuuaccaugggccagaucaucaccuucuuccaggaggucccccacgucaucgaggaggucaugaacaucguccucaucgcccucucccuccucgccauccucaagggcaucuacaacgucgccaccugcggccucuucggccucgucuccuuccuccuccucugcggccgcuccugcuccaccaccuacaagggcgucuacgagcuccagacccucgagcucgacauggccucccucaacaugaccaugccccucuccugcaccaagaacaacucccaccacuacaucauggucggcaacgagaccggccucgagcucacccucaccaacaccuccaucaucaaccacaaguucugcaaccucuccgacgcccacaagaagaaccucuacgaccacgcccucauguccaucaucuccaccuuccaccucuccauccccaacuucaaccaguacgaggccauguccugcgacuucaacggcggcaagaucuccguccaguacaaccucucccacaccuacgccaucgacgccgccaaccacugcggcaccaucgccaacggcguccuccagaccuucaugcgcauggccuggggcggcuccuacaucgcccucgacuccggcaagggcuccugggacugcaucaugaccuccuaccaguaccucaucauccagaacaccaccugggaggaccacugccaguucucccgccccucccccaucggcuaccucggccuccucucccagcgcacccgcgacaucuacaucucccgccgccuccucggcaccuucaccuggacccucuccgacuccgagggcaacgagacccccggcggcuacugccucacccgcuggaugcucaucgaggccgagcucaagugcuucggcaacaccgccgucgccaagugcaacgagaagcacgacgaggaguucugcgacaugcuccgccucuucgacuucaacaagcaggccauccgccgccucaagaccgaggcccagauguccauccagcucaucaacaaggccgucaacgcccucaucaacgaccagcucaucaugaagaaccaccuccgcgacaucaugggcauccccuacugcaacuacuccaaguacugguaccucaaccacaccgucaccggcaagaccucccucccccgcugcuggcucgucuccaacggcuccuaccucaacgagacccacuucuccgacgacaucgagcagcaggccgacaacaugaucaccgagcuccuccagaaggaguacauggaccgccagggcaagaccccccucggccucgucgaccucuucgucuucuccaccuccuucuaccucaucuccaucuuccuccaccucguccgcauccccacccaccgccacgucaucggcaagcccugccccaagccccaccgccucaaccacaugggcaucugcuccugcggccucuacaagcaccccggcguccccgucaaguggaagcgcugaggacuaguaauaaggaaacuguaugaaugucugugggcaggaagugaagagauccuucuguaaagguuuuuggaauuaugucugcugaauaauaaacuuuuuugaaauaauaaaucugguagaaaaaugagaucuaaaaaaaaaaaaaaaaaaaaaaaaaaaaaaaaaaaaaaaaaaaaaaaaaaaaaaaaaaaaaaaaugcaucccccccccccccccccccccccccccccccaaaggcucuuuucagagccaccagaauu

SEQ ID NO: 2876 - RNA, 1813 nt, Artificial Sequence
  mRNA product Design b-4 comprising derived and/or modified sequence from LASV(Lassa virus/H.sapiens-wt/NGA/2018/ISTH_0959;Clade II)__AVV65099__GPC (opt2)
gggagagucccgcagucggcguccagcggcucugcuuguucgugugugugucguugcaggccuuauucaagcuuaccaugggccagaucaucaccuucuuccaggaggucccccacgucaucgaggaggucaugaacaucguccucaucgcccucucccuccucgccauccucaagggcaucuacaacgucgucaccugcggccucuucggccucgucuccuuccuccuccucugcggccgcuccugcuccaccaccuacaagggcgucuacgagcuccagacccucgagcucgacauggccucccucaacaugaccaugccccucuccugcaccaagaacaacucccaccacuacaucauggucggcaacgagaccggccucgagcucacccucaccaacaccuccaucaucaaccacaaguucugcaaccucuccgacgcccacaagaagaaccucuacgaccacgcccucauguccaucaucuccaccuuccaccucuccauccccaacuucaaccaguacgaggccauguccugcgacuucaacggcggcaagaucuccguccaguacaaccucucccacgccuacgccaucgacgccgccaaccacugcggcaccaucgccaacggcguccuccagaccuucaugcgcauggccuggggcggcuccuacaucgcccucgacuccggcaagggcuccugggacugcaucaugaccuccuaccaguaccucaucauccagaacaccaccugggaggaccacugccaguucucccgccccucccccaucggcuaccucggccuccucucccagcgcacccgcgacaucuacaucucccgccgccuccucggcaccuucaccuggacccucuccgacuccgagggcaacgagacccccggcggcuacugccucacccgcuggaugcucaucgaggccgagcucaagugcuucggcaacaccgccgucgccaagugcaacgagaagcacgacgaggaguucugcgacaugcuccgccucuucgacuucaacaagcaggccauccgccgccucaagaccgaggcccagauguccauccagcucaucaacaaggccgucaacgcccucaucaacgaccagcucaucaugaagaaccaccuccgcgacaucaugggcauccccuacugcaacuacuccaaguacugguaccucaaccacaccgucaccggcaagaccucccucccccgcugcuggcucgucuccaacggcuccuaccucaacgagacccacuucuccgacgacaucgagcagcaggccgacaacaugaucaccgagcuccuccagaaggaguacaucgaccgccagggcaagaccccccucggccucgucgaccucuucgucuucuccaccuccuucuaccucaucuccaucuuccuccaccucgucaagauccccacccaccgccacgucaucggcaagcccugccccaagccccaccgccucaaccacaugggcaucugcuccugcggccucuacaagcaccccggcguccccgucaaguggaagcgcugaggacuaguaauaaggaaacuguaugaaugucugugggcaggaagugaagagauccuucuguaaagguuuuuggaauuaugucugcugaauaauaaacuuuuuugaaauaauaaaucugguagaaaaaugagaucuaaaaaaaaaaaaaaaaaaaaaaaaaaaaaaaaaaaaaaaaaaaaaaaaaaaaaaaaaaaaaaaaugcaucccccccccccccccccccccccccccccccaaaggcucuuuucagagccaccagaauu

SEQ ID NO: 2877 - RNA, 1813 nt, Artificial Sequence
  mRNA product Design b-4 comprising derived and/or modified sequence from LASV(LASV003-NIG-2008;Clade II)__AIT17580__GPC (opt2)
gggagagucccgcagucggcguccagcggcucugcuuguucgugugugugucguugcaggccuuauucaagcuuaccaugggccagaucaucaccuucuuccaggaggucccccacgucaucgaggaggucaugaacaucguccucaucgcccucucccuccucgccauccucaagggcaucuacaacgucgccaccugcggccucuucggccucgucuccuuccuccuccucugcggccgcuccugcuccaccaccuacaagggcgucuacgagcuccagacccucgagcucgacauggccucccucaacaugaccaugccccucuccugcaccaagaacaacucccaccacuacaucauggucggcaacgagaccggccucgagcucacccucaccaacaccuccaucaucaaccacaaguucugcaaccucuccgacgcccacaagaagaaccucuacgaccacgcccucauguccaucaucuccaccuuccaccucuccauccccaacuucaaccaguacgaggccauguccugcgacuucaacggcggcaagaucuccguccaguacaaccucucccacaccuacgccgucgacgccgccaaccacugcggcaccaucgccaacggcguccuccagaccuucaugcgcauggccuggggcggcuccuacaucgcccucgacuccggcaagggcuccugggacugcaucaugaccuccuaccaguaccucaucauccagaacaccaccugggaggaccacugccaguucucccgccccucccccaucggcuaccucggccuccucucccagcgcacccgcgacaucuacaucucccgccgccuccucggcaccuucaccuggacccucuccgacuccgaguccaacgagacccccggcggcuacugccucacccgcuggaugcucaucgaggccgagcucaagugcuucggcaacaccgccgucgccaagugcaacgagaagcacgacgaggaguucugcgacaugcuccgccucuucgacuucaacaagcaggccauccgccgccucaaggccgaggcccagauguccauccagcucaucaacaaggccgucaacgcccucaucaacgaccagcucaucaugaagaaccaccuccgcgacaucaugggcauccccuacugcaacuacuccaaguacugguaccucaaccacaccgucaccggccgcaccucccucccccgcugcuggcucgucuccaacggcuccuaccucaacgagacccacuucuccgacgacaucgagcagcaggccgacaacaugaucaccgagcuccuccagaaggaguacauggaccgccagggcaagaccccccucggccucgucgaccucuucgucuucuccaccuccuucuaccucaucuccaucuuccuccaccucgucaagauccccacccaccgccacgucaucggcaagcccugccccaagccccaccgccucaaccacaugggcaucugcuccugcggccucuacaagcaccccggcguccccgucaaguggaagcgcugaggacuaguaauaaggaaacuguaugaaugucugugggcaggaagugaagagauccuucuguaaagguuuuuggaauuaugucugcugaauaauaaacuuuuuugaaauaauaaaucugguagaaaaaugagaucuaaaaaaaaaaaaaaaaaaaaaaaaaaaaaaaaaaaaaaaaaaaaaaaaaaaaaaaaaaaaaaaaugcaucccccccccccccccccccccccccccccccaaaggcucuuuucagagccaccagaauu

SEQ ID NO: 2878 - RNA, 1813 nt, Artificial Sequence
  mRNA product Design b-4 comprising derived and/or modified sequence from LASV(LASV035-NIG-2009;Clade II)__AIT17588__GPC (opt2)
gggagagucccgcagucggcguccagcggcucugcuuguucgugugugugucguugcaggccuuauucaagcuuaccaugggccagaucaucaccuucuuccaggaggucccccacgucaucgaggaggucaugaacaucguccucaucgcccucucccuccucgccauccucaagggcaucuacaacgucgccaccugcggccucuucggccucgucuccuuccuccuccucugcggccgcuccugcuccaccaccuacaagggcgucuacgagcuccagacccucgagcucgacauggccucccucaacaugaccaugccccucuccugcaccaagaacaacucccaccacuacaucauggucggcaacgagaccggccucgagcucacccucaccaacaccuccaucaucaaccacaaguucugcaaccucuccgacgcccacaagaagaaccucuacgaccacgcccucauguccaucaucuccaccuuccaccucuccauccccaacuucaaccaguacgaggccauguccugcgacuucaacggcggcaagaucuccguccaguacaaccucucccacgccuacgccgucgacgccgccaaccacugcggcaccaucgccaacggcguccuccagaccuucaugcgcauggccuggggcggcuccuacaucgcccucgacuccggcaagggcuccugggacugcaucaugaccuccuaccaguaccucaucauccagaacaccaccugggaggaccacugccaguucucccgccccucccccaucggcuaccucggccuccucucccagcgcacccgcgacaucuacaucucccgccgccuccucggcaccuucaccuggacccucuccgacuccgagggcaacgagacccccggcggcuacugccucacccgcuggaugcucaucgaggccgagcucaagugcuucggcaacaccgccgucgccaagugcaacgagaagcacgacgaggaguucugcgacaugcuccgccucuucgacuucaacaagcaggccauccgccgccucaaggccgaggcccagauguccauccagcucaucaacaaggccgucaacgcccucaucaacgaccagcucaucaugaagaaccaccuccgcgacaucaugggcauccccuacugcaacuacuccaaguacugguaccucaaccacaccgucaccggcaagaccucccucccccgcugcuggcucgucuccaacggcuccuaccucaacgagacccacuucuccgacgacaucgagcagcaggccgacaacaugaucaccgagcuccuccagaaggaguacaucgaccgccagggcaagaccccccucggccucgucgaccucuucgucuucuccaccuccuucuaccucaucuccaucuuccuccaccucgucaagauccccacccaccgccacgucaucggcaagcccugccccaagccccaccgccucaaccacaugggcaucugcuccugcggccucuacaagcaccccggcguccccgucaaguggaagcgcugaggacuaguaauaaggaaacuguaugaaugucugugggcaggaagugaagagauccuucuguaaagguuuuuggaauuaugucugcugaauaauaaacuuuuuugaaauaauaaaucugguagaaaaaugagaucuaaaaaaaaaaaaaaaaaaaaaaaaaaaaaaaaaaaaaaaaaaaaaaaaaaaaaaaaaaaaaaaaugcaucccccccccccccccccccccccccccccccaaaggcucuuuucagagccaccagaauu

SEQ ID NO: 2879 - RNA, 1813 nt, Artificial Sequence
  mRNA product Design b-4 comprising derived and/or modified sequence from LASV(LASV1000-NIG-2009;Clade II)__AIT17782__GPC (opt2)
gggagagucccgcagucggcguccagcggcucugcuuguucgugugugugucguugcaggccuuauucaagcuuaccaugggccagaucaucaccuucuuccaggaggucccccacgucaucgaggaggucaugaacaucguccucaucgcccucucccuccucgccauccucaagggcaucuacaacgucgccaccugcggccucuucggccucgucuccuuccuccuccucugcggccgcuccugcuccaccaccuacaagggcgucuacgagcuccagacccucgagcucgacauggccucccucaacaugaccaugccccucuccugcaccaagaacaacucccaccacuacaucauggucggcaacgagaccggccucgagcucacccucaccaacaccuccaucaucaaccacaaguucugcaaccucuccgacgcccacaagaagaaccucuacgaccacgcccucauguccaucaucuccaccuuccaccucuccauccccaacuucaaccaguacgaggccauguccugcgacuucaacggcggcaagaucuccguccaguacaaccucucccacaccuacgccgucgacgccgccaaccacugcggcaccaucgccaacggcguccuccagaccuucaugcgcauggccuggggcggcuccuacaucgcccucgacuccggcaagggcuccugggacugcaucaugaccuccuaccaguaccucaucauccagaacaccaccugggaggaccacugccaguucucccgccccucccccaucggcuaccucggccuccucucccagcgcacccgcgacaucuacaucucccgccgccuccucggcaccuucaccuggacccucuccgacuccgagggcaacgagacccccggcggcuacugccucacccgcuggaugcucaucgaggccgagcucaagugcuucggcaacaccgccgucgccaagugcaacgagaagcacgacgaggaguucugcgacaugcuccgccucuucgacuucaacaagcaggccaucaagcgccucaagaccgaggcccagauguccauccagcucaucaacaaggccgucaacgcccucaucaacgaccagcucaucaugaagaaccaccuccgcgacaucaugggcauccccuacugcaacuacuccaaguacugguaccucaaccacaccgucaccggcaagaccucccucccccgcugcuggcucgucuccaacggcuccuaccucaacgagacccacuucuccgacgacaucgagcagcaggccgacaacaugaucaccgagcuccuccagaaggaguacaucgaccgccagggcaagaccccccucggccucgucgaccucuucgucuucuccaccuccuucuaccucaucuccaucuuccuccaccucgucaagauccccacccaccgccacgucgucggcaagcccugccccaagccccaccgccucaaccacaugggcaucugcuccugcggccucuacaagcaccccggcguccccgucaaguggaagcgcugaggacuaguaauaaggaaacuguaugaaugucugugggcaggaagugaagagauccuucuguaaagguuuuuggaauuaugucugcugaauaauaaacuuuuuugaaauaauaaaucugguagaaaaaugagaucuaaaaaaaaaaaaaaaaaaaaaaaaaaaaaaaaaaaaaaaaaaaaaaaaaaaaaaaaaaaaaaaaugcaucccccccccccccccccccccccccccccccaaaggcucuuuucagagccaccagaauu

SEQ ID NO: 2880 - RNA, 1813 nt, Artificial Sequence
  mRNA product Design b-4 comprising derived and/or modified sequence from LASV(LASV221-NIG-2010;Clade II)__AIT17624__GPC (opt2)
gggagagucccgcagucggcguccagcggcucugcuuguucgugugugugucguugcaggccuuauucaagcuuaccaugggccagaucaucaccuucuuccaggaggucccccacgucaucgaggaggucaugaacaucguccucaucgcccucucccuccucgccauccucaagggcaucuacaacgucgccaccugcggccucuucggccucgucuccuuccuccuccucugcggccgcuccugcuccaccaccuacaagggcgucuacgagcuccagacccucgagcucgacauggccucccucaacaugaccaugccccucuccugcaccaagaacaacucccaccacuacaucauggucggcaacgagaccggccucgagcucacccucaccaacaccuccaucaucaaccacaaguucugcaaccucuccgacgcccacaagaagaaccucuacgaccacgcccucauguccaucaucuccaccuuccaccucuccauccccaacuucaaccaguacgaggccauguccugcgacuucaacggcggcaagaucuccguccaguacaaccucucccacaccuacgccaucgacgccgccaaccacugcggcaccaucgccaacggcguccuccagaccuucaugcgcauggccuggggcggcuccuacaucgcccucgacuccggcaagggcuccugggacugcaucaugaccuccuaccaguaccucaucauccagaacaccaccugggaggaccacugccaguucucccgccccucccccaucggcuaccucggccuccucucccagcgcacccgcgacaucuacaucucccgccgccuccucggcaccuucaccuggacccucuccgacuccgagggcaacgagacccccggcggcuacugccucacccgcuggaugcucaucgaggccgagcucaagugcuucggcaacaccgccgucgccaagugcaacgagaagcacgacgaggaguucugcgacaugcuccgccucuucgacuucaacaagcaggccauccgccgccucaagaccgaggcccagauguccauccagcucaucaacaaggccgucaacgcccucaucaacgaccagcucaucaugaagaaccaccuccgcgacaucaugggcauccccuacugcaacuacuccaaguacugguaccucaaccacaccgucaccggcaagaccucccucccccgcugcuggcucgucuccaacggcuccuaccucaacgagacccacuucuccgacgacaucgagcagcaggccgacaacaugaucaccgagaugcuccagaaggaguacauggaccgccagggcaagaccccccucggccucgucgaccucuucgucuucuccaccuccuucuaccucaucuccaucuuccuccaccucgucaagauccccacccaccgccacgucaucggcaagcccugccccaagccccaccgccucaaccacaugggcaucugcuccugcggccucuacaagcaccccggcguccccgucaaguggaagcgcugaggacuaguaauaaggaaacuguaugaaugucugugggcaggaagugaagagauccuucuguaaagguuuuuggaauuaugucugcugaauaauaaacuuuuuugaaauaauaaaucugguagaaaaaugagaucuaaaaaaaaaaaaaaaaaaaaaaaaaaaaaaaaaaaaaaaaaaaaaaaaaaaaaaaaaaaaaaaaugcaucccccccccccccccccccccccccccccccaaaggcucuuuucagagccaccagaauu

SEQ ID NO: 2881 - RNA, 1813 nt, Artificial Sequence
  mRNA product Design b-4 comprising derived and/or modified sequence from LASV(LASV237-NIG-2010;Clade II)__AIT17638__GPC (opt2)
gggagagucccgcagucggcguccagcggcucugcuuguucgugugugugucguugcaggccuuauucaagcuuaccaugggccagaucaucaccuucuuccaggaggucccccacgucaucgaggaggucaugaacaucguccucaucgcccucucccuccucgccauccucaagggcaucuacaacgucgccaccugcggccucuucggccucgucuccuuccuccuccucugcggccgcuccugcuccaccaccuacaagggcgucuacgagcuccagacccucgagcucgacauggccucccucaacaugaccaugccccucuccugcaccaagaacaacucccaccacuacaucauggucggcaacgagaccggccucgagcucacccucaccaacaccuccaucaucaaccacaaguucugcaaccucuccgacgcccacaagaaggaccucuacgaccacgcccucauguccaucaucuccaccuuccaccucuccauccccaacuucaaccaguacgaggccauguccugcgacuucaacggcggcaagaucuccguccaguacaaccucucccacaccuacgccgucgacgccgccaaccacugcggcaccaucgccaacggcguccuccagaccuucaugcgcauggccuggggcggcuccuacaucgcccucgacuccggcaagggcuccugggacugcaucaugaccuccuaccaguaccucaucauccagaacaccaccugggaggaccacugccaguucucccgccccucccccaucggcuaccucggccuccucucccagcgcacccgcgacaucuacaucucccgccgccuccucggcaccuucaccuggacccucuccgacuccgagggcaacgagacccccggcggcuacugccucacccgcuggaugcucaucgaggccgagcucaagugcuucggcaacaccgccgucgccaagugcaacgagaagcacgacgaggaguucugcgacaugcuccgccucuucgacuucaacaagcaggccauccgccgccucaagaccgaggcccagauguccauccagcucaucaacaaggccgucaacgcccucaucaacgaccagcucaucaugaagaaccaccuccgcgacaucaugggcauccccuacugcaacuacuccaaguacugguaccucaaccacaccgucaccggcaagaccucccucccccgcugcuggcucgucuccaacggcuccuaccucaacgagacccacuucuccgacgacaucgagcagcaggccgacaacaugaucaccgagcuccuccagaaggaguacauggaccgccagggcaagaccccccucggccucgucgaccucuucgucuucuccaccuccuucuaccucaucuccaucuuccuccaccucaucaagauccccacccaccgccacaucaccggcaagcccugccccaagccccaccgccucaaccacaugggcaucugcuccugcggccucuacaagcaccccggcguccccgucaaguggaagcgcugaggacuaguaauaaggaaacuguaugaaugucugugggcaggaagugaagagauccuucuguaaagguuuuuggaauuaugucugcugaauaauaaacuuuuuugaaauaauaaaucugguagaaaaaugagaucuaaaaaaaaaaaaaaaaaaaaaaaaaaaaaaaaaaaaaaaaaaaaaaaaaaaaaaaaaaaaaaaaugcaucccccccccccccccccccccccccccccccaaaggcucuuuucagagccaccagaauu

SEQ ID NO: 2882 - RNA, 1813 nt, Artificial Sequence
  mRNA product Design b-4 comprising derived and/or modified sequence from LASV(LASV253-NIG-2011;Clade II)__AIT17670__GPC (opt2)
gggagagucccgcagucggcguccagcggcucugcuuguucgugugugugucguugcaggccuuauucaagcuuaccaugggccagaucaucaccuucuuccaggaggucccccacgucaucgaggaggucaugaacaucguccucaucgcccucucccuccucgccauccucaagggcaucuacaacgucgccaccugcggccucuucggccucgucuccuuccuccuccucugcggccgcuccugcuccaccaccuacaagggcgucuacgagcuccagacccucgagcucgacauggccucccucaacaugaccaugccccucuccugcaccaagaacaacucccaccacuacaucauggucggcaacgagaccggccucgagcucacccucaccaacaccuccaucaucaaccacaaguucugcaaccucuccgacgcccacaagaagaaccucuacgaccacgcccucauguccaucaucuccaccuuccaccucuccauccccaacuucaaccaguacgaggccauguccugcgacuucaacggcggcaagaucuccguccaguacaaccucucccacaccuacgccgucgacgccgccaaccacugcggcaccaucgccaacggcguccuccagaccuucaugcgcauggccuggggcggcuccuacaucgcccucgacuccggcaagggcuccugggacugcaucaugaccuccuaccaguaccucaucauccagaacaccaccugggaggaccacugccaguucucccgccccucccccaucggcuaccucggccuccucucccagcgcacccgcgacaucuacaucucccgccgccuccucggcaccuucaccuggacccucuccgacuccgagggcaacgagacccccggcggcuacugccucacccgcuggaugcucaucgaggccgagcucaagugcuucggcaacaccgccgucgccaagugcaacgagaagcacgacgaggaguucugcgacaugcuccgccucuucgacuucaacaagcaggccauccgccgccucaaggccgaggcccagauguccauccagcucaucaacaaggccgucaacgcccucaucaacgaccagcucaucaugaagaaccaccuccgcgacaucaugggcauccccuacugcaacuacuccaaguacugguaccucaaccacaccgucaccggccgcaccucccucccccgcugcuggcucgucuccaacggcuccuaccucaacgagacccacuucuccgacgacaucgagcagcaggccgacaacaugaucaccgagcuccuccagaaggaguacaucgaccgccagggcaagaccccccucggccucgucgaccucuucgucuucuccaccuccuucuaccucaucuccaucuuccuccaccucgucaagauccccacccaccgccacaucaucggcaagcccugccccaagccccaccgccucaaccacaugggcaucugcuccugcggccucuacaagcaccccggcguccccgucaaguggaagcgcugaggacuaguaauaaggaaacuguaugaaugucugugggcaggaagugaagagauccuucuguaaagguuuuuggaauuaugucugcugaauaauaaacuuuuuugaaauaauaaaucugguagaaaaaugagaucuaaaaaaaaaaaaaaaaaaaaaaaaaaaaaaaaaaaaaaaaaaaaaaaaaaaaaaaaaaaaaaaaugcaucccccccccccccccccccccccccccccccaaaggcucuuuucagagccaccagaauu

SEQ ID NO: 2883 - RNA, 1813 nt, Artificial Sequence
  mRNA product Design b-4 comprising derived and/or modified sequence from LASV(LASV254-NIG-2011;Clade II)__AIT17674__GPC (opt2)
gggagagucccgcagucggcguccagcggcucugcuuguucgugugugugucguugcaggccuuauucaagcuuaccaugggccagaucaucaccuucuuccaggaggucccccacgucaucgaggaggucaugaacaucguccucaucgcccucucccuccucgccauccucaagggcaucuacaacgucgccaccugcggccucuucggccucgucuccuuccuccuccucugcggccgcuccugcuccaccaccuacaagggcgucuacgagcuccagacccucgagcucgacaugaccaaccucaacaugaccaugccccucuccugcaccaagaacaacucccaccacuacaucauggucggcaacgagaccggccucgagcucacccucaccaacaccuccaucaucaaccacaaguucugcaaccucuccgacgcccacaagaagaaccucuacaaccacgcccucauguccaucaucuccaccuuccaccucuccauccccaacuucaaccaguacgaggccauguccugcgacuucaacggcggcaagaucuccguccaguacaaccucucccacuccuacgccgucgacgccgccaaccacugcggcaccaucgccaacggcguccuccagaccuucaugcgcauggccuggggcggcuccuacaucgcccucgacuccggcaagggcaacugggacugcaucaugaccuccuaccaguaccucaucauccagaacaccaccugggaggaccacugccaguucucccgccccucccccaucggcuaccucggccuccucucccagcgcacccgcgacaucuacaucucccgccgccuccucggcaccuucaccuggacccucuccgacuccgagggcaacgagacccccggcggcuacugccucacccgcuggaugcucaucgaggccgagcucaagugcuucggcaacaccgccgucgccaagugcaacgagaagcacgacgaggaguucugcgacaugcuccgccucuucgacuucaacaagcaggccauccgccgccucaagaccgaggcccaggccaacauccagcucaucaacaaggccgucaacgcccucaucaacgaccagcucaucaugaagaaccaccuccgcgacaucaugggcauccccuacugcaacuacuccaaguacugguaccucaaccacaccgucaccggcaagaccucccucccccgcugcuggcucgucuccaacggcuccuaccucaacgagacccacuucuccgacgacaucgagcagcaggccgacaacaugaucaccgagcuccuccagaaggaguacauggaccgccagggcaagaccccccucggccucgucgaccucuucgucuucuccaccuccuucuaccucaucuccaucuuccuccaccucgucaagauccccacccaccgccacgucaucggcaagcccugccccaagccccaccgccucaaccacaugggcaucugcuccugcggccucuacaagcaccccggcguccccgucaaguggaagcgcugaggacuaguaauaaggaaacuguaugaaugucugugggcaggaagugaagagauccuucuguaaagguuuuuggaauuaugucugcugaauaauaaacuuuuuugaaauaauaaaucugguagaaaaaugagaucuaaaaaaaaaaaaaaaaaaaaaaaaaaaaaaaaaaaaaaaaaaaaaaaaaaaaaaaaaaaaaaaaugcaucccccccccccccccccccccccccccccccaaaggcucuuuucagagccaccagaauu

SEQ ID NO: 2884 - RNA, 1813 nt, Artificial Sequence
  mRNA product Design b-4 comprising derived and/or modified sequence from LASV(Nig08-A19;Clade III)__ADU56618__GPC (opt2)
gggagagucccgcagucggcguccagcggcucugcuuguucgugugugugucguugcaggccuuauucaagcuuaccaugggccagaucgucaccuucuuccaggaggucccccacgucaucgaggaggucaugaacaucguccucaucgcccucuccauccucgccauccucaagggccucuacaacaucgccaccugcggccucaucggccucgucaccuuccuccuccucuccggccgcuccugcuccaugaccuacaagggcgucuacgagcuccagacccucgagcucaacaugaacacccucaacaugaccaugccccucuccugcaccaagaacaacucccaccacuacaucauggucggcaacgagaccggccucgagcucacccucaccaacaccucccuccuccaccacaaguucugcaaccucuccgacgcccacaagaagaaccucuacgaccacacccucauguccaucaucuccaccuuccaccucuccauccccaacuucaaccaguacgaggccauguccugcgacuucaacggcggcaagaucaccguccaguacaaccucucccacuccuacgccaucgacgccgccaaccacugcggcaccgucgccaacggcguccuccagaccuucaugcgcauggccuggggcggcuccuacaucgcccucgacuccggccgcggcaagugggacugcaucaugaccuccuaccaguaccucaucauccagaacaccaccugggaggaccacugccaguucucccgccccucccccaucggcuaccucggccuccucucccagcgcacccgcgacaucuacaucucccgccgccuccucggcaccuucaccuggacccucuccgacuccgagggcaacgagacccccggcggcuacugccucacccgcuggaugcucaucgaggccgagcucaagugcuucggcaacaccgccgucgccaagugcaacgagaagcacgacgaggaguucugcgacaugcuccgccucuucgacuucaacaagcaggccauccgccgccucaaggccgaggcccagauguccauccagcucaucaacaaggccgucaacgcccucaucaacgaccagcucaucaugaagaaccaccuccgcgacaucaugggcauccccuacugcaacuacuccaaguacugguaccucaaccacaccuccaccggccgcaccucccucccccgcugcuggcucgucuccaacggcuccuaccucaacgagacccacuucuccgacgacaucgagcagcaggccgacaacaugaucaccgagaugcuccagaaggaguaccucgaccgccagggcaagaccccccucggccucgucgaccucuucgucuucuccaccuccuucuaccucaucuccaucuuccuccaccucgucaagauccccacccaccgccacaucgucggcaagcccugccccaagccccaccgccucaaccacaugggcaucugcuccugcggccucuacaagcagcccggcguccccguccgcuggaagcgcugaggacuaguaauaaggaaacuguaugaaugucugugggcaggaagugaagagauccuucuguaaagguuuuuggaauuaugucugcugaauaauaaacuuuuuugaaauaauaaaucugguagaaaaaugagaucuaaaaaaaaaaaaaaaaaaaaaaaaaaaaaaaaaaaaaaaaaaaaaaaaaaaaaaaaaaaaaaaaugcaucccccccccccccccccccccccccccccccaaaggcucuuuucagagccaccagaauu

SEQ ID NO: 2885 - RNA, 1816 nt, Artificial Sequence
  mRNA product Design b-4 comprising derived and/or modified sequence from LASV(G1180-SLE-2010;Clade IV)__AIT17168__GPC (opt2)
gggagagucccgcagucggcguccagcggcucugcuuguucgugugugugucguugcaggccuuauucaagcuuaccaugggccagaucgucaccuucuuccaggaggucccccacgucaucgaggaggucaugaacaucguccucaucgcccucuccauccucgccguccucaagggccucuacaacuucgccaccugcggccucgucggccuccucaccuuccuccuccucugcggccgcuccugcaccgccucccgcuacaagggcgucuacgagcuccagacccucgagcucaacauggagacccucaacaugaccaugccccucuccugcaccaagaacaacucccaccacuacaucauggucggcaacgagaccggccucgagcucacccucaccaacaccuccaucaucaaccacaaguucugcaaccucuccgacgcccacaagaagaaccucuacgaccacgcccucauguccaucaucuccaccuuccaccucuccauccccaacuucaaccaguacgaggccauguccugcgacuucaacggcggcaagaucuccguccaguacaaccucucccacuccuacgccggcgacgccgccaaccacugcggcaccgucgccaacggcguccuccagaccuucaugcgcauggccuggggcggcuccuacaucgcccucgacuccggccacggcuccugggacugcaucaugaccuccuaccaguaccucaucauccagaacaccaccugggaggaccacugccaguucucccgccccucccccaucggcuaccucggccuccucucccagcgcacccgcgacaucuacaucucccgccgccuccucggcaccuucaccuggacccucuccgacuccgagggcaaggacacccccggcggcuacugccucacccgcuggaugcucaucgaggccgagcucaagugcuucggcaacaccgccgucgccaagugcaacgagaagcacgacgaggaguucugcgacaugcuccgccucuucgacuucaacaagcaggccauccagcgccucaaggccgaggcccagauguccauccagcucaucaacaaggccgucaacgcccucaucaacgaccagcucaucaugaagaaccaccuccgcgacaucaugggcauccccuacugcaacuacuccaaguacugguaccucaaccacaccaccaccggcaagaccucccuccccaagugcuggcucgucuccaacggcuccuaccucaacgagacccacuucuccgacgacaucgagcagcaggccgacaacaugaucaccgagaugcuccagaaggaguacauggagcgccagggcaagaccccccucggccucgucgaccucuucgucuucuccaccuccuucuaccucaucuccaucuuccuccaccucgucaagauccccacccaccgccacaucgucggcaaguccugccccaagccccaccgccucaaccacaugggcaucugcuccugcggccucuacaagcagcccggcguccccgucaaguggaagcgcugaggacuaguaauaaggaaacuguaugaaugucugugggcaggaagugaagagauccuucuguaaagguuuuuggaauuaugucugcugaauaauaaacuuuuuugaaauaauaaaucugguagaaaaaugagaucuaaaaaaaaaaaaaaaaaaaaaaaaaaaaaaaaaaaaaaaaaaaaaaaaaaaaaaaaaaaaaaaaugcaucccccccccccccccccccccccccccccccaaaggcucuuuucagagccaccagaauu

SEQ ID NO: 2886 - RNA, 1816 nt, Artificial Sequence
  mRNA product Design b-4 comprising derived and/or modified sequence from LASV(G1442-SLE-2011;Clade IV)__AIT17180__GPC (opt2)
gggagagucccgcagucggcguccagcggcucugcuuguucgugugugugucguugcaggccuuauucaagcuuaccaugggccagaucgucaccuucuuccaggaggucccccacgucaucgaggaggucaugaacaucguccucaucgcccucuccauccucgccguccucaagggccucuacaacgucgccaccugcggccucaucggccucgucaccuuccuccuccucugcggccgcuccugcaccaccacccucuacaagggcgucuacgagcuccagacccucgagcucaacauggagacccucaacaugaccaugccccucuccugcaccaagaacaacucccaccacuacauccgcgucggcaacgagaccggccucgagcucacccucaccaacaccuccaucaucaaccacaaguucugcaaccucuccgacgcccacaagaagaaccucuacgaccacgcccucauguccaucaucuccaccuuccaccucuccauccccaacuucaaccaguacgaggccauguccugcgacuucaacggcggcaagaucuccguccaguacaaccucucccacuccuacgccggcgacgccgccaaccacugcggcaccgucgccaacggcguccuccagaccuucaugcgcauggccuggggcggcuccuacaucgcccucgacuccggccgcggcaacugggacugcaucaugaccuccuaccaguaccucaucauccagaacaccaccugggacgaccacugccaguucucccgccccucccccaucggcuaccucggccuccucucccagcgcacccgcgacgucuacaucucccgccgccuccucggcaccuucaccuggacccucuccgacuccgagggcaaggacacccccggcggcuacugccucacccgcuggaugcucaucgaggccgagcucaagugcuucggcaacaccgccgucgccaagugcaacgagaagcacgacgaggaguucugcgacaugcuccgccucuucgacuucaacaagcaggccauccagcgccucaaggccgaggcccagauguccauccagcucaucaacaaggccgucaacgcccucaucaacgaccagcucaucaugaagaaccaccuccgcgacaucaugggcauccccuacugcaacuacuccaaguacugguaccucaacaacaccgccaccggcaagaccucccuccccaagugcuggcucaucuccaacggcuccuaccucaacgagacccacuucuccgacgacaucgagcaggaggccgacaacaugaucaccgagaugcuccagaaggaguacauggagcgccagggcaagaccccccucggccucgucgaccucuucgucuucuccaccuccuucuaccucaucuccaucuuccuccaccucgucaagauccccacccaccgccacaucgucggcaaguccugccccaagccccaccgccucaaccacaugggcaucugcuccugcggccucuacaagcagcccggcguccccguccgcuggaagcgcugaggacuaguaauaaggaaacuguaugaaugucugugggcaggaagugaagagauccuucuguaaagguuuuuggaauuaugucugcugaauaauaaacuuuuuugaaauaauaaaucugguagaaaaaugagaucuaaaaaaaaaaaaaaaaaaaaaaaaaaaaaaaaaaaaaaaaaaaaaaaaaaaaaaaaaaaaaaaaugcaucccccccccccccccccccccccccccccccaaaggcucuuuucagagccaccagaauu

SEQ ID NO: 2887 - RNA, 1816 nt, Artificial Sequence
  mRNA product Design b-4 comprising derived and/or modified sequence from LASV(G3010-SLE-2013;Clade IV)__AIT17344__GPC (opt2)
gggagagucccgcagucggcguccagcggcucugcuuguucgugugugugucguugcaggccuuauucaagcuuaccaugggccagaucgucaccuucuuccaggaggucccccacgucaucgaggaggucaugaacaucguccucaucgcccucuccauccucgccguccucaagggccucuacaacuucgccaccugcggccucgucggccucgucaccuuccuccuccucugcggccgcuccugcaccaccucccucuacaagggcgucuacgagcuccagacccucgagcucaacauggagacccucaacaugaccaugccccucuccugcaccaagaacaacucccaccacuacaucauggucggcaacgagaccggccucgagcucacccucaccaacaccuccaucaucaaccacaaguucugcaaccucuccgacgcccacaagaagaaccucuacaaccacgcccucauguccaucaucuccaccuuccaccucuccauccccaacuucaaccaguacgaggccauguccugcgacuucaacggcggcaagaucuccguccaguacaaccucucccacuccuacgccggcgacgccgccucccacugcggcaccgucgccaacggcguccuccagaccuucaugcgcauggccuggggcggcuccuacaucgcccucgacuccggcuacggcaagugggacugcaucaugaccuccuaccaguaccucaucauccagaacaccaccugggaggaccacugccaguucucccgccccucccccaucggcuaccucggccuccucucccagcgcacccgcgacaucuacaucucccgccgccuccucggcaccuucaccuggacccucuccgacuccgagggcaaggacacccccggcggcuacugccucacccgcuggaugcucaucgaggccgagcucaagugcuucggcaacaccgccgucgccaagugcaacgagaagcacgacgaggaguucugcgacaugcuccgccucuucgacuucaacaagcaggccauccagcgccucaagaccgaggcccagauguccauccagcucaucaacaaggccgucaacgcccucaucaacgaccagcucaucaugaagaaccaccuccgcgacaucaugggcauccccuacugcaacuacuccaaguacugguaccucaaccacaccaccaccggcaagaccucccuccccaagugcuggcucgucuccaacggcuccuaccucaacgagacccacuucuccgacgacaucgagcagcaggccgacaacaugaucaccgagaugcuccagaaggaguacauggagcgccagggcaagaccccccucggccucgucgaccucuucgucuucuccaccuccuucuaccucaucuccaucuuccuccaccucgucaagauccccacccaccgccacaucgucggcaaguccugccccaagccccaccgccucaaccacaugggcaucugcuccugcggccucuacaagcagcccggcguccccguccgcuggaagcgcugaggacuaguaauaaggaaacuguaugaaugucugugggcaggaagugaagagauccuucuguaaagguuuuuggaauuaugucugcugaauaauaaacuuuuuugaaauaauaaaucugguagaaaaaugagaucuaaaaaaaaaaaaaaaaaaaaaaaaaaaaaaaaaaaaaaaaaaaaaaaaaaaaaaaaaaaaaaaaugcaucccccccccccccccccccccccccccccccaaaggcucuuuucagagccaccagaauu

SEQ ID NO: 2888 - RNA, 1816 nt, Artificial Sequence
  mRNA product Design b-4 comprising derived and/or modified sequence from LASV(G502-SLE-2009;Clade IV)__AIT17126__GPC (opt2)
gggagagucccgcagucggcguccagcggcucugcuuguucgugugugugucguugcaggccuuauucaagcuuaccaugggccagaucgucaccuucuuccaggaggucccccacgucaucgaggaggucaugaacaucguccucaucgcccucuccauccucgccguccucaagggccucuacaacuucgccaccugcggccucgucggccuccucaccuuccuccuccucugcggccgcuccugcaccaccggccucuacaagggcgucuacgagcuccagacccucgagcucaacauggagacccucaacaugaccaugccccucuccugcaccaagaacaacucccaccacuacaucauggucggcaacgagaccggccucgagcucacccucaccaacaccuccaucaucaaccacaaguucugcaaccucuccgacgcccacaagaagaaccucuacgaccacgcccucauguccaucaucuccaccuuccaccucuccauccccaacuucaaccaguacgaggccauguccugcgacuucaacggcggcaagaucuccguccaguacaaccucucccacuccuacgccggcgacgccgccgaccacugcggcaccgucgccaacggcguccuccagaccuucaugcgcauggccuggggcggcuccuacaucgcccucgacuccggccgcggccgcugggacugcaucaugaccuccuaccaguaccucaucauccagaacaccaccugggaggaccacugccaguucucccgccccucccccaucggcuaccucggccuccucucccagcgcacccgcgacaucuacaucucccgccgccuccucggcaccuucaccuggacccucuccgacuccgagggcaaggacacccccggcggcuacugccucacccgcuggaugcucaucgaggccgagcucaagugcuucggcaacaccgccgucgccaagugcaacgagaagcacgacgaggaguucugcgacaugcuccgccucuucgacuucaacaagcaggccauccagcgccucaaggccgaggcccagauguccauccagcucaucaacaaggccgucaacgcccucaucaacgaccagcucgucaugaagaaccaccuccgcgacaucaugggcauccccuacugcaacuacucccgcuacugguaccucaaccacaccaccaccggccgcaccucccuccccaagugcuggcucgucuccaacggcuccuaccucaacgagacccacuucuccgacgacaucgagcagcaggccgacaacaugaucaccgagaugcuccagaaggaguacauggagcgccagggcaagaccccccucggccucgucgaccucuucgucuucuccaccuccuucuaccucaucuccaucuuccuccaccucgucaagauccccacccaccgccacaucgucggcaaguccugccccaagccccaccgccucaaccacaugggcaucugcuccugcggccucuacaagcagcccggcguccccgucaaguggaagcgcugaggacuaguaauaaggaaacuguaugaaugucugugggcaggaagugaagagauccuucuguaaagguuuuuggaauuaugucugcugaauaauaaacuuuuuugaaauaauaaaucugguagaaaaaugagaucuaaaaaaaaaaaaaaaaaaaaaaaaaaaaaaaaaaaaaaaaaaaaaaaaaaaaaaaaaaaaaaaaugcaucccccccccccccccccccccccccccccccaaaggcucuuuucagagccaccagaauu

SEQ ID NO: 2889 - RNA, 1816 nt, Artificial Sequence
  mRNA product Design b-4 comprising derived and/or modified sequence from LASV(G733-SLE-2010;Clade IV)__AIT17154__GPC (opt2)
gggagagucccgcagucggcguccagcggcucugcuuguucgugugugugucguugcaggccuuauucaagcuuaccaugggccagaucgucaccuucuuccaggaggucccccacgucaucgaggaggucaugaacaucguccucaucgcccucuccauccucgccguccucaagggccucuacaacuucgccaccugcggcaucgucggccucgucuccuuccuccuccucugcggccgcuccugcaccaccucccucuacaagggcgucuacgagcuccagacccucgagcucaacauggagacccucaacaugaccaugccccucuccugcaccaagaacaacucccaccacuacaucauggucggcaacgagaccggccucgagcucacccucaccaacaccuccaucaucaaccacaaguucugcaaccucuccgacgcccacaagaagaaccucuacgaccacgcccucauguccaucaucuccaccuuccaccucuccauccccaacuucaaccaguacgaggccauguccugcgacuucaacggcggcaagaucuccguccaguacaaccucucccacuccuacgccggcgacgccgccaaccacugcggcaccaucgccaacggcguccuccagaccuucaugcgcauggccuggggcggcuccuacaucgcccucgacuccggccgcgaccgcugggacugcaucaugaccuccuaccaguaccucaucauccagaacaccaccugggaggaccacugccaguucucccgccccucccccaucggcuaccucggccuccucucccagcgcacccgcgacaucuacaucucccgccgccuccucggcaccuucaccuggacccucuccgacuccgagggcaaggacacccccggcggcuacugccucacccgcuggaugcucaucgaggccgagcucaagugcuucggcaacaccgccgucgccaagugcaacgagaagcacgacgaggaguucugcgacaugcuccgccucuucgacuucaacaagcaggccauccagcgccucaaggccgaggcccagauguccauccagcucaucaacaaggccgucaacgcccucaucaacgaccagcucaucaugaagaaccaccuccgcgacaucaugggcauccccuacugcaacuacuccaaguacugguaccucaaccacaccaccaccggcaagaccucccuccccaagugcuggcucgucuccaacggcuccuaccucaacgagacccacuucuccgacgacaucgagcagcaggccgacaacaugaucaccgagaugcuccagaaggaguacauggagcgccagggcaagaccccccucggccucgucgaccucuucgucuucuccaccuccuucuaccucaucuccaucuuccuccaccucgucaagauccccacccaccgccacgucgucggcaaguccugccccaagccccaccgccucaaccacaugggcaucugcuccugcggccucuacggccagcccggcguccccgucaaguggaagcgcugaggacuaguaauaaggaaacuguaugaaugucugugggcaggaagugaagagauccuucuguaaagguuuuuggaauuaugucugcugaauaauaaacuuuuuugaaauaauaaaucugguagaaaaaugagaucuaaaaaaaaaaaaaaaaaaaaaaaaaaaaaaaaaaaaaaaaaaaaaaaaaaaaaaaaaaaaaaaaugcaucccccccccccccccccccccccccccccccaaaggcucuuuucagagccaccagaauu

SEQ ID NO: 2890 - RNA, 1816 nt, Artificial Sequence
  mRNA product Design b-4 comprising derived and/or modified sequence from MOPV/LASV reassortant(IGS-1;Clade IV)__AFY05576__GPC (opt2)
gggagagucccgcagucggcguccagcggcucugcuuguucgugugugugucguugcaggccuuauucaagcuuaccaugggccagaucgucaccuucuuccaggaggucccccacgucaucgaggaggucaugaacaucguccucaucgcccucuccguccucgccguccucaagggccucuacaacuucgccaccugcggccucgucggccucgucaccuuccuccuccucugcggccgcuccugcaccaccucccucuacaagggcgucuacgagcuccagacccucgagcucaacauggagacccucaacaugaccaugccccucuccugcaccaagaacaacucccaccacuacaucauggucggcaacgagaccggccucgagcucacccucaccaacaccuccaucaucaaccacaaguucugcaaccucuccgacgcccacaagaagaaccucuacgaccacgcccucauguccaucaucuccaccuuccaccucuccauccccaacuucaaccaguacgaggccauguccugcgacuucaacggcggcaagaucuccguccaguacaaccucucccacuccuacgccggcgacgccgccaaccacugcggcaccgucgccaacggcguccuccagaccuucaugcgcauggccuggggcggcuccuacaucgcccucgacuccggccgcggcaacugggacugcaucaugaccuccuaccaguaccucaucauccagaacaccaccugggaggaccacugccaguucucccgccccucccccaucggcuaccucggccuccucucccagcgcacccgcgacaucuacaucucccgccgccuccucggcaccuucaccuggacccucuccgacuccgagggcgaggacacccccggcggcuacugccucacccgcuggaugcucaucgaggccgagcucaagugcuucggcaacaccgccgucgccaagugcaacgagaagcacgacgaggaguucugcgacaugcuccgccucuucgacuucaacaagcaggccauccagcgccucaaggccgaggcccagauguccauccagcucaucaacaaggccgucaacgcccucaucaacgaccagcucaucaugaagaaccaccuccgcgacaucaugggcauccccuacugcaacuacuccaaguacugguaccucaaccacaccaccaccggccgcaccucccuccccaagugcuggcucgucuccaacggcuccuaccucaacgagacccacuucuccgacgacaucgagcagcaggccgacaacaugaucaccgagaugcuccagaaggaguacauggagcgccagggcaagaccccccucggccucgucgaccucuucgucuucuccaccuccuucuaccucaucuccaucuuccuccaccucgucaagauccccacccaccgccacaucgucggcaaguccugccccaagccccaccgccucaaccacaugggcaucugcuccugcggccucuacaagcagcccggcguccccgucaaguggaagcgcugaggacuaguaauaaggaaacuguaugaaugucugugggcaggaagugaagagauccuucuguaaagguuuuuggaauuaugucugcugaauaauaaacuuuuuugaaauaauaaaucugguagaaaaaugagaucuaaaaaaaaaaaaaaaaaaaaaaaaaaaaaaaaaaaaaaaaaaaaaaaaaaaaaaaaaaaaaaaaugcaucccccccccccccccccccccccccccccccaaaggcucuuuucagagccaccagaauu

SEQ ID NO: 2891 - RNA, 1816 nt, Artificial Sequence
  mRNA product Design b-4 comprising derived and/or modified sequence from LASV(LM765-SLE-2012;Clade IV)__AIT17814__GPC (opt2)
gggagagucccgcagucggcguccagcggcucugcuuguucgugugugugucguugcaggccuuauucaagcuuaccaugggccagaucgucaccuucuuccaggaggucccccacgucaucgaggaggucaugaacaucguccucaucgcccucuccauccucgccguccucaagggccucuacaacuucgccaccugcggccucgucggccucgucaccuuccuccuccucugcggccgcuccugcaccaccucccucuacaagggcgucuacgagcuccagacccucgagcucaacauggagacccucaacaugaccaugccccucuccugcaccaagaacaacucccaccacuacaucauggucggcaacgagaccggccucgagcucacccucaccaacaccuccaucaucgaccacaaguucugcaaccucuccgacgcccaccgcaagaaccucuacgaccacgcccucauguccaucaucuccaccuuccaccucuccauccccaacuucaaccaguacgaggccauguccugcgacuucaacggcggcaagaucuccguccaguacaaccucucccacuccuacgccaaggacgccgccgaccacugcggcaccgucgccaacggcguccuccagaccuucaugcgcauggccuggggcggcuccuacaucgcccucgacuccggccgcggccgcugggacugcaucaugaccuccuaccaguaccucaucauccagaacaccaccugggaggaccacugccaguucucccgccccucccccaucggcuaccucggccuccucucccagcgcacccgcgacaucuacaucucccgccgccuccucggcaccuucaccuggacccucuccgacuccgagggcaaggacacccccggcggcuacugccucacccgcuggaugcucaucgaggccgagcucaagugcuucggcaacaccgccgucgccaagugcaacgagaagcacgacgaggaguucugcgacaugcuccgccucuucgacuucaacaagcaggccauccagcgccucaaggccgaggcccagauguccauccagcucaucaacaaggccgucaacgcccucaucaacgaccagcucaucaugaagaaccaccuccgcgacaucaugggcauccccuacugcaacuacuccaaguacugguaccucaaccacaccaccaccggcaagaccucccuccccaagugcuggcucgucuccaacggcuccuaccucaacgagacccacuucuccgacgacaucgagcagcaggccgacaacaugaucaccgagaugcuccagaaggaguacauggagcgccagggcaagaccccccucggccucgucgaccucuucgucuucuccaccuccuucuaccucaucuccaucuuccuccaccucgucaagauccccacccaccgccacaucgucggcaagcccugccccaagccccaccgccucaaccacaugggcaucugcuccugcggccucuacaagcagcccggcguccccgucaaguggaagcgcugaggacuaguaauaaggaaacuguaugaaugucugugggcaggaagugaagagauccuucuguaaagguuuuuggaauuaugucugcugaauaauaaacuuuuuugaaauaauaaaucugguagaaaaaugagaucuaaaaaaaaaaaaaaaaaaaaaaaaaaaaaaaaaaaaaaaaaaaaaaaaaaaaaaaaaaaaaaaaugcaucccccccccccccccccccccccccccccccaaaggcucuuuucagagccaccagaauu

SEQ ID NO: 2892 - RNA, 1816 nt, Artificial Sequence
  mRNA product Design b-4 comprising derived and/or modified sequence from LASV(LM776-SLE-2012;Clade IV)__AIT17824__GPC (opt2)
gggagagucccgcagucggcguccagcggcucugcuuguucgugugugugucguugcaggccuuauucaagcuuaccaugggccagaucgucaccuucuuccaggaggucccccacgucaucgaggaggucaugaacaucguccucaucgcccucuccauccucgccguccucaagggccucuacaacuucgccaccugcggccucgucggccucgucaccuuccuccuccucugcggccgcuccugcaccaccuccgucuacaagggcgucuacgagcuccagacccucgagcucaacauggagacccucaacaugaccaugccccucuccugcaccaagaacaacucccaccacuacaucauggucggcaacgagaccggccucgagcucacccucaccaacaccuccaucaucaaccacaaguucugcaaccucuccgacgcccacaagaagaaccucuacgaccacgcccucauguccaucaucuccaccuuccaccucuccauccccaacuucaaccaguacgaggccauguccugcgacuucaacggcggcaagaucuccguccaguacaaccucucccacuccuacgccggcgacgccgccaaccacugcggcaccgucgccaacggcguccuccagaccuucaugcgcauggccuggggcggcuccuacaucgcccucgacuccggccacggcaagugggacugcaucaugaccuccuaccaguaccucaucauccagaacaccaccugggaggaccacugccaguucucccgccccucccccaucggcuaccucggccuccucucccagcgcacccgcgacaucuacaucucccgccgccuccucggcaccuucaccuggacccucuccgacuccgagggcaaggacacccccggcggcuacugccucacccgcuggaugcucaucgaggccgagcucaagugcuucggcaacaccgccgucgccaagugcaacgagaagcacgacgaggaguucugcgacaugcuccgccucuucgacuucaacaagcaggccauccagcgccucaaggccgaggcccagauguccauccagcucaucaacaaggccgucaacgcccucaucaacgaccagcucaucaugaagaaccaccuccgcgacaucaugggcauccccuacugcaacuacuccaaguacugguaccucaaccacaccaccaccggcaagaccucccuccccaagugcuggcucgucuccaacggcuccuaccucaacgagacccacuucuccgacgacaucgagcagcaggccgacaacaugaucaccgagaugcuccagaaggaguacauggagcgccagggcaagaccccccucggccucgucgaccucuucgucuucuccaccuccuucuaccucaucuccaucuuccuccaccucgucaagauccccacccaccgccacaucgucggcaaguccugccccaagccccaccgccucaaccacaugggcaucugcuccugcggccucuacaagcagcccggcguccccguccgcuggaagcgcugaggacuaguaauaaggaaacuguaugaaugucugugggcaggaagugaagagauccuucuguaaagguuuuuggaauuaugucugcugaauaauaaacuuuuuugaaauaauaaaucugguagaaaaaugagaucuaaaaaaaaaaaaaaaaaaaaaaaaaaaaaaaaaaaaaaaaaaaaaaaaaaaaaaaaaaaaaaaaugcaucccccccccccccccccccccccccccccccaaaggcucuuuucagagccaccagaauu

SEQ ID NO: 2893 - RNA, 1816 nt, Artificial Sequence
  mRNA product Design b-4 comprising derived and/or modified sequence from LASV(Mad39;Clade IV)__ANH09722__GPC (opt2)
gggagagucccgcagucggcguccagcggcucugcuuguucgugugugugucguugcaggccuuauucaagcuuaccaugggccagaucgucaccuucuuccaggaggucccccacgucaucgaggaggucaugaacaucguccucaucgcccucuccauccucgccguccucaagggccucuacaacgucgccaccugcggccucaucggccucgucaccuuccuccuccucugcggccgcuccugcaccaccacccucuacaagggcgucuacgagcuccaggcccucgagcucaacauggagacccucaacaugaccaugccccucuccugcaccaagaacaacucccaccacuacauccgcgucggcaacgagaccggccucgagcucacccucaccaacaccucccucaucaaccacaaguucugcaaccucuccgacgcccacaagaagaaccucuacgaccacgcccucauguccaucaucuccaccuuccaccucuccauccccaacuucaaccaguacgaggccauguccugcgacuucaacgacggcaagaucuccguccaguacaaccucucccacaccuacgccggcgacaccgccaaccacugcggcaccgucgccaacggcguccuccagaccuucaugcgcauggccuggggcggcuccuacaucgcccucgacuccggccgcggcggcugggacugcaucaugaccuccuaccaguaccucaucauccagaacaccaccugggaggaccacugccaguucucccgccccucccccaucggcuaccucggccuccucucccagcgcacccgcgacaucuacaucucccgccgccuccucggcaccuucaccuggacccucuccgacuccgagggcaaggacacccccggcggcuacugccucacccgcuggaugcucaucgaggccgagcucaagugcuucggcaacaccgccgucgccaagugcaacgagaagcacgacgaggaguucugcgacaugcuccgccucuucgacuucaacaagcaggccauccagcgccucaaggccgaggcccagauguccauccagcucaucaacaaggccgucaacgcccucaucaacgaccagcucaucaugaagaaccaccuccgcgacaucaugggcauccccuacugcaacuacuccaaguacugguaccucaaccacaccgucaccggcaagaccucccuccccaagugcuggcucgucuccaacggcuccuaccucaacgagacccacuucuccgacgacaucgagcagcaggccgacaacaugaucaccgagaugcuccagaaggaguacauggagcgccagggcaagaccccccucggccucgucgaccucuucgucuucuccaccuccuucuaccucaucuccaucuuccuccaccucgucaagauccccacccaccgccacgucgucggcaagcccugccccaagccccaccgccucaaccacaugggcaucugcuccugcggcuucuacaagcagcccggcguccccguccgcuggaagcgcugaggacuaguaauaaggaaacuguaugaaugucugugggcaggaagugaagagauccuucuguaaagguuuuuggaauuaugucugcugaauaauaaacuuuuuugaaauaauaaaucugguagaaaaaugagaucuaaaaaaaaaaaaaaaaaaaaaaaaaaaaaaaaaaaaaaaaaaaaaaaaaaaaaaaaaaaaaaaaugcaucccccccccccccccccccccccccccccccaaaggcucuuuucagagccaccagaauu

SEQ ID NO: 2894 - RNA, 1816 nt, Artificial Sequence
  mRNA product Design b-4 comprising derived and/or modified sequence from LASV(Z0947-SLE-2011;Clade IV)__AIT17840__GPC (opt2)
gggagagucccgcagucggcguccagcggcucugcuuguucgugugugugucguugcaggccuuauucaagcuuaccaugggccagaucgucaccuucuuccaggaggucccccacgucaucgaggaggucaugaacaucguccucaucgcccucuccauccucgccguccucaagggccucuacaacuucgccaccugcggccucgucggccucgucaccuuccuccuccucugcggccgcuccugcaccaucucccucuacaagggcgucuacgagcuccagacccucgagcucaacauggagacccucaacaugaccaugccccucuccugcaccaagaacaacucccaccacuacaucauggucggcaacgagaccggccucgagcucacccucaccaacaccuccaucaucaaccacaaguucugcaaccucuccgacgcccacaagaagaaccucuacgaccacgcccucauguccaucaucuccaccuuccaccucuccauccccaacuucaaccaguacgaggccauguccugcgacuucaacggcggcaagaucuccguccaguacaaccucucccacuccuacgccggcgacgccgccaaccacugcggcaccgucgccaacggcguccuccagaccuucaugcgcauggccuggggcggcuccuacaucgcccucgacuccggccgcgaccgcugggacugcaucaugaccuccuaccaguaccucaucauccagaacaccaccugggaggaccacugccaguucucccgccccucccccaucggcuaccucggccuccucucccagcgcacccgcgacaucuacaucucccgccgccuccucggcaccuucaccuggacccucuccgacuccgagggcaaggacacccccggcggcuacugccucacccgcuggaugcucaucgaggccgagcucaagugcuucggcaacaccgccgucgccaagugcaacgagaagcacgacgaggaguucugcgacaugcuccgccucuucgacuucaacaagcaggccauccagcgccucaaggccgaggcccagauguccauccagcucaucaacaaggccgucaacgcccucaucaacgaccagcucaucaugaagaaccaccuccgcgacaucaugggcauccccuacugcaacuacuccaaguacugguaccucaaccacaccaccaccggcaagaccucccuccccaagugcuggcucgucuccaacggcuccuaccucaacgagacccacuucuccgacgacaucgagcagcaggccgacaacaugaucaccgagaugcuccagaaggaguacauggagcgccagggcaagaccccccucggccucgucgaccucuucgucuucuccaccuccuucuaccucaucuccaucuuccuccaccucgucaagauccccacccaccgccacaucgucggcaagcccugccccaagccccaccgccucaaccacaugggcaucugcuccugcggccucuacaagcagcccggcguccccgucaaguggaagcgcugaggacuaguaauaaggaaacuguaugaaugucugugggcaggaagugaagagauccuucuguaaagguuuuuggaauuaugucugcugaauaauaaacuuuuuugaaauaauaaaucugguagaaaaaugagaucuaaaaaaaaaaaaaaaaaaaaaaaaaaaaaaaaaaaaaaaaaaaaaaaaaaaaaaaaaaaaaaaaugcaucccccccccccccccccccccccccccccccaaaggcucuuuucagagccaccagaauu

SEQ ID NO: 2895 - RNA, 1816 nt, Artificial Sequence
  mRNA product Design b-4 comprising derived and/or modified sequence from LASV(Josiah;Clade IV)__NP_694870__GPC (opt3)
gggagagucccgcagucggcguccagcggcucugcuuguucgugugugugucguugcaggccuuauucaagcuuaccaugggccagaucgugaccuucuuucaagaggucccccacguuauugaagaggugaugaacauaguacugaucgcccucagcgugcuugcuguccugaagggguuguacaauuucgcaacaugcggauuagugggucugguuacuuuucuacuccuguguggcagauccugcacgaccucucuuuauaaagggguguacgaacugcagacauuggagcucaacauggaaacucugaauaugaccaugccucugucauguacaaagaacaauagucaucacuauauuauggucggaaacgagaccggccucgaguuaacucugacaaauaccagcaucauuaaccauaaauucugcaaucuuuccgacgcccacaagaaaaacuuguacgaucaugcgcugaugucuaucauaucgacguuucaccuaucaaucccaaauuucaaccaguaugaagcuaugagcugugacuuuaauggugggaagauuagugugcaguacaaccucucccacucuuaugccggagaugcagccaaucauugcggcacuguagcuaacggcguucugcaaaccuucaugaggauggcauggggagggagcuacaucgcccuugacuccggucggggcaacugggauuguauuaugacaucauaccaguaucugaucauacagaauacuaccugggaggaccacugccaguuuagucgcccgagccccauuggguacuugggacuccugucucaacgaacacgugauaucuauauuuccagaagguuacugggcaccuucacguggacucucucagacagcgaagguaaggauacaccugggggauacugucuuacccgguggaugcugaucgaggcugaguugaaaugcuuuggcaacacugccguggcgaaguguaaugaaaaacaugacgaggaguucugcgauaugcuacgccuguuugacuucaacaagcaggcaauccagagacucaaagccgaagcucagaugaguauucaacugauaaauaaggccgucaacgcacuuaucaaugaucagcugauuaugaagaaccacuugagggacaucaugggcauaccauauugcaauuacucuaaauauugguaccucaaccacacaaccacggggcggaccucccugcccaaguguugguuagugagcaauggaucguaccugaacgaaacacauuucucugacgauauugagcagcaagcugacaauaugaucacugagaugcuacagaaagaauauauggagcgccaggguaagaccccucucggccugguggaucuuuuugucuucuccacaucauuuuacuugaucaguauuuuccugcaccucguuaaaaucccaacucaucgacacauugugggaaagagcugccccaaaccucauagacugaaccacauggggauauguuccugcggccuuuauaagcagccagguguaccggugaaguggaaaaggugaggacuaguaauaaggaaacuguaugaaugucugugggcaggaagugaagagauccuucuguaaagguuuuuggaauuaugucugcugaauaauaaacuuuuuugaaauaauaaaucugguagaaaaaugagaucuaaaaaaaaaaaaaaaaaaaaaaaaaaaaaaaaaaaaaaaaaaaaaaaaaaaaaaaaaaaaaaaaugcaucccccccccccccccccccccccccccccccaaaggcucuuuucagagccaccagaauu

SEQ ID NO: 2896 - RNA, 1813 nt, Artificial Sequence
  mRNA product Design b-4 comprising derived and/or modified sequence from LASV(LP;Clade I)__AAF86701__GPC (opt3)
gggagagucccgcagucggcguccagcggcucugcuuguucgugugugugucguugcaggccuuauucaagcuuaccaugggccagaucauuaccuucuuucaagaggugccccacgucauagaagagguuaugaacaucgugcugauugcccucagccuucuggcuaucuugaagggguuauacaauauugcaacaugcggaaucauaggucugguagccuuccuauuucucuguggcaaauccugcucucugacucuuaaagggggauaugaacugcagacguuggagcucaacauggaaacccugaauaugacaaugccucugucauguacuaagaacaguagccaucacuacaucagagugggcaaugagaccggucucgaguuaacacugaccaacacuuccauuaucaaucauaaguucugcaaccuuucugacgcgcacaaaaagaauuuguaugaucaugcucugaugucgauuaucucaacauuucaccuaagcauaccaaacuucaaucaguacgaagccaugaguugugacuuuaacgggggaaagauuuccguccaguauaaucucucucacagcuacgcaggcgaugccgcugagcauugcggcaccguggcaaacgggguucugcaaacguucaugaggauggccuggggaggucgguauaucgcucuugacuccggcaaagggaauugggauuguauuaugacuucauaccaguaccugaucauccagaacaccacaugggaagaccacugccaguuuagucgcccgagccccauuggauauuugggccuccugucucaacgaacucgugauauauacaucuccagaagguuacuggguaccuucacauggacccucucagacagcgaggggaacgagacgccuggaggcuauugucuuacucgguggaugcugauugaagccgaguugaagugcuuuggcaauacagcgguggcaaaauguaacgaaaagcaugaugaggaguucugcgacaugcuacgccuguuugauuucaauaaacaggccaucagaaggcucaaggcugaagcccagaugaguauacagcugauuaacaaggcagucaaugcucuuaucaacgaccaacugaucaugaaaaaucacuugcgggauauuauggggaucccauacugcaacuauucuaaguacugguaucucaaucacaccuccagcggacgcacuucgcugcccaaauguugguuaauuucuaacgguuccuaccugaaugagacacaguucucagacgacauagaacagcaagccgauaacaugaucaccgagaugcuacagaaggaauacauugagcgacagggcaaaacgccucucgggcugguggacaucuuuaucuucaguaccagcuuuuaucuuauuuccauauucuugcaucugaucaagauuccaacacacagacauaucguaggaaaacccugcccuaagccacacaggcucaaucauaugggcguuuguucuugcggucuguacaagcacccgggggugcccacuaaauggaagcggugaggacuaguaauaaggaaacuguaugaaugucugugggcaggaagugaagagauccuucuguaaagguuuuuggaauuaugucugcugaauaauaaacuuuuuugaaauaauaaaucugguagaaaaaugagaucuaaaaaaaaaaaaaaaaaaaaaaaaaaaaaaaaaaaaaaaaaaaaaaaaaaaaaaaaaaaaaaaaugcaucccccccccccccccccccccccccccccccaaaggcucuuuucagagccaccagaauu

SEQ ID NO: 2897 - RNA, 1813 nt, Artificial Sequence
  mRNA product Design b-4 comprising derived and/or modified sequence from LASV(803213;Clade II)__AAF86703__GPC (opt3)
gggagagucccgcagucggcguccagcggcucugcuuguucgugugugugucguugcaggccuuauucaagcuuaccaugggccagaucauuaccuucuuucaagaggugccccacgucauagaagagguuaugaacaucgugcugauugcccucagccuucuggcuaucuugaaggggauuuacaauguagcaacaugcggauuauucggucugaucuccuuucuacuccuguguggcagaucuugcucagugacuuauaaaggggucuacgaacuucagacgcuggaguugaacauggccaaucucaacaugaccaugccucugaguuguacaaagaauaacagccaucacuauauaauggugggaaaugaaacuggccuggagcucaccuuaacaaacaccuccaucauuaaucauaaauucugcaaccugucugacgcgcacaagaaaaaucuuuacgaucaugcuuugaugucgaucauuucaacuuuucaccugagcaucccaaacuucaaucaguaugaggccaugaguugugacuuuaacggugggaagauauccguucaguacaaucuaucucacagcuucgcaguggaugccgcuaaccauugcggaacaauugcaaacggcguccuccaaaccuuuaugaggauggccuggggcggguccuauaucgcucuggacucaggaaaggguaauugggauuguauuaugacgaguuaccaguaccuuaucauccagaacacuaccugggaagaccacugccaguucagccggccgucucccauuggcuaucugggguugcucucccaacgcacacgagauauauacaucucacguagacuguuaggaacuuuuaccuggacacugagcgacagugagggcaaugaagccccugguggguauugucucaccagguggaugcuuauugaggcggagcugaaaugcuucggaaacacggcaguggccaaguguaaugaaaaacaugaugaggaauuuugcgacauguugcggcuauucgauuucaacaagcaggcuaucaaacgccugaagacugaggcccagaugucuauacagcucauuaauaaggcaguaaacgcucugaucaaugaccaacuuaucaugaaaaaccaccugagagauauuaugggcaucccauacugcaauuauuccagguacugguauuugaaccacacaguuaccggcaagacuagccucccccgguguuggcuggugucgaaugggucuuacuuaaacgaaacacauuuuuccgacgacauugagcagcaggccgauaauaugauaaccgagaugcugcaaaaagaauacauggaccgccagggaaagacgccucuaggucucgucgaucuguucguguuuucaaccaguuucuaucuuaucagcaucuuuuugcaccuggugaaaauuccaacacaucgacacaucgucggcaagcccugcccuaaaccacauagacucaaccacauggggauuuguuccugcggacuguacaagcacccgggcguucccgugaaguggaaaaggugaggacuaguaauaaggaaacuguaugaaugucugugggcaggaagugaagagauccuucuguaaagguuuuuggaauuaugucugcugaauaauaaacuuuuuugaaauaauaaaucugguagaaaaaugagaucuaaaaaaaaaaaaaaaaaaaaaaaaaaaaaaaaaaaaaaaaaaaaaaaaaaaaaaaaaaaaaaaaugcaucccccccccccccccccccccccccccccccaaaggcucuuuucagagccaccagaauu

SEQ ID NO: 2898 - RNA, 1813 nt, Artificial Sequence
  mRNA product Design b-4 comprising derived and/or modified sequence from LASV(GA391;Clade III)__CAA36645__GPC (opt3)
gggagagucccgcagucggcguccagcggcucugcuuguucgugugugugucguugcaggccuuauucaagcuuaccaugggccagaucgugaccuucuuucaagaggucccccacguuauugaagaggugaugaacauaguacugaucgcccucagcauucuugcuauccugaagggguuguacaauguggcaacaugcggauuaauuggucuggucacuuuccuacuccuguccggcagaucuuguucacuuaucuauaaagggacguacgaacugcagaccuuggagcucaacauggaaacacugaauaugacuaugccucugaguugcaccaagaacaauagccaucacuauauaagggugggaaacgagacaggccucgaguuaacccugacuaauacauccauccuuaaccauaaauuuuguaauuugucugacgcccacaagcggaaccuguacgaucauucgcuaaugucaauuaucagcaccuuccaccucaguauuccaaauuuuaaccaguaugaagcgauguccugcgacuucaauggugggaaaaucacgguucaguacaaccugucucacagcuuugcuguggaugccgcaggacauuguggcacucuugccaauggcguccugcaaaccuucaugcgcauggcuuggggaggguccuauauagcauuggacucaggucgaggcaacugggauugcauuaugacaaguuaccaguaccucaucauucagaacacuaccugggacgaucacugucaguuuagccguccgucucccaucggguaucugggauuacugucccaaagaacaagggacaucuacauuucacggcgccuccuuggcaccuucacguggacucugagcgauagugaggguaaugaaacaccugggggauauugcuugaccagauggaugcuaauagaggccgagcugaaguguuuuggcaacacugcuguggccaagugcaaugaaaaacaugacgaggaguucugugauaugcucaggcuguuugacuucaacaagcaggcgauccggcgccuuaaaacagaagcacagaugucuauucagcugaucaauaaggccguaaacgcuuugauaaaugaucaacucauuaugaaaaaccaucugcgagacaucaugggcaucccauacugcaauuauuccagauacugguauuuaaaccacaccagcacggggaagaccucgcugcccaggugcuggcuaauuucuaauggauccuaccucaacgaaacaaaguucucagacgauaucgagcagcaggccgacaauaugauuacugagaugcugcaaaaagaauacauagaucggcaggguaagaccccucuuggcuugguugaccuguuuguguucaguacuagcuuuuaucucaucuccauuuuccugcaccuugucaaaaucccaacacaccgucauaucguggggaagcccuguccuaaaccacaccgccugaaccauaugggaauuugcucuuguggcuuguacaagcagccgggugugcccgucagauggaaaaggugaggacuaguaauaaggaaacuguaugaaugucugugggcaggaagugaagagauccuucuguaaagguuuuuggaauuaugucugcugaauaauaaacuuuuuugaaauaauaaaucugguagaaaaaugagaucuaaaaaaaaaaaaaaaaaaaaaaaaaaaaaaaaaaaaaaaaaaaaaaaaaaaaaaaaaaaaaaaaugcaucccccccccccccccccccccccccccccccaaaggcucuuuucagagccaccagaauu

SEQ ID NO: 2899 - RNA, 1816 nt, Artificial Sequence
  mRNA product Design b-4 comprising derived and/or modified sequence from LASV(AV;Clade V)__CCA30314__GPC (opt3)
gggagagucccgcagucggcguccagcggcucugcuuguucgugugugugucguugcaggccuuauucaagcuuaccaugggccagaucgugaccuucuuucaagaggucccccacguuauugaagaggugaugaacauaguacugaucgcccucagcauucuugcugugcugaagggguuguacaauaucgcaacaugcggauuaauuggucugaucacuuuccuacuccuguguggcagauccugcagcucaaaccuuuauaaaggggucuacgaacugcagaguuuggaccucaauauggagacgcugaacaugaccaugccucugagcuguacaaagaauaacucccaucacuauauaagggugggaaaugauacuggccucgaauuaacccugacaaacaccucuauccuuaaucauaaauuuugcaacuugucggacgcccacaagaaagaucuguacgaccaugcgcuaaugucaauuaucagcacuuuccaccucaguauuccaaauuuuaaccaguaugaggcuauguccugugauuucaauggugggaagaucucuguucaguacaaccugagccacuccuaugccauagacgcagccaaucauugcggaacaguggcuaacggcauucuucaaaccuuuaugcggauggcauggggcgggucauacaucgcccuggauaguggacgcgguaacugggacuguauuaugacgagcuaccaguauuugaucauccagaauacuaccugggagaaccacugccaguucucucgaccgucccccauuggcuaccucgggcuguuaucacaacguacaagagauauauauaucagcaggcggcugcucggaacuuuuaccuggacacuuagugacucugaaggcaaugcuaccccugguggguacugucugacgcgcuggauguugauugaggccgaacuaaagugcuucggaaacacugcggucgcaaaauguaaugagaagcaugaugaggaauuuugcgacaugcugagacucuucgauuuuaacaaacaggccaucuccaggcugaagucugaggcucagaugucgauacagcuuauuaauaaagccgugaacgcacugaucaaugaccaauugaucaugaagaaccaccuccgggacauuaugggcaucccauauugcaauuacucuaaguauugguaccugaaccacacaauuaccggcaaaacuuccuuacccaaguguuggcugguaucaaaugggaguuaccuaaacgaaacacauuucagcgaugacauagagcagcaggcugauaauaugaucaccgaaaugcuccaaaaagaguauauggagcgccagggaaagacgccucugggucuuguugacuuguucguguuuuccaccucuuucuaccugauuagcaucuuucuccgacuggucaaaaucccaacacacagacauauugugggcaagcccugcccuaaaccacacaggcuuaaccauauggggauauguucaugcggacuguauaagcagccgggcgugcccguccgguggaagcguugaggacuaguaauaaggaaacuguaugaaugucugugggcaggaagugaagagauccuucuguaaagguuuuuggaauuaugucugcugaauaauaaacuuuuuugaaauaauaaaucugguagaaaaaugagaucuaaaaaaaaaaaaaaaaaaaaaaaaaaaaaaaaaaaaaaaaaaaaaaaaaaaaaaaaaaaaaaaaugcaucccccccccccccccccccccccccccccccaaaggcucuuuucagagccaccagaauu

SEQ ID NO: 2900 - RNA, 1813 nt, Artificial Sequence
  mRNA product Design b-4 comprising derived and/or modified sequence from LASV(Togo/2016/7082;Clade VI)__AMR44577__GPC (opt3)
gggagagucccgcagucggcguccagcggcucugcuuguucgugugugugucguugcaggccuuauucaagcuuaccaugggccagaucauuaccuucuuucaagaggugccccacgucauagaagagguuaugaacaucgugcugauugcccucagccuucuggcuaucuugaaggggguauacaauguggcaacaugcggaauuaucgguuuagucacuuuccuguuucuauguggcagauccugcucucucauauauaaagggucauacgaacugcagacgcuugagcugaacauggaaaccuugaauaugacaaugccucucaguuguacuaagaacagcucccaucacuauaucagggugggaaaugagaccggccuggagcugacacucaccaacacuucuauuaucaaucauaaauucugcaacuuaucggacgcccacaagcggaaucuguacgaucaugcgcuuaugucaauuuugagcacauuucaccugaguaucccaaacuucaaucaguaugaagcuauguccugugacuuuaacggugggaaaauaucuguucaguacaaucuaagccacgccuaugcaguggaugccgcugagcauugcggaaccgucgcaaacggcgugcuccaaacguucaugcgcauggccuggggcggguccuacauugcucuggacucaggacgagguaauugggauuguaucaugaccaguuaccaguaucuuauuauccagaacacuacaugggaagaccacugccaguuuagccguccgucucccaucggcuaccugggguugcucucccaaagaacuagggauauuuauauaucacggcgccuguuaggaaccuucacauggacccugagcgacagugagggcaacgagacgccugguggguacugucucacuagauggaugcuuaucgaagccgagcugaagugcuuuggaaauacagcgguagcaaaguguaacgaaaaacaugaugaggaguucugcgacauguugaggcuauuugauuucaauaagcaggccauucagcggcugaaaucugaagcucagauguccauccaacucauaaacaaggccguuaaugcacugauuaacgaccagcuuaucaugaaaaaucaucugcgcgauaugaugggcaucccauauugcaacuacagcaaguauugguacuugaaucacaccucgucuggccgaacuucccuccccaaguguuggcuggugucaaacgggaguuacuuaaaugagacacacuucagcgacgacauugaacagcaagcugauaacaugaucaccgagaugcugcagaaagaauauauugacagacagggaaagacgccucuaggucucgucgaucuguuuguguucuccaccucuuuuuaccuuauaagcaucuucuugcaccugauuaaaaucccaacacauaggcacaucgugggcaagcccugcccuaaaccacaucggcucaaucacauggggauuuguucaugcggacuguauaagcagccgggcguccccacucguuggaaacgcugaggacuaguaauaaggaaacuguaugaaugucugugggcaggaagugaagagauccuucuguaaagguuuuuggaauuaugucugcugaauaauaaacuuuuuugaaauaauaaaucugguagaaaaaugagaucuaaaaaaaaaaaaaaaaaaaaaaaaaaaaaaaaaaaaaaaaaaaaaaaaaaaaaaaaaaaaaaaaugcaucccccccccccccccccccccccccccccccaaaggcucuuuucagagccaccagaauu

SEQ ID NO: 2901 - RNA, 1813 nt, Artificial Sequence
  mRNA product Design b-4 comprising derived and/or modified sequence from LASV(KAK-428;Clade n.d. (VII))__ANH09740__GPC (opt3)
gggagagucccgcagucggcguccagcggcucugcuuguucgugugugugucguugcaggccuuauucaagcuuaccaugggccagaucgugaccuucuuucaagaggucccccacguuauugaagaggugaugaacauaguacugaucgcccucagccuucuggcuauuuugaagggguuauacaauuucgcaacaugcggagugaucggucugauuacuuuucuacuccuguguggcagauccugcucugccacguauaaagggcaguacgaacuucagacccuggaguugaacauggaaucacucaauaugacaaugccucugaguuguacuaagaacaauagccaucacuauaucagggcgggaaacaauaccggccuggagcucacauuaaccaacacuuccauaaucucucauaaauucugcaaucugucggacgcucacaagaaaaaccuuuacgaucauacauugaugucaauuaucaccacguuucaccugagcauuccaaauuucaaccaguaugaggccaugaguugugacuuuaauggugggaagaucuccauacaauacaaccuaucucacagcuaugcaggagaugccgcucagcauugcggcacugucgcaaauggcgugcuccagaccuucaugcggauggccuggggaggguccuaccuggcucuugacucaggucgccgaggcugggauuguauuaucaguagcuaccaguaucugauuauccaaaacacaacuugggacgaucacugccaguuuucucguccgucccccaucggguacuugggauucguuucacagaagaccagagacauuuauauaagcaggcggcuccugggcacauuuaccuggacguuaagugauucugaaggucaugacaugccugggggauacugucugacucgcuggaugcucaucgaggccgaucuuaaaugcuucggcaacacagcgguggcaaaguguaaugaaaaacacgacgaggaguuuugcgauauguggagacuguucgacuucaacaagcaggccauucaaagguugaaagcugaagcccagaugaauauccagcuaauaaacaaggcagucaaugcucugauuaacgaccaacucaugaugaagaaucaucugcgggauaucaugggcaucccauauugcaacuacuccaaauuuugguaucuuaauaacaccacuacagggcgcaccagccugccccgauguugguugauuucgaauggaucuuaccucaacgagacgcacuucuccgacgauaucgaacagcaggccgacaauaugauuaccgagaugcugcagaaggaauacauggauagacaagguaaaacaccuuuaggccugguggaccuauuuguauucucaaccaguuuuuaucucauaacuaucuuccugcaccuuguuaagauuccaacacauaggcacaucguggggaaacccugcccuaagccacaucgguugaaccacaugggaaucuguagcugcggccuguacaaacagccggguguccccgugcguuggaagcgcugaggacuaguaauaaggaaacuguaugaaugucugugggcaggaagugaagagauccuucuguaaagguuuuuggaauuaugucugcugaauaauaaacuuuuuugaaauaauaaaucugguagaaaaaugagaucuaaaaaaaaaaaaaaaaaaaaaaaaaaaaaaaaaaaaaaaaaaaaaaaaaaaaaaaaaaaaaaaaugcaucccccccccccccccccccccccccccccccaaaggcucuuuucagagccaccagaauu

SEQ ID NO: 2902 - RNA, 1813 nt, Artificial Sequence; identical to SEQ ID NO: 2896
  mRNA product Design b-4 comprising derived and/or modified sequence from LASV(Pinneo-NIG-1969;Clade I)__AIT17836__GPC (opt3)

SEQ ID NO: 2903 - RNA, 1813 nt, Artificial Sequence
  mRNA product Design b-4 comprising derived and/or modified sequence from LASV(ISTH0009-NIG-2011;Clade II)__AIT17404__GPC (opt3)
gggagagucccgcagucggcguccagcggcucugcuuguucgugugugugucguugcaggccuuauucaagcuuaccaugggccagaucauuaccuucuuucaagaggugccccacgucauagaagagguuaugaacaucgugcugauugcccucagccuucuggcuaucuugaaggggauuuacaauguagcaacaugcggauuauucggucugguguccuuucuacuccuguguggcagaucuugcucaacuacguauaaaggggucuacgaacuucagacccuggaguuggacauggccagucucaacaugacaaugccucugagcuguacuaagaauaacucccaucacuauaucauggugggaaaugaaaccggccuggagcucacauuaaccaacacuucuauaaucaaucauaaauucugcaaccugucggaugcgcacaagaaaaaucuuuacgaccaugcuuugaugucaauuaucagcacauuucaccugaguauuccaaacuucaaucaguaugaggccauguccugugauuuuaacggugggaagaucucuguucaguacaaucuaagccacgcauaugccguggacgcugcaaaccauugcggaaccauagccaauggcguccuccaaacguucaugaggauggcuuggggcggguccuacauugcccuggauucaggaaaggguaguugggacuguaucaugacuagcuaccaguaucuuauuauccagaacaccacaugggaagaucacugccaguuuucucggccgucccccaucggcuaccugggguugcucucacaacgcacucgagacauuuauauaagccguagacuguuaggaaccuucacauggacccugagugauucugagggcaacgaaacgccugguggguacugucucacuagguggaugcuuaucgaggcggagcugaaaugcuuuggaaauacagcaguggccaaguguaacgaaaaacaugacgaggaguucugcgauauguugcggcuauuugacuucaauaagcaggcuauucgcagacugaaaaccgaagcccagauguccauccagcucauaaacaaggcaguaaaugcucugauuaacgaucaacuuaucaugaagaaucaccugagggacaucaugggcauuccauauugcaacuacagcaaauauugguacuugaaucacacuguuacaggcaagaccucgcucccccgguguuggcuggugucuaacggguccuacuuaaaugaaacgcauuucucagacgauaucgagcagcaggccgacaacaugauuaccgagcugcuacaaaaagaauauauggaucgccagggaaagacaccucucggucuggucgaccuuuuuguguucaguacuagcuuuuacuugauauccaucuuccugcaccucauuaaaaucccaacccaucgacacaucacaggcaagcccugcccuaaaccacauagacugaaucacauggggauuuguucuugcggacuuuauaagcacccgggcgugcccgucaaguggaaaaggugaggacuaguaauaaggaaacuguaugaaugucugugggcaggaagugaagagauccuucuguaaagguuuuuggaauuaugucugcugaauaauaaacuuuuuugaaauaauaaaucugguagaaaaaugagaucuaaaaaaaaaaaaaaaaaaaaaaaaaaaaaaaaaaaaaaaaaaaaaaaaaaaaaaaaaaaaaaaaugcaucccccccccccccccccccccccccccccccaaaggcucuuuucagagccaccagaauu

SEQ ID NO: 2904 - RNA, 1813 nt, Artificial Sequence
  mRNA product Design b-4 comprising derived and/or modified sequence from LASV(ISTH2010-NIG-2012;Clade II)__AIT17482__GPC (opt3)
gggagagucccgcagucggcguccagcggcucugcuuguucgugugugugucguugcaggccuuauucaagcuuaccaugggccagaucauuaccuucuuucaagaggugccccacgucauagaagagguuaugaacaucgugcugauugcccucagccuucuggcuaucuugaaggggauuuacaauguagcaacaugcggauuauucggucugguguccuuucuacuccuguguggcagaucuugcucaacuacguauaaaggggucuacgaacuucagacccuggaguuggacauggccagucucaacaugacaaugccucugagcuguacuaagaauaacucccaucacuauaucauggugggaaaugaaaccggccuggagcucacauuaaccaacacuucuauaaucaaucauaaauucugcaaccugucggaugcgcacaagaaaaaucuuuacgaccaugcuuugaugucaauuaucagcacauuucaccugaguauuccaaacuucaaucaguaugaggccauguccugugauuuuaacggugggaagaucucuguucaguacaaucuaagccacgcauaugccguggacgcugcaaaccauugcggaaccauagccaauggcguccuccaaacguucaugaggauggcuuggggcggguccuacauugcccuggauucaggaaaggguaguugggacuguaucaugacuagcuaccaguaucuuauuauccagaacaucaccugggaagaucacugccaguuuucucggccgucccccauuggcuaccugggguugcucucacaacgcacacgagacauauauaucagccguagacuguuaggaacuuucaccuggacacugagugauucugagggcaacgaaaccccugguggguacugucucacgagguggaugcuuauugaggcggagcugaaaugcuuuggaaauacugcaguggccaaguguaacgaaaaacaugacgaggaguucugcgauauguugcggcuauuugacuucaauaagcaggcuauccgcagacugaaaacagaagcccagauguccauacagcucauuaacaaggcaguaaaugcucugaucaacgaucaacuuaucaugaagaaucaccugagggacauuaugggcaucccauauugcaacuacagcaaauauugguacuugaaucacaccguuacuggcaagacaucgcucccccgguguuggcuggugucuaacggguccuacuuaaaugaaacccauuucucagacgauauugagcagcaggccgacaacaugauaacggagcugcuacaaaaagaauauaucgaucgccagggaaagaccccucucggucuggucgaccuuuuuguguucaguacuagcuuuuacuugauuuccaucuuccugcaccucgugaaaaucccaacacaucgacacgucguuggcaagcccugcccuaaaccacauagacugaaucacauggggauuuguucuugcggacuuuauaagcacccgggcgugcccguaaaguggaaaaggugaggacuaguaauaaggaaacuguaugaaugucugugggcaggaagugaagagauccuucuguaaagguuuuuggaauuaugucugcugaauaauaaacuuuuuugaaauaauaaaucugguagaaaaaugagaucuaaaaaaaaaaaaaaaaaaaaaaaaaaaaaaaaaaaaaaaaaaaaaaaaaaaaaaaaaaaaaaaaugcaucccccccccccccccccccccccccccccccaaaggcucuuuucagagccaccagaauu

SEQ ID NO: 2905 - RNA, 1813 nt, Artificial Sequence
  mRNA product Design b-4 comprising derived and/or modified sequence from LASV(Lassa virus/H.sapiens-wt/NGA/2015/ISTH_0543;Clade II)__AVO03639__GPC (opt3)
gggagagucccgcagucggcguccagcggcucugcuuguucgugugugugucguugcaggccuuauucaagcuuaccaugggccagaucauuaccuucuuucaagaggugccccacgucauagaagagguuaugaacaucgugcugauugcccucagccuucuggcuaucuugaaggggauuuacaauguagcaacaugcggauuauucggucugguguccuuucuacuccuguguggcagaucuugcucaacuacguauaaaggggucuacgaacuucagacccuggaguuggacauggccaaccucaauaugacaaugccucugaguuguacuaagaacaauagccaucacuauaucauggugggaaacgaaaccggccuggagcucacauuaaccaauacuuccauaaucaaccauaaauucugcaaucugucugaugcgcacaagaaaaaccuuuacgaccaugcuuugaugucgauuaucucaacauuucaccugagcauuccaaauuucaaccaguaugaggccaugaguugugauuuuaauggugggaagaucuccguucaguacaaccuaucucacaccuaugcaguggacgccgcuaaucauugcggaacgauagcaaacggcguccuccaaacuuucaugaggauggccuggggcgggagcuacauugcucuggauuccggaaaggguucaugggacuguaucaugaccaguuaccaguaucuugugauucagaacacaacuugggaagaucacugccaguuuagccggccgucucccaucggcuaccugggguugcucucccaacgcacccgagacaucuauauuucacguagacuguuaggaacauucaccuggacgcugagcgauagugagggcaaugaaacuccugguggguacugucucacaagguggaugcuuauagaggccgagcugaaaugcuuuggaaacaccgcgguagcaaaguguaaugaaaaacaugacgaggaguucugcgauauguugcggcuauuugacuucaacaagcaggccauccgcagacugaaaacugaagcucagaugucuauucagcucaucaauaaggccguuaacgcacugauaaaugaucaacuuauuaugaagaaccaccugagggacaucaugggcaucccauauugcaauuacuccaaauauugguacuugaaccacacagugaccggcaagacgagccucccccgguguuggcuggucucgaaugggucuuacuuaaacgaaacccauuucuccgacgauauugagcagcaggcugacaauaugaucacagagcugcuacaaaaagaauauauugaucgccagggaaagacuccucucggucugguggaccuuuuuguguucucaaccaguuuuuacuugauaagcaucuuccugcaccucgucaaaauuccaacacaucgacacaucacuggcaagcccugcccuaaaccacauagacugaaccacauggggaucuguuccugcggacuuuauaagcacccgggcguucccgugaaguggaaaaggugaggacuaguaauaaggaaacuguaugaaugucugugggcaggaagugaagagauccuucuguaaagguuuuuggaauuaugucugcugaauaauaaacuuuuuugaaauaauaaaucugguagaaaaaugagaucuaaaaaaaaaaaaaaaaaaaaaaaaaaaaaaaaaaaaaaaaaaaaaaaaaaaaaaaaaaaaaaaaugcaucccccccccccccccccccccccccccccccaaaggcucuuuucagagccaccagaauu

SEQ ID NO: 2906 - RNA, 1813 nt, Artificial Sequence
  mRNA product Design b-4 comprising derived and/or modified sequence from LASV(Lassa virus/H.sapiens-wt/NGA/2016/ISTH_0009;Clade II)__AVO03571__GPC (opt3)
gggagagucccgcagucggcguccagcggcucugcuuguucgugugugugucguugcaggccuuauucaagcuuaccaugggccagaucauuaccuucuuucaagaggugccccacgucauagaagagguuaugaacaucgugcugauugcccucagccuucuggcuaucuugaaggggauuuacaauguagcaacaugcggauuacugggucuaguguccuuccuccugcuuuguggcagaucuugcucaacuacguauaaaggggucuacgaacugcagaccuuggagcucgacauggccagucugaacaugacaaugccucugagcuguacuaagaauaacucccaucacuauaucauggugggaaaugaaaccggccucgaguuaacacugaccaacacuucuauaaucaaucauaaauuuugcaaccuuucggaugcgcacaagaaaaauuuguacgaccaugcucugaugucaauuaucagcacauuccaccuaaguauuccaaacuuuaaucaguaugaggccauguccugugauuucaacggugggaggaucucuguucaguacaaucucagccacuccuaugcaguggacgccgcuaaccauugcggaaccauagcaaauggcguccugcaaacguuuaugcggauggccuggggcgggucauacauugcucuugauaguggaaaggguagcugggacuguaucaugacuucuuaccaguaucugauuauccagaacaccacaugggaagaucacugccaguucucccgcccgucacccaucggcuacuuggggcuccugagccaacgaacucgugacauuuauauaaguagaagguuacugggaaccuuuacauggacccucucugauuccgagggcaacgaaacgccugguggguacugucuuacucgguggaugcugaucgaggccgaguugaagugcuucggaaauacagcgguggcaaaauguaacgaaaagcaugacgaggaauuuugcgauaugcuacgccuguucgacuuuaauaaacaggccauuagaaggcucaagaccgaggcucagaugagcauccagcugauaaacaaagccguaaaugcacuuauuaacgaucaacugaucaugaagaaucacuugcgggacaucaugggcauuccauauugcaacuacucgaaguauugguaccucaaucacacuguuacaggcaaaaccucucugccccgcuguugguuaguguccaacgggucauaccugaaugaaacgcauuucagugacgauaucgagcagcaggcugacaacaugauuaccgagcuacuccaaaaggaauauauagaucgacagggaaaaacaccucugggucuugucgacuuguucguguuuagcacuuccuucuaccugaucucuauuuuucuccaccuggugaagaucccaacccauagacacaucacaggcaaacccugcccuaagccacauaggcuuaaucacauggggauuuguagcugcggacuguauaaccacccgggcguccccguuaaauggaagcggugaggacuaguaauaaggaaacuguaugaaugucugugggcaggaagugaagagauccuucuguaaagguuuuuggaauuaugucugcugaauaauaaacuuuuuugaaauaauaaaucugguagaaaaaugagaucuaaaaaaaaaaaaaaaaaaaaaaaaaaaaaaaaaaaaaaaaaaaaaaaaaaaaaaaaaaaaaaaaugcaucccccccccccccccccccccccccccccccaaaggcucuuuucagagccaccagaauu

SEQ ID NO: 2907 - RNA, 1813 nt, Artificial Sequence
  mRNA product Design b-4 comprising derived and/or modified sequence from LASV(Lassa virus/H.sapiens-wt/NGA/2016/ISTH_0017;Clade II)__AVO03567__GPC (opt3)
gggagagucccgcagucggcguccagcggcucugcuuguucgugugugugucguugcaggccuuauucaagcuuaccaugggccagaucauuaccuucuuucaagaggugccccacgucauagaagagguuaugaacaucgugcugauugcccucagccuucuggcuaucuugaaggggauuuacaauguagcaacaugcggauuauucggucugguguccuuucuacuccuguguggcagaucuugcucaacuacguauaaaggggucuacgaacuucagacccuggaguuggacauggccagucucaacaugacaaugccucugagcuguacuaagaauaacucccaucacuauaucauggugggaaaugaaaccggccuggagcucacauuaaccaacacuucuauaaucaaucauaaauucugcaaccugucggaugcgcacaagaaaaaucuuuacgaccaugcuuugaugucaauuaucagcacauuucaccugaguauuccaaacuucaaucaguaugaggccauguccugugauuuuaacggugggaagaucucuguucaguacaaucuaagccacaccuaugcaauagacgccgcuaaccauugcggaacgauugcaaauggcgugcuccaaacuuucaugaggauggccuggggcggguccuacaucgcucuggauucaggaaaggguaguugggacuguauuaugaccagcuaccaguaucuuaucauccagaacacaacuugggaagaucacugccaguuuucucggccgucccccauuggcuaccugggguugcucucacaacgcacccgagacauauauaucagccguagacuguuaggaacauucaccuggacgcugagugauucugagggcaacgaaacuccugguggguacugucucacaagguggaugcuuauugaggccgagcugaaaugcuuuggaaauaccgcggucgcaaaguguaacgaaaaacaugacgaggaguucugcgauauguugcggcuauuugacuucaauaagcaggccauccgcagacugaaaacugaagcucagauguccauacagcucauuaacaaggccgugaaugcacugaucaacgaucaacuuaucaugaagaaucaccugagggacauuaugggcaucccauauugcaacuacagcaaauauugguacuugaaucacacaguaaccggcaagacgucgcucccccgguguuggcugguuucuaacggguccuacuuaaaugaaacccauuucucagacgauauugagcagcaggcugacaacaugauaacagagcugcuacaaaaagaauauauggaucgccagggaaagacuccucucggucugguggaccuuuuugucuucaguaccagcuuuuacuugaucuccauuuuccugcaccucgugcgaaucccaacacauagacacgugaucggcaaacccugcccuaagccacauaggcugaaucacauggggauuuguucuugcggacuuuauaaacacccgggcguccccguuaaguggaagcggugaggacuaguaauaaggaaacuguaugaaugucugugggcaggaagugaagagauccuucuguaaagguuuuuggaauuaugucugcugaauaauaaacuuuuuugaaauaauaaaucugguagaaaaaugagaucuaaaaaaaaaaaaaaaaaaaaaaaaaaaaaaaaaaaaaaaaaaaaaaaaaaaaaaaaaaaaaaaaugcaucccccccccccccccccccccccccccccccaaaggcucuuuucagagccaccagaauu

SEQ ID NO: 2908 - RNA, 1813 nt, Artificial Sequence
  mRNA product Design b-4 comprising derived and/or modified sequence from LASV(Lassa virus/H.sapiens-wt/NGA/2018/ISTH_0959;Clade II)__AVV65099__GPC (opt3)
gggagagucccgcagucggcguccagcggcucugcuuguucgugugugugucguugcaggccuuauucaagcuuaccaugggccagaucauuaccuucuuucaagaggugccccacgucauagaagagguuaugaacaucgugcugauugcccucagccuucuggcuaucuugaaggggauuuacaauguagugacaugcggauuauucggucuggucuccuuucuacuccuguguggcagaucuugcucaacuacguauaaagggguguacgaacuucagacccuggaguuggacauggcaagucucaacaugacaaugccucugagcuguacuaagaauaacucccaucacuauaucaugguuggaaaugaaaccggccuggagcucacauuaaccaacacuucuauaaucaaucauaaauucugcaaccugucggaugcccacaagaaaaaucuuuacgaccaugcguugaugucaauuaucagcacauuucaccugaguauuccaaacuucaaucaguaugaggcuauguccugugauuuuaacggugggaagaucucugugcaguacaaucuaagccacgccuaugcaauagacgccgcuaaccauugcggaaccauugcaaauggcguccuccaaacguucaugaggauggccuggggcggguccuacaucgcucuggauucaggaaaggguaguugggacuguauuaugacuagcuaccaguaucuuaucauccagaacaccacaugggaagaucacugccaguuuucucggccgucccccauuggcuaccugggguugcucucacaacgcacucgagacauauauaucagccguagacuguuaggaaccuucacauggacccugagugauucugagggcaacgaaacgccugguggguacugucucacuagguggaugcuuauugaggccgagcugaaaugcuuuggaaauacagcgguggcaaaguguaacgaaaaacaugacgaggaguucugcgauauguugcggcuauuugacuucaauaagcaggccauccgcagacugaaaaccgaagcucagauguccauacagcucauuaacaaggccguaaaugcacugaucaacgaucaacuuaucaugaagaaucaccugagggacauuaugggcaucccauauugcaacuacagcaaauauugguacuugaaucacacuguuacaggcaagaccucgcucccccgguguuggcuggugucuaacggguccuacuuaaaugaaacgcauuucucagacgauauugagcagcaggcugacaacaugauaaccgagcugcuacaaaaagaauauaucgaucgccagggaaagacaccucucggucuggucgaccuuuuuguguucaguacuagcuuuuacuugauuuccaucuuccugcaccucgugaaaaucccaacccaucgacacgucauuggcaagcccugcccuaaaccacauagacugaaucacauggggauauguucuugcggacuuuauaagcacccgggcguucccgugaaguggaaaaggugaggacuaguaauaaggaaacuguaugaaugucugugggcaggaagugaagagauccuucuguaaagguuuuuggaauuaugucugcugaauaauaaacuuuuuugaaauaauaaaucugguagaaaaaugagaucuaaaaaaaaaaaaaaaaaaaaaaaaaaaaaaaaaaaaaaaaaaaaaaaaaaaaaaaaaaaaaaaaugcaucccccccccccccccccccccccccccccccaaaggcucuuuucagagccaccagaauu

SEQ ID NO: 2909 - RNA, 1813 nt, Artificial Sequence
  mRNA product Design b-4 comprising derived and/or modified sequence from LASV(LASV003-NIG-2008;Clade II)__AIT17580__GPC (opt3)
gggagagucccgcagucggcguccagcggcucugcuuguucgugugugugucguugcaggccuuauucaagcuuaccaugggccagaucauuaccuucuuucaagaggugccccacgucauagaagagguuaugaacaucgugcugauugcccucagccuucuggcuaucuugaaggggauuuacaauguagcaacaugcggauuauucggucugguguccuuucuacuccuguguggcagaucuugcucaacuacguauaaaggggucuacgaacuucagacccuggaguuggacauggccagucucaacaugacaaugccucugagcuguacuaagaauaacucccaucacuauaucauggugggaaaugaaaccggccuggagcucacauuaaccaacacuucuauaaucaaucauaaauucugcaaccugucggaugcgcacaagaaaaaucuuuacgaccaugcuuugaugucaauuaucagcacauuucaccugaguauuccaaacuucaaucaguaugaggccauguccugugauuuuaacggugggaagaucucuguucaguacaaucuaagccacaccuaugcaguggacgccgcuaaccauugcggaacgauagcaaauggcguccuccaaacuuucaugaggauggccuggggcggguccuacauugcucuggauucaggaaaggguaguugggacuguaucaugaccagcuaccaguaucuuauuauccagaacacaacuugggaagaucacugccaguuuucucggccgucccccaucggcuaccugggguugcucucacaacgcacccgagacauuuauauaagccguagacuguuaggaacauucaccuggacgcugagugauucugaguccaacgaaacuccuggcgguuacugucucacaagguggaugcuuaucgaggccgagcugaaaugcuuugggaauaccgcgguggcaaaguguaacgaaaaacaugacgaggaguucugcgauauguugcggcuauuugacuucaauaagcaggccauucgcagacugaaagcugaagcccagaugagcauccagcucauaaacaaggcaguaaaugcucugauuaacgaucaacuuaucaugaagaaucaccugagggacaucaugggcauuccauauugcaacuacucgaaauauugguacuugaaucacacuguuacaggacggaccucucucccccgcuguuggcugguguccaacggcucauacuuaaaugaaacgcauuucagugacgauaucgagcagcaggccgacaacaugauuaccgagcugcuacaaaaggaauauauggaucgacaggggaaaacaccucucggacuggucgaccuuuuuguguucagcacuuccuuuuacuugauaucuaucuuccugcaccucgugaagauuccaacccauagacacgucaucgguaaacccugcccuaagccacauaggcugaaucacaugggcaucuguagcugcgggcuuuauaaacacccgggaguucccgugaaguggaagcggugaggacuaguaauaaggaaacuguaugaaugucugugggcaggaagugaagagauccuucuguaaagguuuuuggaauuaugucugcugaauaauaaacuuuuuugaaauaauaaaucugguagaaaaaugagaucuaaaaaaaaaaaaaaaaaaaaaaaaaaaaaaaaaaaaaaaaaaaaaaaaaaaaaaaaaaaaaaaaugcaucccccccccccccccccccccccccccccccaaaggcucuuuucagagccaccagaauu

SEQ ID NO: 2910 - RNA, 1813 nt, Artificial Sequence
  mRNA product Design b-4 comprising derived and/or modified sequence from LASV(LASV035-NIG-2009;Clade II)__AIT17588__GPC (opt3)
gggagagucccgcagucggcguccagcggcucugcuuguucgugugugugucguugcaggccuuauucaagcuuaccaugggccagaucauuaccuucuuucaagaggugccccacgucauagaagagguuaugaacaucgugcugauugcccucagccuucuggcuaucuugaaggggauuuacaauguagcaacaugcggauuauucggucugguguccuuucuacuccuguguggcagaucuugcucaacuacguauaaaggggucuacgaacuucagacccuggaguuggacauggccagucucaacaugacaaugccucugagcuguacuaagaauaacucccaucacuauaucauggugggaaaugaaaccggccuggagcucacauuaaccaacacuucuauaaucaaucauaaauucugcaaccugucggaugcgcacaagaaaaaucuuuacgaccaugcuuugaugucaauuaucagcacauuucaccugaguauuccaaacuucaaucaguaugaggccauguccugugauuuuaacggugggaagaucucuguucaguacaaucuaagccacgcauaugccguggacgcugcaaaccauugcggaaccauagccaauggcguccuccaaacguucaugaggauggcuuggggcggguccuacauugcccuggauucaggaaaggguaguugggacuguaucaugacuagcuaccaguaucuuauuauccagaacaccacaugggaagaucacugccaguuuucucggccgucccccaucggcuaccugggguugcucucacaacgcacucgagacauuuauauaagccguagacuguuaggaaccuucacauggacccugagugauucugagggcaacgaaacgccugguggguacugucucacuagguggaugcuuaucgaggcggagcugaaaugcuuuggaaauacagcaguggccaaguguaacgaaaaacaugacgaggaguucugcgauauguugcggcuauuugacuucaauaagcaggcuauucgcagacugaaagccgaagcacagauguccauccagcucauaaacaaggcuguaaaugcccugauuaacgaucaacuuaucaugaagaaucaccugagggacaucaugggcauuccauauugcaacuacagcaaauauugguacuugaaucacaccguuacuggcaagacaucgcucccccgguguuggcuggugucuaacggguccuacuuaaaugaaacccauuucucagacgauaucgagcagcaggcggacaacaugauuacggagcugcuacaaaaagaauauauagaucgccagggaaagaccccucucggucuggucgaccuuuuuguguucaguacuagcuuuuacuugaucuccauuuuccugcaccucgugaaaaucccaacacaucgacacgucaucggcaagcccugcccuaaaccacauagacugaaucacauggggauuuguucuugcggacuuuauaagcacccgggcguucccgugaaguggaaaaggugaggacuaguaauaaggaaacuguaugaaugucugugggcaggaagugaagagauccuucuguaaagguuuuuggaauuaugucugcugaauaauaaacuuuuuugaaauaauaaaucugguagaaaaaugagaucuaaaaaaaaaaaaaaaaaaaaaaaaaaaaaaaaaaaaaaaaaaaaaaaaaaaaaaaaaaaaaaaaugcaucccccccccccccccccccccccccccccccaaaggcucuuuucagagccaccagaauu

SEQ ID NO: 2911 - RNA, 1813 nt, Artificial Sequence
  mRNA product Design b-4 comprising derived and/or modified sequence from LASV(LASV1000-NIG-2009;Clade II)__AIT17782__GPC (opt3)
gggagagucccgcagucggcguccagcggcucugcuuguucgugugugugucguugcaggccuuauucaagcuuaccaugggccagaucauuaccuucuuucaagaggugccccacgucauagaagagguuaugaacaucgugcugauugcccucagccuucuggcuaucuugaaggggauuuacaauguagcaacaugcggauuauucggucugguguccuuucuacuccuguguggcagaucuugcucaacuacguauaaaggggucuacgaacuucagacccuggaguuggacauggccagucucaacaugacaaugccucugagcuguacuaagaauaacucccaucacuauaucauggugggaaaugaaaccggccuggagcucacauuaaccaacacuucuauaaucaaucauaaauucugcaaccugucggaugcgcacaagaaaaaucuuuacgaccaugcuuugaugucaauuaucagcacauuucaccugaguauuccaaacuucaaucaguaugaggccauguccugugauuuuaacggugggaagaucucuguucaguacaaucuaagccacaccuaugcaguggacgccgcuaaccauugcggaacgauagcaaauggcguccuccaaacuuucaugaggauggccuggggcggguccuacauugcucuggauucaggaaaggguaguugggacuguaucaugaccagcuaccaguaucuuauuauccagaacacaacuugggaagaucacugccaguuuucucggccgucccccaucggcuaccugggguugcucucacaacgcacccgagacauuuauauaagccguagacuguuaggaacauucaccuggacgcugagugauucugagggcaacgaaacuccugguggguacugucucacaagguggaugcuuaucgaggccgagcugaaaugcuuuggaaauaccgcgguggcaaaguguaacgaaaaacaugacgaggaguucugcgauauguugcggcuauuugacuucaauaagcaggccauuaaacgccugaagacugaagcucagauguccauccagcucauaaacaaggccguaaaugcacugauuaacgaucaacuuaucaugaaaaaucaccugagagacaucaugggcauuccauauugcaacuacagcaaguauugguacuugaaucacacaguuaccggcaaaacgucgcuccccagguguuggcuggugucuaacggguccuacuuaaaugaaacccauuucucagacgauaucgagcagcaggcugacaacaugauuacagagcugcuacaaaaggaauauauagaucggcagggaaaaacuccucucggucuggucgaccuuuuuguguucaguaccagcuuuuacuugaucuccauuuuccugcaccucgugaagaucccaacacaucgccacgucguuggcaaacccugcccuaagccacaucgacugaaucacauggggaucuguucuugcggacuuuauaagcacccgggcgugcccguaaaauggaagagaugaggacuaguaauaaggaaacuguaugaaugucugugggcaggaagugaagagauccuucuguaaagguuuuuggaauuaugucugcugaauaauaaacuuuuuugaaauaauaaaucugguagaaaaaugagaucuaaaaaaaaaaaaaaaaaaaaaaaaaaaaaaaaaaaaaaaaaaaaaaaaaaaaaaaaaaaaaaaaugcaucccccccccccccccccccccccccccccccaaaggcucuuuucagagccaccagaauu

SEQ ID NO: 2912 - RNA, 1813 nt, Artificial Sequence
  mRNA product Design b-4 comprising derived and/or modified sequence from LASV(LASV221-NIG-2010;Clade II)__AIT17624__GPC (opt3)
gggagagucccgcagucggcguccagcggcucugcuuguucgugugugugucguugcaggccuuauucaagcuuaccaugggccagaucauuaccuucuuucaagaggugccccacgucauagaagagguuaugaacaucgugcugauugcccucagccuucuggcuaucuugaaggggauuuacaauguagcaacaugcggauuauucggucugguguccuuucuacuccuguguggcagaucuugcucaacuacguauaaaggggucuacgaacuucagacccuggaguuggacauggccagucucaacaugacaaugccucugagcuguacuaagaauaacucccaucacuauaucauggugggaaaugaaaccggccuggagcucacauuaaccaacacuucuauaaucaaucauaaauucugcaaccugucggaugcgcacaagaaaaaucuuuacgaccaugcuuugaugucaauuaucagcacauuucaccugaguauuccaaacuucaaucaguaugaggccauguccugugauuuuaacggugggaagaucucuguucaguacaaucuaagccacaccuaugcaauagacgccgcuaaccauugcggaacgauugcaaauggcgugcuccaaacuuucaugaggauggccuggggcggguccuacaucgcucuggauucaggaaaggguaguugggacuguauuaugaccagcuaccaguaucuuaucauccagaacacaacuugggaagaucacugccaguuuucucggccgucccccauuggcuaccugggguugcucucacaacgcacccgagacauauauaucagccguagacuguuaggaacauucaccuggacgcugagugauucugagggcaacgaaacuccugguggguacugucucacaagguggaugcuuauugaggccgagcugaaaugcuuuggaaauaccgcggucgcaaaguguaacgaaaaacaugacgaggaguucugcgauauguugcggcuauuugacuucaauaagcaggccauccgcagacugaaaacugaagcucagauguccauacagcucauuaacaaggccgugaaugcacugaucaacgaucaacuuaucaugaagaaucaccugagggacauuaugggcaucccauauugcaacuacagcaaauauugguacuugaaucacacaguaaccggcaagacgucgcucccccgguguuggcugguuucuaacggguccuacuuaaaugaaacccauuucucagacgauauugagcagcaggcugacaacaugauaacagagaugcugcaaaaagaauauauggaucgccagggaaagacuccucuaggucucguggaccuguuugucuucaguaccagcuuuuaccuuaucuccauuuucuugcaccuggugaaaaucccaacacaucgacacgugaucggcaagcccugcccuaaaccacauagacucaaucacauggggauuuguucuugcggacuguauaagcacccgggcguccccguuaaguggaaaaggugaggacuaguaauaaggaaacuguaugaaugucugugggcaggaagugaagagauccuucuguaaagguuuuuggaauuaugucugcugaauaauaaacuuuuuugaaauaauaaaucugguagaaaaaugagaucuaaaaaaaaaaaaaaaaaaaaaaaaaaaaaaaaaaaaaaaaaaaaaaaaaaaaaaaaaaaaaaaaugcaucccccccccccccccccccccccccccccccaaaggcucuuuucagagccaccagaauu

SEQ ID NO: 2913 - RNA, 1813 nt, Artificial Sequence
  mRNA product Design b-4 comprising derived and/or modified sequence from LASV(LASV237-NIG-2010;Clade II)__AIT17638__GPC (opt3)
gggagagucccgcagucggcguccagcggcucugcuuguucgugugugugucguugcaggccuuauucaagcuuaccaugggccagaucauuaccuucuuucaagaggugccccacgucauagaagagguuaugaacaucgugcugauugcccucagccuucuggcuaucuugaaggggauuuacaauguagcaacaugcggauuauucggucugguguccuuucuacuccuguguggcagaucuugcucaacuacguauaaaggggucuacgaacuucagacccuggaguuggacauggccagucucaacaugacaaugccucugagcuguacuaagaauaacucccaucacuauaucauggugggaaaugaaaccggccuggagcucacauuaaccaacacuucuauaaucaaucauaaauucugcaaccugucggaugcgcacaagaaagaccuuuacgaucaugcuuugaugucaauuaucagcacauuucaccugaguauuccaaauuucaaccaguaugaggccauguccugugacuuuaauggugggaagaucucuguucaguacaaccuaagccacaccuaugcaguggaugccgcuaaucauugcggaacgauagcaaacggcguccuccaaacuuucaugaggauggccuggggcggguccuacauugcucuggacucaggaaaggguaguugggauuguaucaugaccagcuaccaguaucuuauuauccagaauacaacuugggaagaccacugccaguuuucucggccgucccccaucggcuaccugggguugcucucacaacgcacccgagauauuuauauaagccguagacuguuaggaacauucaccuggacgcugagugacucugagggcaacgaaacuccugguggguacugucucacaagguggaugcuuaucgaggccgagcugaaaugcuuuggaaacaccgcgguggcaaaguguaaugaaaaacaugaugaggaguucugcgacauguugcggcuauuugauuucaacaagcaggccauucgcagacugaaaacugaagcucagauguccauccagcucauaaauaaggccguaaacgcacugauuaaugaccaacuuaucaugaagaaccaccugagggacaucaugggcauuccauauugcaauuacagcaaauauugguacuugaaccacacaguuaccggcaagacgucgcucccccgguguuggcuggugucuaauggguccuacuuaaacgaaacccauuucucagaugacaucgagcagcaggcugauaauaugauuacagagcugcuacaaaaagaauauauggaccgccagggaaagacuccucucggucuggucgaucuuuuuguguucaguaccagcuuuuacuugauauccaucuuccugcaccucauuaaaaucccaacacaucgacacaucacuggcaagcccugcccuaaaccacauagacugaaccacauggggauuuguucuugcggacuuuauaagcacccgggcgugcccgucaaguggaaaaggugaggacuaguaauaaggaaacuguaugaaugucugugggcaggaagugaagagauccuucuguaaagguuuuuggaauuaugucugcugaauaauaaacuuuuuugaaauaauaaaucugguagaaaaaugagaucuaaaaaaaaaaaaaaaaaaaaaaaaaaaaaaaaaaaaaaaaaaaaaaaaaaaaaaaaaaaaaaaaugcaucccccccccccccccccccccccccccccccaaaggcucuuuucagagccaccagaauu

SEQ ID NO: 2914 - RNA, 1813 nt, Artificial Sequence
  mRNA product Design b-4 comprising derived and/or modified sequence from LASV(LASV253-NIG-2011;Clade II)__AIT17670__GPC (opt3)
gggagagucccgcagucggcguccagcggcucugcuuguucgugugugugucguugcaggccuuauucaagcuuaccaugggccagaucauuaccuucuuucaagaggugccccacgucauagaagagguuaugaacaucgugcugauugcccucagccuucuggcuaucuugaaggggauuuacaauguagcaacaugcggauuauucggucugguguccuuucuacuccuguguggcagaucuugcucaacuacguauaaaggggucuacgaacuucagacccuggaguuggacauggccagucucaacaugacaaugccucugagcuguacuaagaauaacucccaucacuauaucauggugggaaaugaaaccggccuggagcucacauuaaccaacacuucuauaaucaaucauaaauucugcaaccugucggaugcgcacaagaaaaaucuuuacgaccaugcuuugaugucaauuaucagcacauuucaccugaguauuccaaacuucaaucaguaugaggccauguccugugauuuuaacggugggaagaucucuguucaguacaaucuaagccacaccuaugcaguggacgccgcuaaccauugcggaacgauagcaaauggcguccuccaaacuuucaugaggauggccuggggcggguccuacauugcucuggauucaggaaaggguaguugggacuguaucaugaccagcuaccaguaucuuauuauccagaacacaacuugggaagaucacugccaguuuucucggccgucccccaucggcuaccugggguugcucucacaacgcacccgagacauuuauauaagccguagacuguuaggaacauucaccuggacgcugagugauucugagggcaacgaaacuccugguggguacugucucacaagguggaugcuuaucgaggccgagcugaaaugcuuuggaaauaccgcgguggcaaaguguaacgaaaaacaugacgaggaguucugcgauauguugcggcuauuugacuucaauaagcaggccauucgcagacugaaagcugaagcccagauguccauccagcucauaaacaaggcaguaaaugcucugauuaacgaucaacuuaucaugaagaaucaccugagggacaucaugggcauuccauauugcaacuacagcaaauauugguacuugaaucacacuguuacaggccggaccucgcucccccgcuguuggcuggugucuaacggguccuacuuaaaugaaacgcauuucucagacgauaucgagcagcaggccgacaacaugauuaccgagcugcuacaaaaggaauauauagaucgacagggaaaaacaccucucggucuggucgaccuuuuuguguucaguacuagcuuuuacuugaucuccauuuuccugcaccucgugaagaucccaacccauagacacaucauuggcaaacccugcccuaagccacauaggcugaaucacauggggauauguucuugcggacuuuauaaacacccgggcguccccguuaaguggaagcggugaggacuaguaauaaggaaacuguaugaaugucugugggcaggaagugaagagauccuucuguaaagguuuuuggaauuaugucugcugaauaauaaacuuuuuugaaauaauaaaucugguagaaaaaugagaucuaaaaaaaaaaaaaaaaaaaaaaaaaaaaaaaaaaaaaaaaaaaaaaaaaaaaaaaaaaaaaaaaugcaucccccccccccccccccccccccccccccccaaaggcucuuuucagagccaccagaauu

SEQ ID NO: 2915 - RNA, 1813 nt, Artificial Sequence
  mRNA product Design b-4 comprising derived and/or modified sequence from LASV(LASV254-NIG-2011;Clade II)__AIT17674__GPC (opt3)
gggagagucccgcagucggcguccagcggcucugcuuguucgugugugugucguugcaggccuuauucaagcuuaccaugggccagaucauuaccuucuuucaagaggugccccacgucauagaagagguuaugaacaucgugcugauugcccucagccuucuggcuaucuugaaggggauuuacaauguagcaacaugcggauuauucggucugguguccuuucuacuccuguguggcagaucuugcucaacuacguauaaaggggucuacgaacuucagacccuggaguuggacaugacaaaccucaauaugacuaugccucugaguuguaccaagaacaauagccaucacuauaucauggugggaaacgaaacaggccuggagcucaccuuaacuaauacauccauaaucaaccauaaauucugcaaucugucugaugcccacaagaaaaaccuuuacaaucaugcguugaugucgauuaucucaaccuuucaccugagcauuccaaacuucaaucaguaugaggcuaugaguugugacuuuaacggugggaagaucuccguucaguacaaucuaucucacagcuaugccguggaugcagccaaccauugcggaacgauagcuaacggcguccuccaaacuuucaugaggauggcauggggcggguccuacauugcccuggacucaggaaaggguaauugggauuguaucaugaccaguuaccaguaucuuauuauccagaacacaacuugggaagaccacugccaguuuagccggccgucucccaucggcuaccugggguugcucucccaacgcacccgagauauuuauauaucacguagacuguuaggaacauucaccuggacgcugagcgacagugagggcaaugaaacuccugguggguacugucucacaagguggaugcuuaucgaggcugagcugaaaugcuuuggaaacaccgccguggcgaaguguaaugaaaaacaugaugaggaguucugcgacauguugcggcuauuugauuucaacaagcaggcaauucgcagacugaaaacugaagcccaggcuaauauccagcucauaaacaaggccguaaaugcacugauuaacgaccaacuuaucaugaagaaucaccugagggauaucaugggcauuccauauugcaacuacucuaaauauugguacuugaaucacacaguuaccggcaagacgucccucccccgguguuggcuggugagcaacgggucguacuuaaaugaaacccauuucucugacgacaucgagcagcaggcugauaacaugauuacagagcugcuacaaaaagaauauauggaccgccagggaaagacuccucucggucuggucgaucuuuuuguguucuccaccucauuuuacuugauaaguaucuuccugcaccucgugaaaauuccaacacaucgacacgucaucggcaagcccugcccuaaaccacauagacugaaccacauggggaucuguagcugcggacuuuauaagcacccgggcguucccgugaaguggaaaaggugaggacuaguaauaaggaaacuguaugaaugucugugggcaggaagugaagagauccuucuguaaagguuuuuggaauuaugucugcugaauaauaaacuuuuuugaaauaauaaaucugguagaaaaaugagaucuaaaaaaaaaaaaaaaaaaaaaaaaaaaaaaaaaaaaaaaaaaaaaaaaaaaaaaaaaaaaaaaaugcaucccccccccccccccccccccccccccccccaaaggcucuuuucagagccaccagaauu

SEQ ID NO: 2916 - RNA, 1813 nt, Artificial Sequence
  mRNA product Design b-4 comprising derived and/or modified sequence from LASV(Nig08-A19;Clade III)__ADU56618__GPC (opt3)
gggagagucccgcagucggcguccagcggcucugcuuguucgugugugugucguugcaggccuuauucaagcuuaccaugggccagaucgugaccuucuuucaagaggucccccacguuauugaagaggugaugaacauaguacugaucgcccucagcauucuugcuauccugaagggguuguacaauauugcaacaugcggauuaaucggucuggugacuuuccuacuccuguccggcagaucuuguucaaugacguauaaaggggucuacgaacuucagacccuggaguugaacaugaauacacucaacaugacuaugccucugaguugcaccaagaauaacagccaucacuauauaauggugggaaaugaaacaggccuggagcucaccuuaacuaacacaucccugcuucaucacaaauuuuguaauuugucugacgcccauaagaaaaaccuguacgaucacacccuaaugucgaucauuucaacguuccaccucagcaucccaaauuuuaaccaguaugaggcgaugaguugcgacuucaauggugggaagauuacuguucaguacaaccugucccauucuuaugcuaucgaugccgcaaaucacuguggaaccguggccaacggcguccuucaaacauuuaugaggauggcuuggggcgggagcuacauagcacuggacuccggacgggguaagugggauugcauuaugacuucauaccaguauuugaucauucagaacaccacaugggaagaccauugucaguucagucgcccgagccccaucggcuaccucgggcuguuaucucaacgaacccgugauaucuauauuuccagaaggcugcucggaacguuuacuuggacacuuucagacagcgagggcaaugaaaccccugguggguacugccugacucgguggauguugauagaggccgagcuaaaauguuucggaaacacagcuguggccaagugcaaugaaaaacacgaugaggaauuuugugacaugcugcgccucuucgauuuuaacaagcaggcgaucagaaggcugaaagcagaggcccagaugaguauucagcuuaucaauaaggcuguaaacgcccugauaaaugaccaauugauuaugaagaaccaccuccgggauaucaugggcaucccauauugcaauuacucuaaauauugguaccugaaccauaccuccacgggccgcaccagcuuaccccgaugcuggcugguuucgaaugggucuuaccuaaacgaaacacacuucuccgacgacauugagcagcaggcagauaauaugaucacugagaugcuccaaaaggaauaucuggacagacagggaaaaaccccucuugguuugguggaucuguucgucuuuucaacaaguuucuaccucauuagcauauuucugcaucuugugaagaucccaacucacaggcauauugugggcaaacccuguccuaagccacaccggcugaaccacauggggaucugcuccuguggauuguauaaacagccgggcguccccguucguuggaagcgcugaggacuaguaauaaggaaacuguaugaaugucugugggcaggaagugaagagauccuucuguaaagguuuuuggaauuaugucugcugaauaauaaacuuuuuugaaauaauaaaucugguagaaaaaugagaucuaaaaaaaaaaaaaaaaaaaaaaaaaaaaaaaaaaaaaaaaaaaaaaaaaaaaaaaaaaaaaaaaugcaucccccccccccccccccccccccccccccccaaaggcucuuuucagagccaccagaauu

SEQ ID NO: 2917 - RNA, 1816 nt, Artificial Sequence
  mRNA product Design b-4 comprising derived and/or modified sequence from LASV(G1180-SLE-2010;Clade IV)__AIT17168__GPC (opt3)
gggagagucccgcagucggcguccagcggcucugcuuguucgugugugugucguugcaggccuuauucaagcuuaccaugggccagaucgugaccuucuuucaagaggucccccacguuauugaagaggugaugaacauaguacugaucgcccucagcauucuugcugugcugaagggguuguacaauuucgcaacaugcggauuagucggucugcuaacuuuucuccugcuuuguggcagauccugcacggccucuagguauaaagggguguacgaacugcagaccuuggagcucaacauggaaacacugaauaugacuaugccucugucauguaccaagaacaauagucaucacuauaucaugguuggaaacgagacaggccucgaguuaacccugacuaauacaagcauuaucaaccauaaauucugcaaucuuuccgacgcgcacaagaaaaacuuguacgaucaugcucugaugucuauaaucucgaccuuucaccuaucaauuccaaauuucaaccaguaugaagccaugagcugugacuuuaauggugggaagaucagugugcaguacaaccucucccacucuuaugcaggagaugccgcuaaucauugcggcacggucgcaaacggcgugcugcaaacuuucaugcggauggccuggggagggagcuacauugcucuugacuccggucacggcucaugggauuguaucaugaccaguuaccaguaucugauaauucagaacacaacuugggaggaccauugccaguuuagccgcccgucucccaucggguacuugggacuccugucccaacgaacccgugauauuuauaucucaagaagguuacugggcacauucaccuggacgcucagcgacagugaagguaaggauacuccugggggauacugucuuacacgguggaugcugaucgaggccgaguugaaaugcuuuggcaauaccgcgguagcaaaguguaacgaaaaacacgacgaggaguucugcgauaugcuacgccuguuugacuucaauaagcaggccauucagagacucaaagcugaagcccagaugucuauacaacugaucaacaaggcaguuaaugcucuuauuaacgaucagcugaucaugaagaaucacuugagggacauaaugggcauuccauauugcaacuacuccaaauauugguaccucaaucauacuacaaccgggaagacgagccugcccaaauguugguuagugucgaacggaucuuaccugaaugaaacccacuucuccgacgauaucgagcagcaagccgacaacaugaucacagagaugcuacagaaggaauauauggagcggcaggguaaaacuccucucggccuggucgaucuuuuuguguucucaaccaguuuuuacuugauuagcaucuuccugcaucucgugaagauuccaacacaccgccauauagucgggaaauccugccccaagccucaccgacugaaucacaugggaaucuguucuugcggccuuuauaagcagccagguguuccggugaaauggaagagaugaggacuaguaauaaggaaacuguaugaaugucugugggcaggaagugaagagauccuucuguaaagguuuuuggaauuaugucugcugaauaauaaacuuuuuugaaauaauaaaucugguagaaaaaugagaucuaaaaaaaaaaaaaaaaaaaaaaaaaaaaaaaaaaaaaaaaaaaaaaaaaaaaaaaaaaaaaaaaugcaucccccccccccccccccccccccccccccccaaaggcucuuuucagagccaccagaauu

SEQ ID NO: 2918 - RNA, 1816 nt, Artificial Sequence
  mRNA product Design b-4 comprising derived and/or modified sequence from LASV(G1442-SLE-2011;Clade IV)__AIT17180__GPC (opt3)
gggagagucccgcagucggcguccagcggcucugcuuguucgugugugugucguugcaggccuuauucaagcuuaccaugggccagaucgugaccuucuuucaagaggucccccacguuauugaagaggugaugaacauaguacugaucgcccucagcauucuugcugugcugaagggguuguacaaugucgcaacaugcggauuaaucggucuggugacuuuccuacuccuguguggcagauccugcacgaccacacuuuauaaagggguuuacgaacugcagacuuuggagcucaacauggaaacccugaauaugacaaugccucugucuuguaccaagaacaauucacaucacuauauuagggugggaaacgagacuggccucgaguuaacacugaccaauacgaguaucauaaaccauaaauuuugcaaucuuagcgacgcccacaagaaaaacuuguacgaucaugcgcugauguccaucauuucuacuuuccaccuaucgaucccaaauuuuaaccaguaugaagcuaugucaugugacuucaauggugggaagauuagcguccaguacaaccucagucacuccuaugccggagaugcagccaaucauugcggcaccguggcuaacggcguacugcaaacauuuaugcggauggcauggggagggucuuacaucgcccuugacagcggucgcggcaacugggauuguauaaugacuuccuaccaguaucugauuauccagaauaccacaugggacgaucacugccaguucucacgaccgagucccauuggguacuugggacuccugagccaacguaccagagacguuuauaucucuaggcgguuacugggcacguuuacuuggacacucuccgauucagaggguaaggacaccccugggggauacugucuuacucgcuggaugcugaucgaagcugaguugaaaugcuucggcaacacagccguggcgaaguguaaugagaaacaugaugaagaguuuugcgacaugcuaagacuguucgauuuuaacaagcaggcaauucagaggcucaaagccgaagcucagaugagcauacaacugaucaauaaggccgucaacgcacuuauuaaugaccagcugaucaugaagaaccacuugcgggacauaaugggcauuccauauugcaauuacaguaaauauugguaccucaacaauaccgcuacggggaagaccucucugcccaaauguugguuaaucuccaacggaagcuaccugaaugagacacacuucucggaugacaucgaacaggaggccgauaacaugauuacugagaugcuacaaaaggaauauauggagcgccaggguaaaaccccucucggccugguggaccuuuucguguuuucuacauccuucuacuugaucucaauuuuucugcaucucgucaagauaccaacucaccgacauaucguugggaaaaguugccccaagccucacagacugaaucauaugggaauuuguagcugcggccuuuauaagcagccaggugugccgguaagguggaaacggugaggacuaguaauaaggaaacuguaugaaugucugugggcaggaagugaagagauccuucuguaaagguuuuuggaauuaugucugcugaauaauaaacuuuuuugaaauaauaaaucugguagaaaaaugagaucuaaaaaaaaaaaaaaaaaaaaaaaaaaaaaaaaaaaaaaaaaaaaaaaaaaaaaaaaaaaaaaaaugcaucccccccccccccccccccccccccccccccaaaggcucuuuucagagccaccagaauu

SEQ ID NO: 2919 - RNA, 1816 nt, Artificial Sequence
  mRNA product Design b-4 comprising derived and/or modified sequence from LASV(G3010-SLE-2013;Clade IV)__AIT17344__GPC (opt3)
gggagagucccgcagucggcguccagcggcucugcuuguucgugugugugucguugcaggccuuauucaagcuuaccaugggccagaucgugaccuucuuucaagaggucccccacguuauugaagaggugaugaacauaguacugaucgcccucagcauucuugcugugcugaagggguuguacaauuucgcaacaugcggauuagucggucuggugacuuuucuacuccuguguggcagauccugcacgaccucucuuuauaaagggguuuacgaacugcagacauuggagcucaacauggaaacucugaauaugaccaugccucugucauguacaaagaacaauagucaucacuauaucauggugggaaacgagaccggccucgaguuaacucugacaaauaccagcauuaucaaccauaaauucugcaaucuuuccgacgcccacaagaaaaacuuguacaaucaugcgcugaugucuauaaucucgacguuucaccuaucaauuccaaacuucaaucaguaugaagcuaugagcugugauuuuaacggugggaagaucaguguccaguacaaucucucccacucuuaugccggagacgcagccagccauugcggcacuguggcuaacggcguacugcaaaccuucaugaggauggcauggggaggguccuacauugcccuugauucagguuacggcaagugggacuguaucaugacaaguuaucaguaccugauaauucagaacacuaccugggaggaucacugccaguuuagccggccgucucccaucggguauuugggacuccugucccaacgcacacgagacauuuacaucucacguagauuacugggcaccuucacguggacucucagcgauagugaagguaaagacacaccugggggauauugucuuaccagguggaugcugaucgaggcugaguugaagugcuuuggcaauacugccguugcgaaauguaacgaaaagcaugaugaggaguucugcgacaugcuacggcuguuugauuucaauaaacaggcaauucagcgccucaagacagaagcccagaugucuauacaacugaucaacaaggcugugaaugcccuuauuaacgaccagcugaucaugaaaaaucacuugagagauauaaugggcauuccauacugcaacuauuccaaguacugguaccucaaucacaccacgaccgggaaaacaagccugcccaaguguugguuagucucgaacggaucuuaucugaaugaaacucauuucuccgacgacaucgagcagcaagcagauaacaugaucaccgagaugcuacagaaagaauacauggagaggcaggguaagacaccucucggccugguggaccuuuuuguguucucaaccaguuuuuauuugauuagcaucuuccugcaccucgucaaaauuccaacucaucggcacauaguugggaaguccugccccaagccucaucgccugaaucacaugggaaucuguucuugcggccuuuacaaacagccaggugugccgguacgauggaagagaugaggacuaguaauaaggaaacuguaugaaugucugugggcaggaagugaagagauccuucuguaaagguuuuuggaauuaugucugcugaauaauaaacuuuuuugaaauaauaaaucugguagaaaaaugagaucuaaaaaaaaaaaaaaaaaaaaaaaaaaaaaaaaaaaaaaaaaaaaaaaaaaaaaaaaaaaaaaaaugcaucccccccccccccccccccccccccccccccaaaggcucuuuucagagccaccagaauu

SEQ ID NO: 2920 - RNA, 1816 nt, Artificial Sequence
  mRNA product Design b-4 comprising derived and/or modified sequence from LASV(G502-SLE-2009;Clade IV)__AIT17126__GPC (opt3)
gggagagucccgcagucggcguccagcggcucugcuuguucgugugugugucguugcaggccuuauucaagcuuaccaugggccagaucgugaccuucuuucaagaggucccccacguuauugaagaggugaugaacauaguacugaucgcccucagcauucuugcugugcugaagggguuguacaauuucgcaacaugcggauuagucggucugcuaacuuuucuccugcuuuguggcagauccugcacgaccgggcuguauaaaggaguguacgaauugcagacacucgagcugaacauggaaacucugaauaugaccaugccucucucuuguacaaagaacaauucacaucacuauaucaugguuggcaacgagaccgguuuagagcugacucuuacaaauaccaguauuaucaaccauaaauucugcaauuugagcgacgcccacaagaaaaaccuguacgaucaugcgcuaauguccauaaucucuacguuucaccucucgauuccaaauuucaaccaguaugaagcuaugucaugugacuuuaaugggggaaagaucagcgugcaguacaaccugagucacuccuaugccggcgaugcagccgaccauugcggcacugucgcuaauggggugcuucaaaccuucaugaggauggcauggggagguucuuacauugcccuggauagcggccgggggcgcugggacuguaucaugacauccuaccaguauuugauaauucagaacacuaccugggaggaucacugccaguuuucacgaccgagucccaucggauaccucggccuguuaagccaacguacaagagacauuuauaucucuaggcggcugcucgguaccuucacguggacucuuuccgauucagaagggaaggacacaccuggaggcuacugucugacccgcuggauguugaucgaggcugagcuaaaaugcuuuggcaacacugccguagcgaaguguaaugaaaaacaugaugaggaguucugcgacaugcugagacucuuugauuucaacaagcaggcaauucagaggcugaaagccgaagcucagaugagcauacaacuuaucaauaaggccguuaacgcacugauuaaugaccaguuggugaugaagaaccaccuccgggacaucauggggauaccauauugcaauuacagucgcuauugguaccugaaccacacaaccacgggacgaaccucuuuacccaaauguuggcuggucuccaaugguagcuaccuaaacgaaacacauuucucggaugacauugagcagcaagcugauaauaugaucacugagaugcuccagaaggaauauauggagagacagggcaaaaccccucuggggcuuguggacuuguuuguguucucuacauccuuuuaccugaucucaauuuuccuccaccuggucaagaucccaacucauaggcacauuguuggaaaaaguugccccaagccucaucggcuuaaccacaugggcauauguagcugcggucuguauaaacagccaggggugccgguaaaguggaagcguugaggacuaguaauaaggaaacuguaugaaugucugugggcaggaagugaagagauccuucuguaaagguuuuuggaauuaugucugcugaauaauaaacuuuuuugaaauaauaaaucugguagaaaaaugagaucuaaaaaaaaaaaaaaaaaaaaaaaaaaaaaaaaaaaaaaaaaaaaaaaaaaaaaaaaaaaaaaaaugcaucccccccccccccccccccccccccccccccaaaggcucuuuucagagccaccagaauu

SEQ ID NO: 2921 - RNA, 1816 nt, Artificial Sequence
  mRNA product Design b-4 comprising derived and/or modified sequence from LASV(G733-SLE-2010;Clade IV)__AIT17154__GPC (opt3)
gggagagucccgcagucggcguccagcggcucugcuuguucgugugugugucguugcaggccuuauucaagcuuaccaugggccagaucgugaccuucuuucaagaggucccccacguuauugaagaggugaugaacauaguacugaucgcccucagcauucuugcugugcugaagggguuguacaauuucgcaacaugcggaaucgucgguuuaguguccuuucugcuacucuguggcagaucuugcacuacgucacuguauaaagggguuuacgaacuucagacccuggaguugaacauggaaacacucaauaugacuaugccucugaguuguaccaagaacaauagccaucacuauauuauggugggaaacgagacaggccuggagcucaccuuaacuaauacauccaucauaaaccauaaauucugcaaucugucugacgcccacaagaaaaaccuuuacgaucaugcguugaugucgaucauuucaaccuuucaccugagcaucccaaauuucaaccaguaugaagcuaugaguugugacuuuaauggugggaagauuuccguccaguacaaccuaucucacagcuaugccggagaugcagccaaucauugcggcacgaucgcuaacggcgugcuccaaacuuucaugaggauggcauggggaggguccuacauagcccuggacucaggucgggaucgcugggacuguauuaugaccaguuaccaguaucuuaucauucagaacacaacuugggaggaucacugccaguuuagccgaccgucucccaucggcuaccugggguugcucucccaacguaccagagacaucuauauuucaaggcggcuguuaggaacauucaccuggacgcugagcgauagugaaggcaaggacacuccugguggguacugucucacacgcuggaugcuuauagaggcugagcugaaaugcuuuggaaauaccgccguagcgaaguguaacgaaaaacaugaugaggaguucugcgacauguugagacuauuugauuucaauaagcaggcaauccagaggcugaaagccgaagcucagaugucuauucaacucaucaacaaggccguuaaugcacugauaaacgaccagcuuauuaugaagaaucaucugcgggacaucaugggcaucccauauugcaacuacuccaaauauugguacuugaaucacacuacaaccggcaagacgagccuccccaaauguuggcuggugucgaacgggucuuacuuaaaugaaacccacuucuccgaugacauugagcagcaagcugauaacaugaucacagagaugcugcagaaggaauauauggagcgccagggaaaaacuccucuaggucucgucgaccuguuuguguucucaaccaguuuuuaccuuauuagcauauucuugcaccuggugaagaucccaacacaucgacacgucguuggcaaauccugccccaagccucauagacucaaucacauggggauuuguucuugcggacuguauggccagccaggugugccgguaaaguggaaaaggugaggacuaguaauaaggaaacuguaugaaugucugugggcaggaagugaagagauccuucuguaaagguuuuuggaauuaugucugcugaauaauaaacuuuuuugaaauaauaaaucugguagaaaaaugagaucuaaaaaaaaaaaaaaaaaaaaaaaaaaaaaaaaaaaaaaaaaaaaaaaaaaaaaaaaaaaaaaaaugcaucccccccccccccccccccccccccccccccaaaggcucuuuucagagccaccagaauu

SEQ ID NO: 2922 - RNA, 1816 nt, Artificial Sequence
  mRNA product Design b-4 comprising derived and/or modified sequence from MOPV/LASV reassortant(IGS-1;Clade IV)__AFY05576__GPC (opt3)
gggagagucccgcagucggcguccagcggcucugcuuguucgugugugugucguugcaggccuuauucaagcuuaccaugggccagaucgugaccuucuuucaagaggucccccacguuauugaagaggugaugaacauaguacugaucgcccucagcgugcuugcuguccugaagggguuguacaauuucgcaacaugcggauuagugggucugguuacuuuucuacuccuguguggcagauccugcacgaccucucuuuauaaagggguguacgaacugcagacauuggagcucaacauggaaacucugaauaugaccaugccucugucauguacaaagaacaauagucaucacuauauuauggucggaaacgagaccggccucgaguuaacucugacaaauaccagcaucauuaaccauaaauucugcaaucuuuccgacgcccacaagaaaaacuuguacgaucaugcgcugaugucuaucauaucgacguuucaccuaucaaucccaaauuucaaccaguaugaagcuaugagcugugacuuuaauggugggaagauuagugugcaguacaaccucucccacucuuaugccggagaugcagccaaucauugcggcacuguagcuaacggcguucugcaaaccuucaugaggauggcauggggagggagcuacaucgcccuugacuccggucggggcaacugggauuguauuaugacaucauaccaguaucugaucauacagaauacuaccugggaggaccacugccaguuuagucgcccgagccccauuggguacuugggacuccugucucaacgaacacgugauaucuauauuuccagaagguuacugggcaccuucacguggacucucucagacagcgaaggugaggauacaccugggggauacugucuuacccgguggaugcugaucgaggcugaauugaagugcuuuggcaacacugccguggcgaaauguaaugagaagcaugacgaagaguucugcgauaugcuacgccuguuugacuucaacaaacaggcaauccagagacucaaggccgaagcucagaugaguauucaacugauaaauaaagccgucaacgcacuuaucaaugaucagcugauuaugaagaaccacuugagggacaucaugggcauaccauauugcaauuacucuaaguauugguaccucaaccacacaaccacggggcggaccucccugcccaaauguugguuagugagcaauggaucguaccugaacgagacacauuucucugacgauauugagcagcaagcugacaauaugaucacugaaaugcuacagaaggaguauauggaacgccaggguaaaaccccucucggccugguggaucuuuuugucuucuccacaucauuuuacuugaucaguauuuuccugcaccucguuaagaucccaacucaucgacacauuguggggaaaagcugccccaagccucauagacugaaccacaugggaauauguuccugcggccuuuauaaacagccagguguaccggugaaguggaagaggugaggacuaguaauaaggaaacuguaugaaugucugugggcaggaagugaagagauccuucuguaaagguuuuuggaauuaugucugcugaauaauaaacuuuuuugaaauaauaaaucugguagaaaaaugagaucuaaaaaaaaaaaaaaaaaaaaaaaaaaaaaaaaaaaaaaaaaaaaaaaaaaaaaaaaaaaaaaaaugcaucccccccccccccccccccccccccccccccaaaggcucuuuucagagccaccagaauu

SEQ ID NO: 2923 - RNA, 1816 nt, Artificial Sequence
  mRNA product Design b-4 comprising derived and/or modified sequence from LASV(LM765-SLE-2012;Clade IV)__AIT17814__GPC (opt3)
gggagagucccgcagucggcguccagcggcucugcuuguucgugugugugucguugcaggccuuauucaagcuuaccaugggccagaucgugaccuucuuucaagaggucccccacguuauugaagaggugaugaacauaguacugaucgcccucagcauucuugcugugcugaagggguuguacaauuucgcaacaugcggauuagucggucuggugacuuuucuacuccuguguggcagauccugcacgaccucucuuuauaaagggguuuacgaacugcagacauuggagcucaacauggaaacucugaauaugaccaugccucugucauguacaaagaacaauagucaucacuauaucauggugggaaacgagaccggccucgaguuaacucugacaaauaccagcauuaucgaccauaaauucugcaaccuuuccgaugcccacaggaagaauuuguacgaccaugcgcugaugucuauaaucucgacguuucaccuaucaauuccaaacuucaaucaguaugaagcuaugagcugugauuuuaacggugggaaaaucaguguccaguacaaucucucccacucuuaugccaaggacgcagccgaucauugcggaacuguggcuaacggcguacugcaaaccuucaugcggauggcauggggcgggagcuacauugcccuugacuccggacgcggucgaugggauuguaucaugacaucauaccaguaucugauaauucagaauacuaccugggaggaccacugccaguuuagucguccgagccccaucggcuacuuggggcuccugucucaaagaacaagggauauuuauaucucccggcgcuuacugggaaccuucacguggacucucucagacagcgaaggcaaggauacaccugguggguacugucuuaccagauggaugcugaucgaggcugaguugaaaugcuuuggaaacacugccguugcgaaguguaacgaaaaacaugacgaggaguucugcgauaugcuaaggcuguuugacuucaauaagcaggcaauucagcggcucaaagccgaagcucagaugaguauacaacugaucaacaaggccgugaaugcacuuauuaacgaccagcugaucaugaagaaucacuugcgcgauauaaugggcauuccauauugcaacuacucuaaauauugguaccucaaucacacaaccacgggcaagaccucccugcccaaauguugguuagucagcaacgggucguaccugaaugaaacacauuucucugacgauaucgagcagcaagcugacaacaugaucacugagaugcuacagaaggaauauauggagcgacagggaaaaaccccucucggucugguggaucuuuuuguguucuccacaucauuuuacuugauuaguaucuuccugcaccucgucaagauuccaacucauagacacauaguuggcaaacccugcccuaagccacauaggcugaaucacauggggaucuguagcugcggacuuuauaagcagccgggcgugcccguaaaauggaagcggugaggacuaguaauaaggaaacuguaugaaugucugugggcaggaagugaagagauccuucuguaaagguuuuuggaauuaugucugcugaauaauaaacuuuuuugaaauaauaaaucugguagaaaaaugagaucuaaaaaaaaaaaaaaaaaaaaaaaaaaaaaaaaaaaaaaaaaaaaaaaaaaaaaaaaaaaaaaaaugcaucccccccccccccccccccccccccccccccaaaggcucuuuucagagccaccagaauu

SEQ ID NO: 2924 - RNA, 1816 nt, Artificial Sequence
  mRNA product Design b-4 comprising derived and/or modified sequence from LASV(LM776-SLE-2012;Clade IV)__AIT17824__GPC (opt3)
gggagagucccgcagucggcguccagcggcucugcuuguucgugugugugucguugcaggccuuauucaagcuuaccaugggccagaucgugaccuucuuucaagaggucccccacguuauugaagaggugaugaacauaguacugaucgcccucagcauucuugcugugcugaagggguuguacaauuucgcaacaugcggauuagucggucuggugacuuuucuacuccuguguggcagauccugcacgaccucuguuuauaaagggguguacgaacuucagacacuggaguugaacauggaaacucucaauaugaccaugccucugucauguacaaagaacaauagucaucacuauaucauggucggaaacgagaccggccuggagcucacuuuaacaaauaccagcauuaucaaccauaaauucugcaaucuguccgacgcccacaagaaaaaccuuuacgaucaugcguugaugucuauaaucucgacguuucaccugucaauuccaaauuucaaccaguaugaagcuaugagcugugacuuuaauggugggaagaucagugugcaguacaaccuaucccacucuuaugccggagaugcagccaaucauugcggcacuguagcuaacggcguucuccaaaccuucaugaggauggcauggggagggagcuacauugcccuggacuccggucacggcaagugggauuguaucaugacaucauaccaguaucuuauaauucagaacacuaccugggaggaccauugccaguuuagucggccgagccccaucggguaccugggauugcucucucaacgcacacgagauauuuauaucucccguagacuguuaggcaccuucacguggacucugucagacagcgaagguaaagauacaccugggggauacugucucaccagguggaugcuuaucgaggcugagcugaagugcuuuggcaauacugccguggcgaaauguaacgaaaagcacgacgaggaguucugcgauauguugcggcuauuugacuucaauaaacaggcaauucagcgccugaaggccgaagcucagaugaguauacaacucaucaacaaggccgucaaugcacugauuaacgaucagcuuaucaugaaaaaucaccugagagacauaaugggcauuccauauugcaacuacucuaaguauugguacuugaaucauacaaccacggggaaaaccucccuccccaaguguuggcuggugagcaacggaucguacuuaaaugaaacacacuucucugacgauaucgagcagcaagcugacaacaugaucacugagaugcugcagaaagaauauauggagaggcaggguaagaccccucuaggccucguggaucuguuugucuucuccacaucauuuuaccuuauuaguaucuucuugcaucugguuaaaauuccaacucaccggcauauagugggaaagagcugccccaagccucaccgccucaaucacauggggaucuguuccugcggccuguauaaacagccagguguaccggugcgauggaagagaugaggacuaguaauaaggaaacuguaugaaugucugugggcaggaagugaagagauccuucuguaaagguuuuuggaauuaugucugcugaauaauaaacuuuuuugaaauaauaaaucugguagaaaaaugagaucuaaaaaaaaaaaaaaaaaaaaaaaaaaaaaaaaaaaaaaaaaaaaaaaaaaaaaaaaaaaaaaaaugcaucccccccccccccccccccccccccccccccaaaggcucuuuucagagccaccagaauu

SEQ ID NO: 2925 - RNA, 1816 nt, Artificial Sequence
  mRNA product Design b-4 comprising derived and/or modified sequence from LASV(Mad39;Clade IV)__ANH09722__GPC (opt3)
gggagagucccgcagucggcguccagcggcucugcuuguucgugugugugucguugcaggccuuauucaagcuuaccaugggccagaucgugaccuucuuucaagaggucccccacguuauugaagaggugaugaacauaguacugaucgcccucagcauucuugcugugcugaagggguuguacaaugucgcaacaugcggauuaaucggucuggugacuuuccuacuccuguguggcagauccugcacgaccacacuuuauaaagggguuuacgaacugcaggccuuggagcucaacauggaaacucugaauaugaccaugccucugucuuguacaaagaacaauucacaucacuauauuagggugggaaacgagaccggccucgaguuaacucugacaaauaccagucuuaucaaccauaaauuuugcaauuugagcgacgcgcacaagaaaaaccuguacgaucaugcucuaauguccauaaucucuacguuccaccucucgauuccaaauuuuaaccaguaugaagccaugucaugugacuucaaugaugguaagaucagcguccaguacaaccugagucacacuuaugcaggggacaccgccaaucauugcggaacaguggcuaacggcguacuucaaacuuuuaugcggauggcauggggcggguccuacauugcccuggauucuggacgcgguggcugggacuguaucaugaccagcuaccaguauuugauaauucagaacacaaccugggaggaucacugccaguucucccgaccgucacccaucggguaccucggacuguuaagucaacguacgagagacauuuauaucagcaggcggcugcucggcacuuuuacauggacccuuucugauuccgaagguaaggacacuccugggggauacugucugacacgcuggauguugaucgaggcugagcuaaaaugcuucggcaauaccgccguugcgaaguguaacgaaaaacaugaugaggaauuuugcgacaugcugagacucuucgauuuuaauaagcaggcaauucagaggcugaaagccgaggcucagaugucaauacaacuuaucaacaaggccgugaaugcacugauuaacgaccaguugaucaugaagaaucaccuccgggacauaaugggcauuccauauugcaacuacagcaaauauugguaccugaaucacacggucaccgggaagacaaguuuacccaaauguuggcuggugucuaacggauccuaccuaaaugaaacucauuucagcgaugacaucgagcagcaagcugauaacaugaucaccgagaugcuccagaaggaauauauggagcgccaggguaaaacaccucugggccuuguggacuuguucgucuuuucgacuucuuucuaccugauuuccaucuuucuccaccugguuaagauuccaacccaucgacacgugguagggaaacccugcccuaagccacauagacuuaaucacaugggaauauguucaugcggcuucuauaagcagccgggugugcccgucagguggaaacggugaggacuaguaauaaggaaacuguaugaaugucugugggcaggaagugaagagauccuucuguaaagguuuuuggaauuaugucugcugaauaauaaacuuuuuugaaauaauaaaucugguagaaaaaugagaucuaaaaaaaaaaaaaaaaaaaaaaaaaaaaaaaaaaaaaaaaaaaaaaaaaaaaaaaaaaaaaaaaugcaucccccccccccccccccccccccccccccccaaaggcucuuuucagagccaccagaauu

SEQ ID NO: 2926 - RNA, 1816 nt, Artificial Sequence
  mRNA product Design b-4 comprising derived and/or modified sequence from LASV(Z0947-SLE-2011;Clade IV)__AIT17840__GPC (opt3)
gggagagucccgcagucggcguccagcggcucugcuuguucgugugugugucguugcaggccuuauucaagcuuaccaugggccagaucgugaccuucuuucaagaggucccccacguuauugaagaggugaugaacauaguacugaucgcccucagcauucuugcugugcugaagggguuguacaauuucgcaacaugcggauuagucggucuggugacuuuucuacuccuguguggcagauccugcacgaucucucuuuauaaagggguuuacgaacugcagaccuuggagcucaacauggaaacacugaauaugacuaugccucugucauguaccaagaacaauagucaucacuauauuauggugggaaacgagacaggccucgaguuaacccugacuaauacaagcaucauaaaccauaaauucugcaaucuuuccgacgcccacaagaaaaacuuguacgaucaugcgcugaugucuaucauuucgaccuuucaccuaucaaucccaaauuucaaccaguaugaagcuaugagcugugacuuuaauggugggaagauuaguguccaguacaaccucucccacucuuaugccggagaugcagccaaucauugcggcacgguggcuaacggcguacugcaaacuuucaugaggauggcauggggagggagcuacaucgcccuugacuccggucgggaucgcugggacuguauaaugaccucauaccaguaucugauuauccagaacacaacuugggaggaucacugccaguuuagucgaccgagccccauuggcuacuuggggcuccugucucaacguaccagagacaucuauaucuccaggcgguuacugggaacauucaccuggacgcucucagauagcgaaggcaaggacacuccugguggguacugucuuacacgcuggaugcugauugaggcugaguugaaaugcuuuggaaauaccgccguugcgaaguguaacgaaaaacaugaugaggaguucugcgacaugcuaagacuguuugauuucaauaagcaggcaauacagaggcucaaagccgaagcucagaugaguauccaacugauuaacaaggccgugaaugcacuuaucaacgaccagcugauaaugaagaaucacuugcgggacauuaugggcaucccauauugcaacuacucuaaauauugguaccucaaucacacuacaaccggcaagacgucccugcccaaauguugguuagucagcaacgggucguaccugaaugaaacccauuucucugaugacaucgagcagcaagcugauaacaugauuacagagaugcuacagaaggaauauauggagcgccagggaaaaacuccucucggucugguggaccuuuuuguguucuccaccucauuuuacuugaucaguauuuuccugcaccucgucaagauaccaacacaucgacacaucguuggcaaacccugcccuaagccacauagacugaaucacauggggauuuguagcugcggacuuuauaagcagccgggcgugcccguaaaauggaagaggugaggacuaguaauaaggaaacuguaugaaugucugugggcaggaagugaagagauccuucuguaaagguuuuuggaauuaugucugcugaauaauaaacuuuuuugaaauaauaaaucugguagaaaaaugagaucuaaaaaaaaaaaaaaaaaaaaaaaaaaaaaaaaaaaaaaaaaaaaaaaaaaaaaaaaaaaaaaaaugcaucccccccccccccccccccccccccccccccaaaggcucuuuucagagccaccagaauu

SEQ ID NO: 2927 - RNA, 1816 nt, Artificial Sequence
  mRNA product Design b-4 comprising derived and/or modified sequence from LASV(Josiah;Clade IV)__NP_694870__GPC (opt4)
gggagagucccgcagucggcguccagcggcucugcuuguucgugugugugucguugcaggccuuauucaagcuuaccaugggccagaucgugaccuucuuccaggaggugccccacgugaucgaggaggugaugaacaucgugcugaucgcccugagcgugcuggccgugcugaagggccuguacaacuucgccaccugcggccuggugggccuggugaccuuccugcugcugugcggcagaagcugcaccaccagccuguacaagggcguguacgagcugcagacccuggagcugaacauggagacccugaacaugaccaugccccugagcugcaccaagaacaacagccaccacuacaucauggugggcaacgagaccggccuggagcugacccugaccaacaccagcaucaucaaccacaaguucugcaaccugagcgacgcccacaagaagaaccuguacgaccacgcccugaugagcaucaucagcaccuuccaccugagcauccccaacuucaaccaguacgaggccaugagcugcgacuucaacggcggcaagaucagcgugcaguacaaccugagccacagcuacgccggcgacgccgccaaccacugcggcaccguggccaacggcgugcugcagaccuucaugagaauggccuggggcggcagcuacaucgcccuggacagcggcagaggcaacugggacugcaucaugaccagcuaccaguaccugaucauccagaacaccaccugggaggaccacugccaguucagcagacccagccccaucggcuaccugggccugcugagccagagaaccagagacaucuacaucagcagaagacugcugggcaccuucaccuggacccugagcgacagcgagggcaaggacacccccggcggcuacugccugaccagauggaugcugaucgaggccgagcugaagugcuucggcaacaccgccguggccaagugcaacgagaagcacgacgaggaguucugcgacaugcugagacuguucgacuucaacaagcaggccauccagagacugaaggccgaggcccagaugagcauccagcugaucaacaaggccgugaacgcccugaucaacgaccagcugaucaugaagaaccaccugagagacaucaugggcauccccuacugcaacuacagcaaguacugguaccugaaccacaccaccaccggcagaaccagccugcccaagugcuggcuggugagcaacggcagcuaccugaacgagacccacuucagcgacgacaucgagcagcaggccgacaacaugaucaccgagaugcugcagaaggaguacauggagagacagggcaagaccccccugggccugguggaccuguucguguucagcaccagcuucuaccugaucagcaucuuccugcaccuggugaagauccccacccacagacacaucgugggcaagagcugccccaagccccacagacugaaccacaugggcaucugcagcugcggccuguacaagcagcccggcgugcccgugaaguggaagagaugaggacuaguaauaaggaaacuguaugaaugucugugggcaggaagugaagagauccuucuguaaagguuuuuggaauuaugucugcugaauaauaaacuuuuuugaaauaauaaaucugguagaaaaaugagaucuaaaaaaaaaaaaaaaaaaaaaaaaaaaaaaaaaaaaaaaaaaaaaaaaaaaaaaaaaaaaaaaaugcaucccccccccccccccccccccccccccccccaaaggcucuuuucagagccaccagaauu

SEQ ID NO: 2928 - RNA, 1813 nt, Artificial Sequence
  mRNA product Design b-4 comprising derived and/or modified sequence from LASV(LP;Clade I)__AAF86701__GPC (opt4)
gggagagucccgcagucggcguccagcggcucugcuuguucgugugugugucguugcaggccuuauucaagcuuaccaugggccagaucaucaccuucuuccaggaggugccccacgugaucgaggaggugaugaacaucgugcugaucgcccugagccugcuggccauccugaagggccuguacaacaucgccaccugcggcaucaucggccugguggccuuccuguuccugugcggcaagagcugcagccugacccugaagggcggcuacgagcugcagacccuggagcugaacauggagacccugaacaugaccaugccccugagcugcaccaagaacagcagccaccacuacaucagagugggcaacgagaccggccuggagcugacccugaccaacaccagcaucaucaaccacaaguucugcaaccugagcgacgcccacaagaagaaccuguacgaccacgcccugaugagcaucaucagcaccuuccaccugagcauccccaacuucaaccaguacgaggccaugagcugcgacuucaacggcggcaagaucagcgugcaguacaaccugagccacagcuacgccggcgacgccgccgagcacugcggcaccguggccaacggcgugcugcagaccuucaugagaauggccuggggcggcagauacaucgcccuggacagcggcaagggcaacugggacugcaucaugaccagcuaccaguaccugaucauccagaacaccaccugggaggaccacugccaguucagcagacccagccccaucggcuaccugggccugcugagccagagaaccagagacaucuacaucagcagaagacugcugggcaccuucaccuggacccugagcgacagcgagggcaacgagacccccggcggcuacugccugaccagauggaugcugaucgaggccgagcugaagugcuucggcaacaccgccguggccaagugcaacgagaagcacgacgaggaguucugcgacaugcugagacuguucgacuucaacaagcaggccaucagaagacugaaggccgaggcccagaugagcauccagcugaucaacaaggccgugaacgcccugaucaacgaccagcugaucaugaagaaccaccugagagacaucaugggcauccccuacugcaacuacagcaaguacugguaccugaaccacaccagcagcggcagaaccagccugcccaagugcuggcugaucagcaacggcagcuaccugaacgagacccaguucagcgacgacaucgagcagcaggccgacaacaugaucaccgagaugcugcagaaggaguacaucgagagacagggcaagaccccccugggccugguggacaucuucaucuucagcaccagcuucuaccugaucagcaucuuccugcaccugaucaagauccccacccacagacacaucgugggcaagcccugccccaagccccacagacugaaccacaugggcgugugcagcugcggccuguacaagcaccccggcgugcccaccaaguggaagagaugaggacuaguaauaaggaaacuguaugaaugucugugggcaggaagugaagagauccuucuguaaagguuuuuggaauuaugucugcugaauaauaaacuuuuuugaaauaauaaaucugguagaaaaaugagaucuaaaaaaaaaaaaaaaaaaaaaaaaaaaaaaaaaaaaaaaaaaaaaaaaaaaaaaaaaaaaaaaaugcaucccccccccccccccccccccccccccccccaaaggcucuuuucagagccaccagaauu

SEQ ID NO: 2929 - RNA, 1813 nt, Artificial Sequence
  mRNA product Design b-4 comprising derived and/or modified sequence from LASV(803213;Clade II)__AAF86703__GPC (opt4)
gggagagucccgcagucggcguccagcggcucugcuuguucgugugugugucguugcaggccuuauucaagcuuaccaugggccagaucaucaccuucuuccaggaggugccccacgugaucgaggaggugaugaacaucgugcugaucgcccugagccugcuggccauccugaagggcaucuacaacguggccaccugcggccuguucggccugaucagcuuccugcugcugugcggcagaagcugcagcgugaccuacaagggcguguacgagcugcagacccuggagcugaacauggccaaccugaacaugaccaugccccugagcugcaccaagaacaacagccaccacuacaucauggugggcaacgagaccggccuggagcugacccugaccaacaccagcaucaucaaccacaaguucugcaaccugagcgacgcccacaagaagaaccuguacgaccacgcccugaugagcaucaucagcaccuuccaccugagcauccccaacuucaaccaguacgaggccaugagcugcgacuucaacggcggcaagaucagcgugcaguacaaccugagccacagcuucgccguggacgccgccaaccacugcggcaccaucgccaacggcgugcugcagaccuucaugagaauggccuggggcggcagcuacaucgcccuggacagcggcaagggcaacugggacugcaucaugaccagcuaccaguaccugaucauccagaacaccaccugggaggaccacugccaguucagcagacccagccccaucggcuaccugggccugcugagccagagaaccagagacaucuacaucagcagaagacugcugggcaccuucaccuggacccugagcgacagcgagggcaacgaggcccccggcggcuacugccugaccagauggaugcugaucgaggccgagcugaagugcuucggcaacaccgccguggccaagugcaacgagaagcacgacgaggaguucugcgacaugcugagacuguucgacuucaacaagcaggccaucaagagacugaagaccgaggcccagaugagcauccagcugaucaacaaggccgugaacgcccugaucaacgaccagcugaucaugaagaaccaccugagagacaucaugggcauccccuacugcaacuacagcagauacugguaccugaaccacaccgugaccggcaagaccagccugcccagaugcuggcuggugagcaacggcagcuaccugaacgagacccacuucagcgacgacaucgagcagcaggccgacaacaugaucaccgagaugcugcagaaggaguacauggacagacagggcaagaccccccugggccugguggaccuguucguguucagcaccagcuucuaccugaucagcaucuuccugcaccuggugaagauccccacccacagacacaucgugggcaagcccugccccaagccccacagacugaaccacaugggcaucugcagcugcggccuguacaagcaccccggcgugcccgugaaguggaagagaugaggacuaguaauaaggaaacuguaugaaugucugugggcaggaagugaagagauccuucuguaaagguuuuuggaauuaugucugcugaauaauaaacuuuuuugaaauaauaaaucugguagaaaaaugagaucuaaaaaaaaaaaaaaaaaaaaaaaaaaaaaaaaaaaaaaaaaaaaaaaaaaaaaaaaaaaaaaaaugcaucccccccccccccccccccccccccccccccaaaggcucuuuucagagccaccagaauu

SEQ ID NO: 2930 - RNA, 1813 nt, Artificial Sequence
  mRNA product Design b-4 comprising derived and/or modified sequence from LASV(GA391;Clade III)__CAA36645__GPC (opt4)
gggagagucccgcagucggcguccagcggcucugcuuguucgugugugugucguugcaggccuuauucaagcuuaccaugggccagaucgugaccuucuuccaggaggugccccacgugaucgaggaggugaugaacaucgugcugaucgcccugagcauccuggccauccugaagggccuguacaacguggccaccugcggccugaucggccuggugaccuuccugcugcugagcggcagaagcugcagccugaucuacaagggcaccuacgagcugcagacccuggagcugaacauggagacccugaacaugaccaugccccugagcugcaccaagaacaacagccaccacuacaucagagugggcaacgagaccggccuggagcugacccugaccaacaccagcauccugaaccacaaguucugcaaccugagcgacgcccacaagagaaaccuguacgaccacagccugaugagcaucaucagcaccuuccaccugagcauccccaacuucaaccaguacgaggccaugagcugcgacuucaacggcggcaagaucaccgugcaguacaaccugagccacagcuucgccguggacgccgccggccacugcggcacccuggccaacggcgugcugcagaccuucaugagaauggccuggggcggcagcuacaucgcccuggacagcggcagaggcaacugggacugcaucaugaccagcuaccaguaccugaucauccagaacaccaccugggacgaccacugccaguucagcagacccagccccaucggcuaccugggccugcugagccagagaaccagagacaucuacaucagcagaagacugcugggcaccuucaccuggacccugagcgacagcgagggcaacgagacccccggcggcuacugccugaccagauggaugcugaucgaggccgagcugaagugcuucggcaacaccgccguggccaagugcaacgagaagcacgacgaggaguucugcgacaugcugagacuguucgacuucaacaagcaggccaucagaagacugaagaccgaggcccagaugagcauccagcugaucaacaaggccgugaacgcccugaucaacgaccagcugaucaugaagaaccaccugagagacaucaugggcauccccuacugcaacuacagcagauacugguaccugaaccacaccagcaccggcaagaccagccugcccagaugcuggcugaucagcaacggcagcuaccugaacgagaccaaguucagcgacgacaucgagcagcaggccgacaacaugaucaccgagaugcugcagaaggaguacaucgacagacagggcaagaccccccugggccugguggaccuguucguguucagcaccagcuucuaccugaucagcaucuuccugcaccuggugaagauccccacccacagacacaucgugggcaagcccugccccaagccccacagacugaaccacaugggcaucugcagcugcggccuguacaagcagcccggcgugcccgugagauggaagagaugaggacuaguaauaaggaaacuguaugaaugucugugggcaggaagugaagagauccuucuguaaagguuuuuggaauuaugucugcugaauaauaaacuuuuuugaaauaauaaaucugguagaaaaaugagaucuaaaaaaaaaaaaaaaaaaaaaaaaaaaaaaaaaaaaaaaaaaaaaaaaaaaaaaaaaaaaaaaaugcaucccccccccccccccccccccccccccccccaaaggcucuuuucagagccaccagaauu

SEQ ID NO: 2931 - RNA, 1816 nt, Artificial Sequence
  mRNA product Design b-4 comprising derived and/or modified sequence from LASV(AV;Clade V)__CCA30314__GPC (opt4)
gggagagucccgcagucggcguccagcggcucugcuuguucgugugugugucguugcaggccuuauucaagcuuaccaugggccagaucgugaccuucuuccaggaggugccccacgugaucgaggaggugaugaacaucgugcugaucgcccugagcauccuggccgugcugaagggccuguacaacaucgccaccugcggccugaucggccugaucaccuuccugcugcugugcggcagaagcugcagcagcaaccuguacaagggcguguacgagcugcagagccuggaccugaacauggagacccugaacaugaccaugccccugagcugcaccaagaacaacagccaccacuacaucagagugggcaacgacaccggccuggagcugacccugaccaacaccagcauccugaaccacaaguucugcaaccugagcgacgcccacaagaaggaccuguacgaccacgcccugaugagcaucaucagcaccuuccaccugagcauccccaacuucaaccaguacgaggccaugagcugcgacuucaacggcggcaagaucagcgugcaguacaaccugagccacagcuacgccaucgacgccgccaaccacugcggcaccguggccaacggcauccugcagaccuucaugagaauggccuggggcggcagcuacaucgcccuggacagcggcagaggcaacugggacugcaucaugaccagcuaccaguaccugaucauccagaacaccaccugggagaaccacugccaguucagcagacccagccccaucggcuaccugggccugcugagccagagaaccagagacaucuacaucagcagaagacugcugggcaccuucaccuggacccugagcgacagcgagggcaacgccacccccggcggcuacugccugaccagauggaugcugaucgaggccgagcugaagugcuucggcaacaccgccguggccaagugcaacgagaagcacgacgaggaguucugcgacaugcugagacuguucgacuucaacaagcaggccaucagcagacugaagagcgaggcccagaugagcauccagcugaucaacaaggccgugaacgcccugaucaacgaccagcugaucaugaagaaccaccugagagacaucaugggcauccccuacugcaacuacagcaaguacugguaccugaaccacaccaucaccggcaagaccagccugcccaagugcuggcuggugagcaacggcagcuaccugaacgagacccacuucagcgacgacaucgagcagcaggccgacaacaugaucaccgagaugcugcagaaggaguacauggagagacagggcaagaccccccugggccugguggaccuguucguguucagcaccagcuucuaccugaucagcaucuuccugagacuggugaagauccccacccacagacacaucgugggcaagcccugccccaagccccacagacugaaccacaugggcaucugcagcugcggccuguacaagcagcccggcgugcccgugagauggaagagaugaggacuaguaauaaggaaacuguaugaaugucugugggcaggaagugaagagauccuucuguaaagguuuuuggaauuaugucugcugaauaauaaacuuuuuugaaauaauaaaucugguagaaaaaugagaucuaaaaaaaaaaaaaaaaaaaaaaaaaaaaaaaaaaaaaaaaaaaaaaaaaaaaaaaaaaaaaaaaugcaucccccccccccccccccccccccccccccccaaaggcucuuuucagagccaccagaauu

SEQ ID NO: 2932 - RNA, 1813 nt, Artificial Sequence
  mRNA product Design b-4 comprising derived and/or modified sequence from LASV(Togo/2016/7082;Clade VI)__AMR44577__GPC (opt4)
gggagagucccgcagucggcguccagcggcucugcuuguucgugugugugucguugcaggccuuauucaagcuuaccaugggccagaucaucaccuucuuccaggaggugccccacgugaucgaggaggugaugaacaucgugcugaucgcccugagccugcuggccauccugaagggcguguacaacguggccaccugcggcaucaucggccuggugaccuuccuguuccugugcggcagaagcugcagccugaucuacaagggcagcuacgagcugcagacccuggagcugaacauggagacccugaacaugaccaugccccugagcugcaccaagaacagcagccaccacuacaucagagugggcaacgagaccggccuggagcugacccugaccaacaccagcaucaucaaccacaaguucugcaaccugagcgacgcccacaagagaaaccuguacgaccacgcccugaugagcauccugagcaccuuccaccugagcauccccaacuucaaccaguacgaggccaugagcugcgacuucaacggcggcaagaucagcgugcaguacaaccugagccacgccuacgccguggacgccgccgagcacugcggcaccguggccaacggcgugcugcagaccuucaugagaauggccuggggcggcagcuacaucgcccuggacagcggcagaggcaacugggacugcaucaugaccagcuaccaguaccugaucauccagaacaccaccugggaggaccacugccaguucagcagacccagccccaucggcuaccugggccugcugagccagagaaccagagacaucuacaucagcagaagacugcugggcaccuucaccuggacccugagcgacagcgagggcaacgagacccccggcggcuacugccugaccagauggaugcugaucgaggccgagcugaagugcuucggcaacaccgccguggccaagugcaacgagaagcacgacgaggaguucugcgacaugcugagacuguucgacuucaacaagcaggccauccagagacugaagagcgaggcccagaugagcauccagcugaucaacaaggccgugaacgcccugaucaacgaccagcugaucaugaagaaccaccugagagacaugaugggcauccccuacugcaacuacagcaaguacugguaccugaaccacaccagcagcggcagaaccagccugcccaagugcuggcuggugagcaacggcagcuaccugaacgagacccacuucagcgacgacaucgagcagcaggccgacaacaugaucaccgagaugcugcagaaggaguacaucgacagacagggcaagaccccccugggccugguggaccuguucguguucagcaccagcuucuaccugaucagcaucuuccugcaccugaucaagauccccacccacagacacaucgugggcaagcccugccccaagccccacagacugaaccacaugggcaucugcagcugcggccuguacaagcagcccggcgugcccaccagauggaagagaugaggacuaguaauaaggaaacuguaugaaugucugugggcaggaagugaagagauccuucuguaaagguuuuuggaauuaugucugcugaauaauaaacuuuuuugaaauaauaaaucugguagaaaaaugagaucuaaaaaaaaaaaaaaaaaaaaaaaaaaaaaaaaaaaaaaaaaaaaaaaaaaaaaaaaaaaaaaaaugcaucccccccccccccccccccccccccccccccaaaggcucuuuucagagccaccagaauu

SEQ ID NO: 2933 - RNA, 1813 nt, Artificial Sequence
  mRNA product Design b-4 comprising derived and/or modified sequence from LASV(KAK-428;Clade n.d. (VII))__ANH09740__GPC (opt4)
gggagagucccgcagucggcguccagcggcucugcuuguucgugugugugucguugcaggccuuauucaagcuuaccaugggccagaucgugaccuucuuccaggaggugccccacgugaucgaggaggugaugaacaucgugcugaucgcccugagccugcuggccauccugaagggccuguacaacuucgccaccugcggcgugaucggccugaucaccuuccugcugcugugcggcagaagcugcagcgccaccuacaagggccaguacgagcugcagacccuggagcugaacauggagagccugaacaugaccaugccccugagcugcaccaagaacaacagccaccacuacaucagagccggcaacaacaccggccuggagcugacccugaccaacaccagcaucaucagccacaaguucugcaaccugagcgacgcccacaagaagaaccuguacgaccacacccugaugagcaucaucaccaccuuccaccugagcauccccaacuucaaccaguacgaggccaugagcugcgacuucaacggcggcaagaucagcauccaguacaaccugagccacagcuacgccggcgacgccgcccagcacugcggcaccguggccaacggcgugcugcagaccuucaugagaauggccuggggcggcagcuaccuggcccuggacagcggcagaagaggcugggacugcaucaucagcagcuaccaguaccugaucauccagaacaccaccugggacgaccacugccaguucagcagacccagccccaucggcuaccugggcuucgugagccagaagaccagagacaucuacaucagcagaagacugcugggcaccuucaccuggacccugagcgacagcgagggccacgacaugcccggcggcuacugccugaccagauggaugcugaucgaggccgaccugaagugcuucggcaacaccgccguggccaagugcaacgagaagcacgacgaggaguucugcgacauguggagacuguucgacuucaacaagcaggccauccagagacugaaggccgaggcccagaugaacauccagcugaucaacaaggccgugaacgcccugaucaacgaccagcugaugaugaagaaccaccugagagacaucaugggcauccccuacugcaacuacagcaaguucugguaccugaacaacaccaccaccggcagaaccagccugcccagaugcuggcugaucagcaacggcagcuaccugaacgagacccacuucagcgacgacaucgagcagcaggccgacaacaugaucaccgagaugcugcagaaggaguacauggacagacagggcaagaccccccugggccugguggaccuguucguguucagcaccagcuucuaccugaucaccaucuuccugcaccuggugaagauccccacccacagacacaucgugggcaagcccugccccaagccccacagacugaaccacaugggcaucugcagcugcggccuguacaagcagcccggcgugcccgugagauggaagagaugaggacuaguaauaaggaaacuguaugaaugucugugggcaggaagugaagagauccuucuguaaagguuuuuggaauuaugucugcugaauaauaaacuuuuuugaaauaauaaaucugguagaaaaaugagaucuaaaaaaaaaaaaaaaaaaaaaaaaaaaaaaaaaaaaaaaaaaaaaaaaaaaaaaaaaaaaaaaaugcaucccccccccccccccccccccccccccccccaaaggcucuuuucagagccaccagaauu

SEQ ID NO: 2934 - RNA, 1813 nt, Artificial Sequence; identical to SEQ ID NO: 2928
  mRNA product Design b-4 comprising derived and/or modified sequence from LASV(Pinneo-NIG-1969;Clade I)__AIT17836__GPC (opt4)

SEQ ID NO: 2935 - RNA, 1813 nt, Artificial Sequence
  mRNA product Design b-4 comprising derived and/or modified sequence from LASV(ISTH0009-NIG-2011;Clade II)__AIT17404__GPC (opt4)
gggagagucccgcagucggcguccagcggcucugcuuguucgugugugugucguugcaggccuuauucaagcuuaccaugggccagaucaucaccuucuuccaggaggugccccacgugaucgaggaggugaugaacaucgugcugaucgcccugagccugcuggccauccugaagggcaucuacaacguggccaccugcggccuguucggccuggugagcuuccugcugcugugcggcagaagcugcagcaccaccuacaagggcguguacgagcugcagacccuggagcuggacauggccagccugaacaugaccaugccccugagcugcaccaagaacaacagccaccacuacaucauggugggcaacgagaccggccuggagcugacccugaccaacaccagcaucaucaaccacaaguucugcaaccugagcgacgcccacaagaagaaccuguacgaccacgcccugaugagcaucaucagcaccuuccaccugagcauccccaacuucaaccaguacgaggccaugagcugcgacuucaacggcggcaagaucagcgugcaguacaaccugagccacgccuacgccguggacgccgccaaccacugcggcaccaucgccaacggcgugcugcagaccuucaugagaauggccuggggcggcagcuacaucgcccuggacagcggcaagggcagcugggacugcaucaugaccagcuaccaguaccugaucauccagaacaccaccugggaggaccacugccaguucagcagacccagccccaucggcuaccugggccugcugagccagagaaccagagacaucuacaucagcagaagacugcugggcaccuucaccuggacccugagcgacagcgagggcaacgagacccccggcggcuacugccugaccagauggaugcugaucgaggccgagcugaagugcuucggcaacaccgccguggccaagugcaacgagaagcacgacgaggaguucugcgacaugcugagacuguucgacuucaacaagcaggccaucagaagacugaagaccgaggcccagaugagcauccagcugaucaacaaggccgugaacgcccugaucaacgaccagcugaucaugaagaaccaccugagagacaucaugggcauccccuacugcaacuacagcaaguacugguaccugaaccacaccgugaccggcaagaccagccugcccagaugcuggcuggugagcaacggcagcuaccugaacgagacccacuucagcgacgacaucgagcagcaggccgacaacaugaucaccgagcugcugcagaaggaguacauggacagacagggcaagaccccccugggccugguggaccuguucguguucagcaccagcuucuaccugaucagcaucuuccugcaccugaucaagauccccacccacagacacaucaccggcaagcccugccccaagccccacagacugaaccacaugggcaucugcagcugcggccuguacaagcaccccggcgugcccgugaaguggaagagaugaggacuaguaauaaggaaacuguaugaaugucugugggcaggaagugaagagauccuucuguaaagguuuuuggaauuaugucugcugaauaauaaacuuuuuugaaauaauaaaucugguagaaaaaugagaucuaaaaaaaaaaaaaaaaaaaaaaaaaaaaaaaaaaaaaaaaaaaaaaaaaaaaaaaaaaaaaaaaugcaucccccccccccccccccccccccccccccccaaaggcucuuuucagagccaccagaauu

SEQ ID NO: 2936 - RNA, 1813 nt, Artificial Sequence
  mRNA product Design b-4 comprising derived and/or modified sequence from LASV(ISTH2010-NIG-2012;Clade II)__AIT17482__GPC (opt4)
gggagagucccgcagucggcguccagcggcucugcuuguucgugugugugucguugcaggccuuauucaagcuuaccaugggccagaucaucaccuucuuccaggaggugccccacgugaucgaggaggugaugaacaucgugcugaucgcccugagccugcuggccauccugaagggcaucuacaacguggccaccugcggccuguucggccuggugagcuuccugcugcugugcggcagaagcugcagcaccaccuacaagggcguguacgagcugcagacccuggagcuggacauggccagccugaacaugaccaugccccugagcugcaccaagaacaacagccaccacuacaucauggugggcaacgagaccggccuggagcugacccugaccaacaccagcaucaucaaccacaaguucugcaaccugagcgacgcccacaagaagaaccuguacgaccacgcccugaugagcaucaucagcaccuuccaccugagcauccccaacuucaaccaguacgaggccaugagcugcgacuucaacggcggcaagaucagcgugcaguacaaccugagccacgccuacgccguggacgccgccaaccacugcggcaccaucgccaacggcgugcugcagaccuucaugagaauggccuggggcggcagcuacaucgcccuggacagcggcaagggcagcugggacugcaucaugaccagcuaccaguaccugaucauccagaacaucaccugggaggaccacugccaguucagcagacccagccccaucggcuaccugggccugcugagccagagaaccagagacaucuacaucagcagaagacugcugggcaccuucaccuggacccugagcgacagcgagggcaacgagacccccggcggcuacugccugaccagauggaugcugaucgaggccgagcugaagugcuucggcaacaccgccguggccaagugcaacgagaagcacgacgaggaguucugcgacaugcugagacuguucgacuucaacaagcaggccaucagaagacugaagaccgaggcccagaugagcauccagcugaucaacaaggccgugaacgcccugaucaacgaccagcugaucaugaagaaccaccugagagacaucaugggcauccccuacugcaacuacagcaaguacugguaccugaaccacaccgugaccggcaagaccagccugcccagaugcuggcuggugagcaacggcagcuaccugaacgagacccacuucagcgacgacaucgagcagcaggccgacaacaugaucaccgagcugcugcagaaggaguacaucgacagacagggcaagaccccccugggccugguggaccuguucguguucagcaccagcuucuaccugaucagcaucuuccugcaccuggugaagauccccacccacagacacguggugggcaagcccugccccaagccccacagacugaaccacaugggcaucugcagcugcggccuguacaagcaccccggcgugcccgugaaguggaagagaugaggacuaguaauaaggaaacuguaugaaugucugugggcaggaagugaagagauccuucuguaaagguuuuuggaauuaugucugcugaauaauaaacuuuuuugaaauaauaaaucugguagaaaaaugagaucuaaaaaaaaaaaaaaaaaaaaaaaaaaaaaaaaaaaaaaaaaaaaaaaaaaaaaaaaaaaaaaaaugcaucccccccccccccccccccccccccccccccaaaggcucuuuucagagccaccagaauu

SEQ ID NO: 2937 - RNA, 1813 nt, Artificial Sequence
  mRNA product Design b-4 comprising derived and/or modified sequence from LASV(Lassa virus/H.sapiens-wt/NGA/2015/ISTH_0543;Clade II)__AVO03639__GPC (opt4)
gggagagucccgcagucggcguccagcggcucugcuuguucgugugugugucguugcaggccuuauucaagcuuaccaugggccagaucaucaccuucuuccaggaggugccccacgugaucgaggaggugaugaacaucgugcugaucgcccugagccugcuggccauccugaagggcaucuacaacguggccaccugcggccuguucggccuggugagcuuccugcugcugugcggcagaagcugcagcaccaccuacaagggcguguacgagcugcagacccuggagcuggacauggccaaccugaacaugaccaugccccugagcugcaccaagaacaacagccaccacuacaucauggugggcaacgagaccggccuggagcugacccugaccaacaccagcaucaucaaccacaaguucugcaaccugagcgacgcccacaagaagaaccuguacgaccacgcccugaugagcaucaucagcaccuuccaccugagcauccccaacuucaaccaguacgaggccaugagcugcgacuucaacggcggcaagaucagcgugcaguacaaccugagccacaccuacgccguggacgccgccaaccacugcggcaccaucgccaacggcgugcugcagaccuucaugagaauggccuggggcggcagcuacaucgcccuggacagcggcaagggcagcugggacugcaucaugaccagcuaccaguaccuggugauccagaacaccaccugggaggaccacugccaguucagcagacccagccccaucggcuaccugggccugcugagccagagaaccagagacaucuacaucagcagaagacugcugggcaccuucaccuggacccugagcgacagcgagggcaacgagacccccggcggcuacugccugaccagauggaugcugaucgaggccgagcugaagugcuucggcaacaccgccguggccaagugcaacgagaagcacgacgaggaguucugcgacaugcugagacuguucgacuucaacaagcaggccaucagaagacugaagaccgaggcccagaugagcauccagcugaucaacaaggccgugaacgcccugaucaacgaccagcugaucaugaagaaccaccugagagacaucaugggcauccccuacugcaacuacagcaaguacugguaccugaaccacaccgugaccggcaagaccagccugcccagaugcuggcuggugagcaacggcagcuaccugaacgagacccacuucagcgacgacaucgagcagcaggccgacaacaugaucaccgagcugcugcagaaggaguacaucgacagacagggcaagaccccccugggccugguggaccuguucguguucagcaccagcuucuaccugaucagcaucuuccugcaccuggugaagauccccacccacagacacaucaccggcaagcccugccccaagccccacagacugaaccacaugggcaucugcagcugcggccuguacaagcaccccggcgugcccgugaaguggaagagaugaggacuaguaauaaggaaacuguaugaaugucugugggcaggaagugaagagauccuucuguaaagguuuuuggaauuaugucugcugaauaauaaacuuuuuugaaauaauaaaucugguagaaaaaugagaucuaaaaaaaaaaaaaaaaaaaaaaaaaaaaaaaaaaaaaaaaaaaaaaaaaaaaaaaaaaaaaaaaugcaucccccccccccccccccccccccccccccccaaaggcucuuuucagagccaccagaauu

SEQ ID NO: 2938 - RNA, 1813 nt, Artificial Sequence
  mRNA product Design b-4 comprising derived and/or modified sequence from LASV(Lassa virus/H.sapiens-wt/NGA/2016/ISTH_0009;Clade II)__AVO03571__GPC (opt4)
gggagagucccgcagucggcguccagcggcucugcuuguucgugugugugucguugcaggccuuauucaagcuuaccaugggccagaucaucaccuucuuccaggaggugccccacgugaucgaggaggugaugaacaucgugcugaucgcccugagccugcuggccauccugaagggcaucuacaacguggccaccugcggccugcugggccuggugagcuuccugcugcugugcggcagaagcugcagcaccaccuacaagggcguguacgagcugcagacccuggagcuggacauggccagccugaacaugaccaugccccugagcugcaccaagaacaacagccaccacuacaucauggugggcaacgagaccggccuggagcugacccugaccaacaccagcaucaucaaccacaaguucugcaaccugagcgacgcccacaagaagaaccuguacgaccacgcccugaugagcaucaucagcaccuuccaccugagcauccccaacuucaaccaguacgaggccaugagcugcgacuucaacggcggcagaaucagcgugcaguacaaccugagccacagcuacgccguggacgccgccaaccacugcggcaccaucgccaacggcgugcugcagaccuucaugagaauggccuggggcggcagcuacaucgcccuggacagcggcaagggcagcugggacugcaucaugaccagcuaccaguaccugaucauccagaacaccaccugggaggaccacugccaguucagcagacccagccccaucggcuaccugggccugcugagccagagaaccagagacaucuacaucagcagaagacugcugggcaccuucaccuggacccugagcgacagcgagggcaacgagacccccggcggcuacugccugaccagauggaugcugaucgaggccgagcugaagugcuucggcaacaccgccguggccaagugcaacgagaagcacgacgaggaguucugcgacaugcugagacuguucgacuucaacaagcaggccaucagaagacugaagaccgaggcccagaugagcauccagcugaucaacaaggccgugaacgcccugaucaacgaccagcugaucaugaagaaccaccugagagacaucaugggcauccccuacugcaacuacagcaaguacugguaccugaaccacaccgugaccggcaagaccagccugcccagaugcuggcuggugagcaacggcagcuaccugaacgagacccacuucagcgacgacaucgagcagcaggccgacaacaugaucaccgagcugcugcagaaggaguacaucgacagacagggcaagaccccccugggccugguggaccuguucguguucagcaccagcuucuaccugaucagcaucuuccugcaccuggugaagauccccacccacagacacaucaccggcaagcccugccccaagccccacagacugaaccacaugggcaucugcagcugcggccuguacaaccaccccggcgugcccgugaaguggaagagaugaggacuaguaauaaggaaacuguaugaaugucugugggcaggaagugaagagauccuucuguaaagguuuuuggaauuaugucugcugaauaauaaacuuuuuugaaauaauaaaucugguagaaaaaugagaucuaaaaaaaaaaaaaaaaaaaaaaaaaaaaaaaaaaaaaaaaaaaaaaaaaaaaaaaaaaaaaaaaugcaucccccccccccccccccccccccccccccccaaaggcucuuuucagagccaccagaauu

SEQ ID NO: 2939 - RNA, 1813 nt, Artificial Sequence
  mRNA product Design b-4 comprising derived and/or modified sequence from LASV(Lassa virus/H.sapiens-wt/NGA/2016/ISTH_0017;Clade II)__AVO03567__GPC (opt4)
gggagagucccgcagucggcguccagcggcucugcuuguucgugugugugucguugcaggccuuauucaagcuuaccaugggccagaucaucaccuucuuccaggaggugccccacgugaucgaggaggugaugaacaucgugcugaucgcccugagccugcuggccauccugaagggcaucuacaacguggccaccugcggccuguucggccuggugagcuuccugcugcugugcggcagaagcugcagcaccaccuacaagggcguguacgagcugcagacccuggagcuggacauggccagccugaacaugaccaugccccugagcugcaccaagaacaacagccaccacuacaucauggugggcaacgagaccggccuggagcugacccugaccaacaccagcaucaucaaccacaaguucugcaaccugagcgacgcccacaagaagaaccuguacgaccacgcccugaugagcaucaucagcaccuuccaccugagcauccccaacuucaaccaguacgaggccaugagcugcgacuucaacggcggcaagaucagcgugcaguacaaccugagccacaccuacgccaucgacgccgccaaccacugcggcaccaucgccaacggcgugcugcagaccuucaugagaauggccuggggcggcagcuacaucgcccuggacagcggcaagggcagcugggacugcaucaugaccagcuaccaguaccugaucauccagaacaccaccugggaggaccacugccaguucagcagacccagccccaucggcuaccugggccugcugagccagagaaccagagacaucuacaucagcagaagacugcugggcaccuucaccuggacccugagcgacagcgagggcaacgagacccccggcggcuacugccugaccagauggaugcugaucgaggccgagcugaagugcuucggcaacaccgccguggccaagugcaacgagaagcacgacgaggaguucugcgacaugcugagacuguucgacuucaacaagcaggccaucagaagacugaagaccgaggcccagaugagcauccagcugaucaacaaggccgugaacgcccugaucaacgaccagcugaucaugaagaaccaccugagagacaucaugggcauccccuacugcaacuacagcaaguacugguaccugaaccacaccgugaccggcaagaccagccugcccagaugcuggcuggugagcaacggcagcuaccugaacgagacccacuucagcgacgacaucgagcagcaggccgacaacaugaucaccgagcugcugcagaaggaguacauggacagacagggcaagaccccccugggccugguggaccuguucguguucagcaccagcuucuaccugaucagcaucuuccugcaccuggugagaauccccacccacagacacgugaucggcaagcccugccccaagccccacagacugaaccacaugggcaucugcagcugcggccuguacaagcaccccggcgugcccgugaaguggaagagaugaggacuaguaauaaggaaacuguaugaaugucugugggcaggaagugaagagauccuucuguaaagguuuuuggaauuaugucugcugaauaauaaacuuuuuugaaauaauaaaucugguagaaaaaugagaucuaaaaaaaaaaaaaaaaaaaaaaaaaaaaaaaaaaaaaaaaaaaaaaaaaaaaaaaaaaaaaaaaugcaucccccccccccccccccccccccccccccccaaaggcucuuuucagagccaccagaauu

SEQ ID NO: 2940 - RNA, 1813 nt, Artificial Sequence
  mRNA product Design b-4 comprising derived and/or modified sequence from LASV(Lassa virus/H.sapiens-wt/NGA/2018/ISTH_0959;Clade II)__AVV65099__GPC (opt4)
gggagagucccgcagucggcguccagcggcucugcuuguucgugugugugucguugcaggccuuauucaagcuuaccaugggccagaucaucaccuucuuccaggaggugccccacgugaucgaggaggugaugaacaucgugcugaucgcccugagccugcuggccauccugaagggcaucuacaacguggugaccugcggccuguucggccuggugagcuuccugcugcugugcggcagaagcugcagcaccaccuacaagggcguguacgagcugcagacccuggagcuggacauggccagccugaacaugaccaugccccugagcugcaccaagaacaacagccaccacuacaucauggugggcaacgagaccggccuggagcugacccugaccaacaccagcaucaucaaccacaaguucugcaaccugagcgacgcccacaagaagaaccuguacgaccacgcccugaugagcaucaucagcaccuuccaccugagcauccccaacuucaaccaguacgaggccaugagcugcgacuucaacggcggcaagaucagcgugcaguacaaccugagccacgccuacgccaucgacgccgccaaccacugcggcaccaucgccaacggcgugcugcagaccuucaugagaauggccuggggcggcagcuacaucgcccuggacagcggcaagggcagcugggacugcaucaugaccagcuaccaguaccugaucauccagaacaccaccugggaggaccacugccaguucagcagacccagccccaucggcuaccugggccugcugagccagagaaccagagacaucuacaucagcagaagacugcugggcaccuucaccuggacccugagcgacagcgagggcaacgagacccccggcggcuacugccugaccagauggaugcugaucgaggccgagcugaagugcuucggcaacaccgccguggccaagugcaacgagaagcacgacgaggaguucugcgacaugcugagacuguucgacuucaacaagcaggccaucagaagacugaagaccgaggcccagaugagcauccagcugaucaacaaggccgugaacgcccugaucaacgaccagcugaucaugaagaaccaccugagagacaucaugggcauccccuacugcaacuacagcaaguacugguaccugaaccacaccgugaccggcaagaccagccugcccagaugcuggcuggugagcaacggcagcuaccugaacgagacccacuucagcgacgacaucgagcagcaggccgacaacaugaucaccgagcugcugcagaaggaguacaucgacagacagggcaagaccccccugggccugguggaccuguucguguucagcaccagcuucuaccugaucagcaucuuccugcaccuggugaagauccccacccacagacacgugaucggcaagcccugccccaagccccacagacugaaccacaugggcaucugcagcugcggccuguacaagcaccccggcgugcccgugaaguggaagagaugaggacuaguaauaaggaaacuguaugaaugucugugggcaggaagugaagagauccuucuguaaagguuuuuggaauuaugucugcugaauaauaaacuuuuuugaaauaauaaaucugguagaaaaaugagaucuaaaaaaaaaaaaaaaaaaaaaaaaaaaaaaaaaaaaaaaaaaaaaaaaaaaaaaaaaaaaaaaaugcaucccccccccccccccccccccccccccccccaaaggcucuuuucagagccaccagaauu

SEQ ID NO: 2941 - RNA, 1813 nt, Artificial Sequence
  mRNA product Design b-4 comprising derived and/or modified sequence from LASV(LASV003-NIG-2008;Clade II)__AIT17580__GPC (opt4)
gggagagucccgcagucggcguccagcggcucugcuuguucgugugugugucguugcaggccuuauucaagcuuaccaugggccagaucaucaccuucuuccaggaggugccccacgugaucgaggaggugaugaacaucgugcugaucgcccugagccugcuggccauccugaagggcaucuacaacguggccaccugcggccuguucggccuggugagcuuccugcugcugugcggcagaagcugcagcaccaccuacaagggcguguacgagcugcagacccuggagcuggacauggccagccugaacaugaccaugccccugagcugcaccaagaacaacagccaccacuacaucauggugggcaacgagaccggccuggagcugacccugaccaacaccagcaucaucaaccacaaguucugcaaccugagcgacgcccacaagaagaaccuguacgaccacgcccugaugagcaucaucagcaccuuccaccugagcauccccaacuucaaccaguacgaggccaugagcugcgacuucaacggcggcaagaucagcgugcaguacaaccugagccacaccuacgccguggacgccgccaaccacugcggcaccaucgccaacggcgugcugcagaccuucaugagaauggccuggggcggcagcuacaucgcccuggacagcggcaagggcagcugggacugcaucaugaccagcuaccaguaccugaucauccagaacaccaccugggaggaccacugccaguucagcagacccagccccaucggcuaccugggccugcugagccagagaaccagagacaucuacaucagcagaagacugcugggcaccuucaccuggacccugagcgacagcgagagcaacgagacccccggcggcuacugccugaccagauggaugcugaucgaggccgagcugaagugcuucggcaacaccgccguggccaagugcaacgagaagcacgacgaggaguucugcgacaugcugagacuguucgacuucaacaagcaggccaucagaagacugaaggccgaggcccagaugagcauccagcugaucaacaaggccgugaacgcccugaucaacgaccagcugaucaugaagaaccaccugagagacaucaugggcauccccuacugcaacuacagcaaguacugguaccugaaccacaccgugaccggcagaaccagccugcccagaugcuggcuggugagcaacggcagcuaccugaacgagacccacuucagcgacgacaucgagcagcaggccgacaacaugaucaccgagcugcugcagaaggaguacauggacagacagggcaagaccccccugggccugguggaccuguucguguucagcaccagcuucuaccugaucagcaucuuccugcaccuggugaagauccccacccacagacacgugaucggcaagcccugccccaagccccacagacugaaccacaugggcaucugcagcugcggccuguacaagcaccccggcgugcccgugaaguggaagagaugaggacuaguaauaaggaaacuguaugaaugucugugggcaggaagugaagagauccuucuguaaagguuuuuggaauuaugucugcugaauaauaaacuuuuuugaaauaauaaaucugguagaaaaaugagaucuaaaaaaaaaaaaaaaaaaaaaaaaaaaaaaaaaaaaaaaaaaaaaaaaaaaaaaaaaaaaaaaaugcaucccccccccccccccccccccccccccccccaaaggcucuuuucagagccaccagaauu

SEQ ID NO: 2942 - RNA, 1813 nt, Artificial Sequence
  mRNA product Design b-4 comprising derived and/or modified sequence from LASV(LASV035-NIG-2009;Clade II)__AIT17588__GPC (opt4)
gggagagucccgcagucggcguccagcggcucugcuuguucgugugugugucguugcaggccuuauucaagcuuaccaugggccagaucaucaccuucuuccaggaggugccccacgugaucgaggaggugaugaacaucgugcugaucgcccugagccugcuggccauccugaagggcaucuacaacguggccaccugcggccuguucggccuggugagcuuccugcugcugugcggcagaagcugcagcaccaccuacaagggcguguacgagcugcagacccuggagcuggacauggccagccugaacaugaccaugccccugagcugcaccaagaacaacagccaccacuacaucauggugggcaacgagaccggccuggagcugacccugaccaacaccagcaucaucaaccacaaguucugcaaccugagcgacgcccacaagaagaaccuguacgaccacgcccugaugagcaucaucagcaccuuccaccugagcauccccaacuucaaccaguacgaggccaugagcugcgacuucaacggcggcaagaucagcgugcaguacaaccugagccacgccuacgccguggacgccgccaaccacugcggcaccaucgccaacggcgugcugcagaccuucaugagaauggccuggggcggcagcuacaucgcccuggacagcggcaagggcagcugggacugcaucaugaccagcuaccaguaccugaucauccagaacaccaccugggaggaccacugccaguucagcagacccagccccaucggcuaccugggccugcugagccagagaaccagagacaucuacaucagcagaagacugcugggcaccuucaccuggacccugagcgacagcgagggcaacgagacccccggcggcuacugccugaccagauggaugcugaucgaggccgagcugaagugcuucggcaacaccgccguggccaagugcaacgagaagcacgacgaggaguucugcgacaugcugagacuguucgacuucaacaagcaggccaucagaagacugaaggccgaggcccagaugagcauccagcugaucaacaaggccgugaacgcccugaucaacgaccagcugaucaugaagaaccaccugagagacaucaugggcauccccuacugcaacuacagcaaguacugguaccugaaccacaccgugaccggcaagaccagccugcccagaugcuggcuggugagcaacggcagcuaccugaacgagacccacuucagcgacgacaucgagcagcaggccgacaacaugaucaccgagcugcugcagaaggaguacaucgacagacagggcaagaccccccugggccugguggaccuguucguguucagcaccagcuucuaccugaucagcaucuuccugcaccuggugaagauccccacccacagacacgugaucggcaagcccugccccaagccccacagacugaaccacaugggcaucugcagcugcggccuguacaagcaccccggcgugcccgugaaguggaagagaugaggacuaguaauaaggaaacuguaugaaugucugugggcaggaagugaagagauccuucuguaaagguuuuuggaauuaugucugcugaauaauaaacuuuuuugaaauaauaaaucugguagaaaaaugagaucuaaaaaaaaaaaaaaaaaaaaaaaaaaaaaaaaaaaaaaaaaaaaaaaaaaaaaaaaaaaaaaaaugcaucccccccccccccccccccccccccccccccaaaggcucuuuucagagccaccagaauu

SEQ ID NO: 2943 - RNA, 1813 nt, Artificial Sequence
  mRNA product Design b-4 comprising derived and/or modified sequence from LASV(LASV1000-NIG-2009;Clade II)__AIT17782__GPC (opt4)
gggagagucccgcagucggcguccagcggcucugcuuguucgugugugugucguugcaggccuuauucaagcuuaccaugggccagaucaucaccuucuuccaggaggugccccacgugaucgaggaggugaugaacaucgugcugaucgcccugagccugcuggccauccugaagggcaucuacaacguggccaccugcggccuguucggccuggugagcuuccugcugcugugcggcagaagcugcagcaccaccuacaagggcguguacgagcugcagacccuggagcuggacauggccagccugaacaugaccaugccccugagcugcaccaagaacaacagccaccacuacaucauggugggcaacgagaccggccuggagcugacccugaccaacaccagcaucaucaaccacaaguucugcaaccugagcgacgcccacaagaagaaccuguacgaccacgcccugaugagcaucaucagcaccuuccaccugagcauccccaacuucaaccaguacgaggccaugagcugcgacuucaacggcggcaagaucagcgugcaguacaaccugagccacaccuacgccguggacgccgccaaccacugcggcaccaucgccaacggcgugcugcagaccuucaugagaauggccuggggcggcagcuacaucgcccuggacagcggcaagggcagcugggacugcaucaugaccagcuaccaguaccugaucauccagaacaccaccugggaggaccacugccaguucagcagacccagccccaucggcuaccugggccugcugagccagagaaccagagacaucuacaucagcagaagacugcugggcaccuucaccuggacccugagcgacagcgagggcaacgagacccccggcggcuacugccugaccagauggaugcugaucgaggccgagcugaagugcuucggcaacaccgccguggccaagugcaacgagaagcacgacgaggaguucugcgacaugcugagacuguucgacuucaacaagcaggccaucaagagacugaagaccgaggcccagaugagcauccagcugaucaacaaggccgugaacgcccugaucaacgaccagcugaucaugaagaaccaccugagagacaucaugggcauccccuacugcaacuacagcaaguacugguaccugaaccacaccgugaccggcaagaccagccugcccagaugcuggcuggugagcaacggcagcuaccugaacgagacccacuucagcgacgacaucgagcagcaggccgacaacaugaucaccgagcugcugcagaaggaguacaucgacagacagggcaagaccccccugggccugguggaccuguucguguucagcaccagcuucuaccugaucagcaucuuccugcaccuggugaagauccccacccacagacacguggugggcaagcccugccccaagccccacagacugaaccacaugggcaucugcagcugcggccuguacaagcaccccggcgugcccgugaaguggaagagaugaggacuaguaauaaggaaacuguaugaaugucugugggcaggaagugaagagauccuucuguaaagguuuuuggaauuaugucugcugaauaauaaacuuuuuugaaauaauaaaucugguagaaaaaugagaucuaaaaaaaaaaaaaaaaaaaaaaaaaaaaaaaaaaaaaaaaaaaaaaaaaaaaaaaaaaaaaaaaugcaucccccccccccccccccccccccccccccccaaaggcucuuuucagagccaccagaauu

SEQ ID NO: 2944 - RNA, 1813 nt, Artificial Sequence
  mRNA product Design b-4 comprising derived and/or modified sequence from LASV(LASV221-NIG-2010;Clade II)__AIT17624__GPC (opt4)
gggagagucccgcagucggcguccagcggcucugcuuguucgugugugugucguugcaggccuuauucaagcuuaccaugggccagaucaucaccuucuuccaggaggugccccacgugaucgaggaggugaugaacaucgugcugaucgcccugagccugcuggccauccugaagggcaucuacaacguggccaccugcggccuguucggccuggugagcuuccugcugcugugcggcagaagcugcagcaccaccuacaagggcguguacgagcugcagacccuggagcuggacauggccagccugaacaugaccaugccccugagcugcaccaagaacaacagccaccacuacaucauggugggcaacgagaccggccuggagcugacccugaccaacaccagcaucaucaaccacaaguucugcaaccugagcgacgcccacaagaagaaccuguacgaccacgcccugaugagcaucaucagcaccuuccaccugagcauccccaacuucaaccaguacgaggccaugagcugcgacuucaacggcggcaagaucagcgugcaguacaaccugagccacaccuacgccaucgacgccgccaaccacugcggcaccaucgccaacggcgugcugcagaccuucaugagaauggccuggggcggcagcuacaucgcccuggacagcggcaagggcagcugggacugcaucaugaccagcuaccaguaccugaucauccagaacaccaccugggaggaccacugccaguucagcagacccagccccaucggcuaccugggccugcugagccagagaaccagagacaucuacaucagcagaagacugcugggcaccuucaccuggacccugagcgacagcgagggcaacgagacccccggcggcuacugccugaccagauggaugcugaucgaggccgagcugaagugcuucggcaacaccgccguggccaagugcaacgagaagcacgacgaggaguucugcgacaugcugagacuguucgacuucaacaagcaggccaucagaagacugaagaccgaggcccagaugagcauccagcugaucaacaaggccgugaacgcccugaucaacgaccagcugaucaugaagaaccaccugagagacaucaugggcauccccuacugcaacuacagcaaguacugguaccugaaccacaccgugaccggcaagaccagccugcccagaugcuggcuggugagcaacggcagcuaccugaacgagacccacuucagcgacgacaucgagcagcaggccgacaacaugaucaccgagaugcugcagaaggaguacauggacagacagggcaagaccccccugggccugguggaccuguucguguucagcaccagcuucuaccugaucagcaucuuccugcaccuggugaagauccccacccacagacacgugaucggcaagcccugccccaagccccacagacugaaccacaugggcaucugcagcugcggccuguacaagcaccccggcgugcccgugaaguggaagagaugaggacuaguaauaaggaaacuguaugaaugucugugggcaggaagugaagagauccuucuguaaagguuuuuggaauuaugucugcugaauaauaaacuuuuuugaaauaauaaaucugguagaaaaaugagaucuaaaaaaaaaaaaaaaaaaaaaaaaaaaaaaaaaaaaaaaaaaaaaaaaaaaaaaaaaaaaaaaaugcaucccccccccccccccccccccccccccccccaaaggcucuuuucagagccaccagaauu

SEQ ID NO: 2945 - RNA, 1813 nt, Artificial Sequence
  mRNA product Design b-4 comprising derived and/or modified sequence from LASV(LASV237-NIG-2010;Clade II)__AIT17638__GPC (opt4)
gggagagucccgcagucggcguccagcggcucugcuuguucgugugugugucguugcaggccuuauucaagcuuaccaugggccagaucaucaccuucuuccaggaggugccccacgugaucgaggaggugaugaacaucgugcugaucgcccugagccugcuggccauccugaagggcaucuacaacguggccaccugcggccuguucggccuggugagcuuccugcugcugugcggcagaagcugcagcaccaccuacaagggcguguacgagcugcagacccuggagcuggacauggccagccugaacaugaccaugccccugagcugcaccaagaacaacagccaccacuacaucauggugggcaacgagaccggccuggagcugacccugaccaacaccagcaucaucaaccacaaguucugcaaccugagcgacgcccacaagaaggaccuguacgaccacgcccugaugagcaucaucagcaccuuccaccugagcauccccaacuucaaccaguacgaggccaugagcugcgacuucaacggcggcaagaucagcgugcaguacaaccugagccacaccuacgccguggacgccgccaaccacugcggcaccaucgccaacggcgugcugcagaccuucaugagaauggccuggggcggcagcuacaucgcccuggacagcggcaagggcagcugggacugcaucaugaccagcuaccaguaccugaucauccagaacaccaccugggaggaccacugccaguucagcagacccagccccaucggcuaccugggccugcugagccagagaaccagagacaucuacaucagcagaagacugcugggcaccuucaccuggacccugagcgacagcgagggcaacgagacccccggcggcuacugccugaccagauggaugcugaucgaggccgagcugaagugcuucggcaacaccgccguggccaagugcaacgagaagcacgacgaggaguucugcgacaugcugagacuguucgacuucaacaagcaggccaucagaagacugaagaccgaggcccagaugagcauccagcugaucaacaaggccgugaacgcccugaucaacgaccagcugaucaugaagaaccaccugagagacaucaugggcauccccuacugcaacuacagcaaguacugguaccugaaccacaccgugaccggcaagaccagccugcccagaugcuggcuggugagcaacggcagcuaccugaacgagacccacuucagcgacgacaucgagcagcaggccgacaacaugaucaccgagcugcugcagaaggaguacauggacagacagggcaagaccccccugggccugguggaccuguucguguucagcaccagcuucuaccugaucagcaucuuccugcaccugaucaagauccccacccacagacacaucaccggcaagcccugccccaagccccacagacugaaccacaugggcaucugcagcugcggccuguacaagcaccccggcgugcccgugaaguggaagagaugaggacuaguaauaaggaaacuguaugaaugucugugggcaggaagugaagagauccuucuguaaagguuuuuggaauuaugucugcugaauaauaaacuuuuuugaaauaauaaaucugguagaaaaaugagaucuaaaaaaaaaaaaaaaaaaaaaaaaaaaaaaaaaaaaaaaaaaaaaaaaaaaaaaaaaaaaaaaaugcaucccccccccccccccccccccccccccccccaaaggcucuuuucagagccaccagaauu

SEQ ID NO: 2946 - RNA, 1813 nt, Artificial Sequence
  mRNA product Design b-4 comprising derived and/or modified sequence from LASV(LASV253-NIG-2011;Clade II)__AIT17670__GPC (opt4)
gggagagucccgcagucggcguccagcggcucugcuuguucgugugugugucguugcaggccuuauucaagcuuaccaugggccagaucaucaccuucuuccaggaggugccccacgugaucgaggaggugaugaacaucgugcugaucgcccugagccugcuggccauccugaagggcaucuacaacguggccaccugcggccuguucggccuggugagcuuccugcugcugugcggcagaagcugcagcaccaccuacaagggcguguacgagcugcagacccuggagcuggacauggccagccugaacaugaccaugccccugagcugcaccaagaacaacagccaccacuacaucauggugggcaacgagaccggccuggagcugacccugaccaacaccagcaucaucaaccacaaguucugcaaccugagcgacgcccacaagaagaaccuguacgaccacgcccugaugagcaucaucagcaccuuccaccugagcauccccaacuucaaccaguacgaggccaugagcugcgacuucaacggcggcaagaucagcgugcaguacaaccugagccacaccuacgccguggacgccgccaaccacugcggcaccaucgccaacggcgugcugcagaccuucaugagaauggccuggggcggcagcuacaucgcccuggacagcggcaagggcagcugggacugcaucaugaccagcuaccaguaccugaucauccagaacaccaccugggaggaccacugccaguucagcagacccagccccaucggcuaccugggccugcugagccagagaaccagagacaucuacaucagcagaagacugcugggcaccuucaccuggacccugagcgacagcgagggcaacgagacccccggcggcuacugccugaccagauggaugcugaucgaggccgagcugaagugcuucggcaacaccgccguggccaagugcaacgagaagcacgacgaggaguucugcgacaugcugagacuguucgacuucaacaagcaggccaucagaagacugaaggccgaggcccagaugagcauccagcugaucaacaaggccgugaacgcccugaucaacgaccagcugaucaugaagaaccaccugagagacaucaugggcauccccuacugcaacuacagcaaguacugguaccugaaccacaccgugaccggcagaaccagccugcccagaugcuggcuggugagcaacggcagcuaccugaacgagacccacuucagcgacgacaucgagcagcaggccgacaacaugaucaccgagcugcugcagaaggaguacaucgacagacagggcaagaccccccugggccugguggaccuguucguguucagcaccagcuucuaccugaucagcaucuuccugcaccuggugaagauccccacccacagacacaucaucggcaagcccugccccaagccccacagacugaaccacaugggcaucugcagcugcggccuguacaagcaccccggcgugcccgugaaguggaagagaugaggacuaguaauaaggaaacuguaugaaugucugugggcaggaagugaagagauccuucuguaaagguuuuuggaauuaugucugcugaauaauaaacuuuuuugaaauaauaaaucugguagaaaaaugagaucuaaaaaaaaaaaaaaaaaaaaaaaaaaaaaaaaaaaaaaaaaaaaaaaaaaaaaaaaaaaaaaaaugcaucccccccccccccccccccccccccccccccaaaggcucuuuucagagccaccagaauu

SEQ ID NO: 2947 - RNA, 1813 nt, Artificial Sequence
  mRNA product Design b-4 comprising derived and/or modified sequence from LASV(LASV254-NIG-2011;Clade II)__AIT17674__GPC (opt4)
gggagagucccgcagucggcguccagcggcucugcuuguucgugugugugucguugcaggccuuauucaagcuuaccaugggccagaucaucaccuucuuccaggaggugccccacgugaucgaggaggugaugaacaucgugcugaucgcccugagccugcuggccauccugaagggcaucuacaacguggccaccugcggccuguucggccuggugagcuuccugcugcugugcggcagaagcugcagcaccaccuacaagggcguguacgagcugcagacccuggagcuggacaugaccaaccugaacaugaccaugccccugagcugcaccaagaacaacagccaccacuacaucauggugggcaacgagaccggccuggagcugacccugaccaacaccagcaucaucaaccacaaguucugcaaccugagcgacgcccacaagaagaaccuguacaaccacgcccugaugagcaucaucagcaccuuccaccugagcauccccaacuucaaccaguacgaggccaugagcugcgacuucaacggcggcaagaucagcgugcaguacaaccugagccacagcuacgccguggacgccgccaaccacugcggcaccaucgccaacggcgugcugcagaccuucaugagaauggccuggggcggcagcuacaucgcccuggacagcggcaagggcaacugggacugcaucaugaccagcuaccaguaccugaucauccagaacaccaccugggaggaccacugccaguucagcagacccagccccaucggcuaccugggccugcugagccagagaaccagagacaucuacaucagcagaagacugcugggcaccuucaccuggacccugagcgacagcgagggcaacgagacccccggcggcuacugccugaccagauggaugcugaucgaggccgagcugaagugcuucggcaacaccgccguggccaagugcaacgagaagcacgacgaggaguucugcgacaugcugagacuguucgacuucaacaagcaggccaucagaagacugaagaccgaggcccaggccaacauccagcugaucaacaaggccgugaacgcccugaucaacgaccagcugaucaugaagaaccaccugagagacaucaugggcauccccuacugcaacuacagcaaguacugguaccugaaccacaccgugaccggcaagaccagccugcccagaugcuggcuggugagcaacggcagcuaccugaacgagacccacuucagcgacgacaucgagcagcaggccgacaacaugaucaccgagcugcugcagaaggaguacauggacagacagggcaagaccccccugggccugguggaccuguucguguucagcaccagcuucuaccugaucagcaucuuccugcaccuggugaagauccccacccacagacacgugaucggcaagcccugccccaagccccacagacugaaccacaugggcaucugcagcugcggccuguacaagcaccccggcgugcccgugaaguggaagagaugaggacuaguaauaaggaaacuguaugaaugucugugggcaggaagugaagagauccuucuguaaagguuuuuggaauuaugucugcugaauaauaaacuuuuuugaaauaauaaaucugguagaaaaaugagaucuaaaaaaaaaaaaaaaaaaaaaaaaaaaaaaaaaaaaaaaaaaaaaaaaaaaaaaaaaaaaaaaaugcaucccccccccccccccccccccccccccccccaaaggcucuuuucagagccaccagaauu

SEQ ID NO: 2948 - RNA, 1813 nt, Artificial Sequence
  mRNA product Design b-4 comprising derived and/or modified sequence from LASV(Nig08-A19;Clade III)__ADU56618__GPC (opt4)
gggagagucccgcagucggcguccagcggcucugcuuguucgugugugugucguugcaggccuuauucaagcuuaccaugggccagaucgugaccuucuuccaggaggugccccacgugaucgaggaggugaugaacaucgugcugaucgcccugagcauccuggccauccugaagggccuguacaacaucgccaccugcggccugaucggccuggugaccuuccugcugcugagcggcagaagcugcagcaugaccuacaagggcguguacgagcugcagacccuggagcugaacaugaacacccugaacaugaccaugccccugagcugcaccaagaacaacagccaccacuacaucauggugggcaacgagaccggccuggagcugacccugaccaacaccagccugcugcaccacaaguucugcaaccugagcgacgcccacaagaagaaccuguacgaccacacccugaugagcaucaucagcaccuuccaccugagcauccccaacuucaaccaguacgaggccaugagcugcgacuucaacggcggcaagaucaccgugcaguacaaccugagccacagcuacgccaucgacgccgccaaccacugcggcaccguggccaacggcgugcugcagaccuucaugagaauggccuggggcggcagcuacaucgcccuggacagcggcagaggcaagugggacugcaucaugaccagcuaccaguaccugaucauccagaacaccaccugggaggaccacugccaguucagcagacccagccccaucggcuaccugggccugcugagccagagaaccagagacaucuacaucagcagaagacugcugggcaccuucaccuggacccugagcgacagcgagggcaacgagacccccggcggcuacugccugaccagauggaugcugaucgaggccgagcugaagugcuucggcaacaccgccguggccaagugcaacgagaagcacgacgaggaguucugcgacaugcugagacuguucgacuucaacaagcaggccaucagaagacugaaggccgaggcccagaugagcauccagcugaucaacaaggccgugaacgcccugaucaacgaccagcugaucaugaagaaccaccugagagacaucaugggcauccccuacugcaacuacagcaaguacugguaccugaaccacaccagcaccggcagaaccagccugcccagaugcuggcuggugagcaacggcagcuaccugaacgagacccacuucagcgacgacaucgagcagcaggccgacaacaugaucaccgagaugcugcagaaggaguaccuggacagacagggcaagaccccccugggccugguggaccuguucguguucagcaccagcuucuaccugaucagcaucuuccugcaccuggugaagauccccacccacagacacaucgugggcaagcccugccccaagccccacagacugaaccacaugggcaucugcagcugcggccuguacaagcagcccggcgugcccgugagauggaagagaugaggacuaguaauaaggaaacuguaugaaugucugugggcaggaagugaagagauccuucuguaaagguuuuuggaauuaugucugcugaauaauaaacuuuuuugaaauaauaaaucugguagaaaaaugagaucuaaaaaaaaaaaaaaaaaaaaaaaaaaaaaaaaaaaaaaaaaaaaaaaaaaaaaaaaaaaaaaaaugcaucccccccccccccccccccccccccccccccaaaggcucuuuucagagccaccagaauu

SEQ ID NO: 2949 - RNA, 1816 nt, Artificial Sequence
  mRNA product Design b-4 comprising derived and/or modified sequence from LASV(G1180-SLE-2010;Clade IV)__AIT17168__GPC (opt4)
gggagagucccgcagucggcguccagcggcucugcuuguucgugugugugucguugcaggccuuauucaagcuuaccaugggccagaucgugaccuucuuccaggaggugccccacgugaucgaggaggugaugaacaucgugcugaucgcccugagcauccuggccgugcugaagggccuguacaacuucgccaccugcggccuggugggccugcugaccuuccugcugcugugcggcagaagcugcaccgccagcagauacaagggcguguacgagcugcagacccuggagcugaacauggagacccugaacaugaccaugccccugagcugcaccaagaacaacagccaccacuacaucauggugggcaacgagaccggccuggagcugacccugaccaacaccagcaucaucaaccacaaguucugcaaccugagcgacgcccacaagaagaaccuguacgaccacgcccugaugagcaucaucagcaccuuccaccugagcauccccaacuucaaccaguacgaggccaugagcugcgacuucaacggcggcaagaucagcgugcaguacaaccugagccacagcuacgccggcgacgccgccaaccacugcggcaccguggccaacggcgugcugcagaccuucaugagaauggccuggggcggcagcuacaucgcccuggacagcggccacggcagcugggacugcaucaugaccagcuaccaguaccugaucauccagaacaccaccugggaggaccacugccaguucagcagacccagccccaucggcuaccugggccugcugagccagagaaccagagacaucuacaucagcagaagacugcugggcaccuucaccuggacccugagcgacagcgagggcaaggacacccccggcggcuacugccugaccagauggaugcugaucgaggccgagcugaagugcuucggcaacaccgccguggccaagugcaacgagaagcacgacgaggaguucugcgacaugcugagacuguucgacuucaacaagcaggccauccagagacugaaggccgaggcccagaugagcauccagcugaucaacaaggccgugaacgcccugaucaacgaccagcugaucaugaagaaccaccugagagacaucaugggcauccccuacugcaacuacagcaaguacugguaccugaaccacaccaccaccggcaagaccagccugcccaagugcuggcuggugagcaacggcagcuaccugaacgagacccacuucagcgacgacaucgagcagcaggccgacaacaugaucaccgagaugcugcagaaggaguacauggagagacagggcaagaccccccugggccugguggaccuguucguguucagcaccagcuucuaccugaucagcaucuuccugcaccuggugaagauccccacccacagacacaucgugggcaagagcugccccaagccccacagacugaaccacaugggcaucugcagcugcggccuguacaagcagcccggcgugcccgugaaguggaagagaugaggacuaguaauaaggaaacuguaugaaugucugugggcaggaagugaagagauccuucuguaaagguuuuuggaauuaugucugcugaauaauaaacuuuuuugaaauaauaaaucugguagaaaaaugagaucuaaaaaaaaaaaaaaaaaaaaaaaaaaaaaaaaaaaaaaaaaaaaaaaaaaaaaaaaaaaaaaaaugcaucccccccccccccccccccccccccccccccaaaggcucuuuucagagccaccagaauu

SEQ ID NO: 2950 - RNA, 1816 nt, Artificial Sequence
  mRNA product Design b-4 comprising derived and/or modified sequence from LASV(G1442-SLE-2011;Clade IV)__AIT17180__GPC (opt4)
gggagagucccgcagucggcguccagcggcucugcuuguucgugugugugucguugcaggccuuauucaagcuuaccaugggccagaucgugaccuucuuccaggaggugccccacgugaucgaggaggugaugaacaucgugcugaucgcccugagcauccuggccgugcugaagggccuguacaacguggccaccugcggccugaucggccuggugaccuuccugcugcugugcggcagaagcugcaccaccacccuguacaagggcguguacgagcugcagacccuggagcugaacauggagacccugaacaugaccaugccccugagcugcaccaagaacaacagccaccacuacaucagagugggcaacgagaccggccuggagcugacccugaccaacaccagcaucaucaaccacaaguucugcaaccugagcgacgcccacaagaagaaccuguacgaccacgcccugaugagcaucaucagcaccuuccaccugagcauccccaacuucaaccaguacgaggccaugagcugcgacuucaacggcggcaagaucagcgugcaguacaaccugagccacagcuacgccggcgacgccgccaaccacugcggcaccguggccaacggcgugcugcagaccuucaugagaauggccuggggcggcagcuacaucgcccuggacagcggcagaggcaacugggacugcaucaugaccagcuaccaguaccugaucauccagaacaccaccugggacgaccacugccaguucagcagacccagccccaucggcuaccugggccugcugagccagagaaccagagacguguacaucagcagaagacugcugggcaccuucaccuggacccugagcgacagcgagggcaaggacacccccggcggcuacugccugaccagauggaugcugaucgaggccgagcugaagugcuucggcaacaccgccguggccaagugcaacgagaagcacgacgaggaguucugcgacaugcugagacuguucgacuucaacaagcaggccauccagagacugaaggccgaggcccagaugagcauccagcugaucaacaaggccgugaacgcccugaucaacgaccagcugaucaugaagaaccaccugagagacaucaugggcauccccuacugcaacuacagcaaguacugguaccugaacaacaccgccaccggcaagaccagccugcccaagugcuggcugaucagcaacggcagcuaccugaacgagacccacuucagcgacgacaucgagcaggaggccgacaacaugaucaccgagaugcugcagaaggaguacauggagagacagggcaagaccccccugggccugguggaccuguucguguucagcaccagcuucuaccugaucagcaucuuccugcaccuggugaagauccccacccacagacacaucgugggcaagagcugccccaagccccacagacugaaccacaugggcaucugcagcugcggccuguacaagcagcccggcgugcccgugagauggaagagaugaggacuaguaauaaggaaacuguaugaaugucugugggcaggaagugaagagauccuucuguaaagguuuuuggaauuaugucugcugaauaauaaacuuuuuugaaauaauaaaucugguagaaaaaugagaucuaaaaaaaaaaaaaaaaaaaaaaaaaaaaaaaaaaaaaaaaaaaaaaaaaaaaaaaaaaaaaaaaugcaucccccccccccccccccccccccccccccccaaaggcucuuuucagagccaccagaauu

SEQ ID NO: 2951 - RNA, 1816 nt, Artificial Sequence
  mRNA product Design b-4 comprising derived and/or modified sequence from LASV(G3010-SLE-2013;Clade IV)__AIT17344__GPC (opt4)
gggagagucccgcagucggcguccagcggcucugcuuguucgugugugugucguugcaggccuuauucaagcuuaccaugggccagaucgugaccuucuuccaggaggugccccacgugaucgaggaggugaugaacaucgugcugaucgcccugagcauccuggccgugcugaagggccuguacaacuucgccaccugcggccuggugggccuggugaccuuccugcugcugugcggcagaagcugcaccaccagccuguacaagggcguguacgagcugcagacccuggagcugaacauggagacccugaacaugaccaugccccugagcugcaccaagaacaacagccaccacuacaucauggugggcaacgagaccggccuggagcugacccugaccaacaccagcaucaucaaccacaaguucugcaaccugagcgacgcccacaagaagaaccuguacaaccacgcccugaugagcaucaucagcaccuuccaccugagcauccccaacuucaaccaguacgaggccaugagcugcgacuucaacggcggcaagaucagcgugcaguacaaccugagccacagcuacgccggcgacgccgccagccacugcggcaccguggccaacggcgugcugcagaccuucaugagaauggccuggggcggcagcuacaucgcccuggacagcggcuacggcaagugggacugcaucaugaccagcuaccaguaccugaucauccagaacaccaccugggaggaccacugccaguucagcagacccagccccaucggcuaccugggccugcugagccagagaaccagagacaucuacaucagcagaagacugcugggcaccuucaccuggacccugagcgacagcgagggcaaggacacccccggcggcuacugccugaccagauggaugcugaucgaggccgagcugaagugcuucggcaacaccgccguggccaagugcaacgagaagcacgacgaggaguucugcgacaugcugagacuguucgacuucaacaagcaggccauccagagacugaagaccgaggcccagaugagcauccagcugaucaacaaggccgugaacgcccugaucaacgaccagcugaucaugaagaaccaccugagagacaucaugggcauccccuacugcaacuacagcaaguacugguaccugaaccacaccaccaccggcaagaccagccugcccaagugcuggcuggugagcaacggcagcuaccugaacgagacccacuucagcgacgacaucgagcagcaggccgacaacaugaucaccgagaugcugcagaaggaguacauggagagacagggcaagaccccccugggccugguggaccuguucguguucagcaccagcuucuaccugaucagcaucuuccugcaccuggugaagauccccacccacagacacaucgugggcaagagcugccccaagccccacagacugaaccacaugggcaucugcagcugcggccuguacaagcagcccggcgugcccgugagauggaagagaugaggacuaguaauaaggaaacuguaugaaugucugugggcaggaagugaagagauccuucuguaaagguuuuuggaauuaugucugcugaauaauaaacuuuuuugaaauaauaaaucugguagaaaaaugagaucuaaaaaaaaaaaaaaaaaaaaaaaaaaaaaaaaaaaaaaaaaaaaaaaaaaaaaaaaaaaaaaaaugcaucccccccccccccccccccccccccccccccaaaggcucuuuucagagccaccagaauu

SEQ ID NO: 2952 - RNA, 1816 nt, Artificial Sequence
  mRNA product Design b-4 comprising derived and/or modified sequence from LASV(G502-SLE-2009;Clade IV)__AIT17126__GPC (opt4)
gggagagucccgcagucggcguccagcggcucugcuuguucgugugugugucguugcaggccuuauucaagcuuaccaugggccagaucgugaccuucuuccaggaggugccccacgugaucgaggaggugaugaacaucgugcugaucgcccugagcauccuggccgugcugaagggccuguacaacuucgccaccugcggccuggugggccugcugaccuuccugcugcugugcggcagaagcugcaccaccggccuguacaagggcguguacgagcugcagacccuggagcugaacauggagacccugaacaugaccaugccccugagcugcaccaagaacaacagccaccacuacaucauggugggcaacgagaccggccuggagcugacccugaccaacaccagcaucaucaaccacaaguucugcaaccugagcgacgcccacaagaagaaccuguacgaccacgcccugaugagcaucaucagcaccuuccaccugagcauccccaacuucaaccaguacgaggccaugagcugcgacuucaacggcggcaagaucagcgugcaguacaaccugagccacagcuacgccggcgacgccgccgaccacugcggcaccguggccaacggcgugcugcagaccuucaugagaauggccuggggcggcagcuacaucgcccuggacagcggcagaggcagaugggacugcaucaugaccagcuaccaguaccugaucauccagaacaccaccugggaggaccacugccaguucagcagacccagccccaucggcuaccugggccugcugagccagagaaccagagacaucuacaucagcagaagacugcugggcaccuucaccuggacccugagcgacagcgagggcaaggacacccccggcggcuacugccugaccagauggaugcugaucgaggccgagcugaagugcuucggcaacaccgccguggccaagugcaacgagaagcacgacgaggaguucugcgacaugcugagacuguucgacuucaacaagcaggccauccagagacugaaggccgaggcccagaugagcauccagcugaucaacaaggccgugaacgcccugaucaacgaccagcuggugaugaagaaccaccugagagacaucaugggcauccccuacugcaacuacagcagauacugguaccugaaccacaccaccaccggcagaaccagccugcccaagugcuggcuggugagcaacggcagcuaccugaacgagacccacuucagcgacgacaucgagcagcaggccgacaacaugaucaccgagaugcugcagaaggaguacauggagagacagggcaagaccccccugggccugguggaccuguucguguucagcaccagcuucuaccugaucagcaucuuccugcaccuggugaagauccccacccacagacacaucgugggcaagagcugccccaagccccacagacugaaccacaugggcaucugcagcugcggccuguacaagcagcccggcgugcccgugaaguggaagagaugaggacuaguaauaaggaaacuguaugaaugucugugggcaggaagugaagagauccuucuguaaagguuuuuggaauuaugucugcugaauaauaaacuuuuuugaaauaauaaaucugguagaaaaaugagaucuaaaaaaaaaaaaaaaaaaaaaaaaaaaaaaaaaaaaaaaaaaaaaaaaaaaaaaaaaaaaaaaaugcaucccccccccccccccccccccccccccccccaaaggcucuuuucagagccaccagaauu

SEQ ID NO: 2953 - RNA, 1816 nt, Artificial Sequence
  mRNA product Design b-4 comprising derived and/or modified sequence from LASV(G733-SLE-2010;Clade IV)__AIT17154__GPC (opt4)
gggagagucccgcagucggcguccagcggcucugcuuguucgugugugugucguugcaggccuuauucaagcuuaccaugggccagaucgugaccuucuuccaggaggugccccacgugaucgaggaggugaugaacaucgugcugaucgcccugagcauccuggccgugcugaagggccuguacaacuucgccaccugcggcaucgugggccuggugagcuuccugcugcugugcggcagaagcugcaccaccagccuguacaagggcguguacgagcugcagacccuggagcugaacauggagacccugaacaugaccaugccccugagcugcaccaagaacaacagccaccacuacaucauggugggcaacgagaccggccuggagcugacccugaccaacaccagcaucaucaaccacaaguucugcaaccugagcgacgcccacaagaagaaccuguacgaccacgcccugaugagcaucaucagcaccuuccaccugagcauccccaacuucaaccaguacgaggccaugagcugcgacuucaacggcggcaagaucagcgugcaguacaaccugagccacagcuacgccggcgacgccgccaaccacugcggcaccaucgccaacggcgugcugcagaccuucaugagaauggccuggggcggcagcuacaucgcccuggacagcggcagagacagaugggacugcaucaugaccagcuaccaguaccugaucauccagaacaccaccugggaggaccacugccaguucagcagacccagccccaucggcuaccugggccugcugagccagagaaccagagacaucuacaucagcagaagacugcugggcaccuucaccuggacccugagcgacagcgagggcaaggacacccccggcggcuacugccugaccagauggaugcugaucgaggccgagcugaagugcuucggcaacaccgccguggccaagugcaacgagaagcacgacgaggaguucugcgacaugcugagacuguucgacuucaacaagcaggccauccagagacugaaggccgaggcccagaugagcauccagcugaucaacaaggccgugaacgcccugaucaacgaccagcugaucaugaagaaccaccugagagacaucaugggcauccccuacugcaacuacagcaaguacugguaccugaaccacaccaccaccggcaagaccagccugcccaagugcuggcuggugagcaacggcagcuaccugaacgagacccacuucagcgacgacaucgagcagcaggccgacaacaugaucaccgagaugcugcagaaggaguacauggagagacagggcaagaccccccugggccugguggaccuguucguguucagcaccagcuucuaccugaucagcaucuuccugcaccuggugaagauccccacccacagacacguggugggcaagagcugccccaagccccacagacugaaccacaugggcaucugcagcugcggccuguacggccagcccggcgugcccgugaaguggaagagaugaggacuaguaauaaggaaacuguaugaaugucugugggcaggaagugaagagauccuucuguaaagguuuuuggaauuaugucugcugaauaauaaacuuuuuugaaauaauaaaucugguagaaaaaugagaucuaaaaaaaaaaaaaaaaaaaaaaaaaaaaaaaaaaaaaaaaaaaaaaaaaaaaaaaaaaaaaaaaugcaucccccccccccccccccccccccccccccccaaaggcucuuuucagagccaccagaauu

SEQ ID NO: 2954 - RNA, 1816 nt, Artificial Sequence
  mRNA product Design b-4 comprising derived and/or modified sequence from MOPV/LASV reassortant(IGS-1;Clade IV)__AFY05576__GPC (opt4)
gggagagucccgcagucggcguccagcggcucugcuuguucgugugugugucguugcaggccuuauucaagcuuaccaugggccagaucgugaccuucuuccaggaggugccccacgugaucgaggaggugaugaacaucgugcugaucgcccugagcgugcuggccgugcugaagggccuguacaacuucgccaccugcggccuggugggccuggugaccuuccugcugcugugcggcagaagcugcaccaccagccuguacaagggcguguacgagcugcagacccuggagcugaacauggagacccugaacaugaccaugccccugagcugcaccaagaacaacagccaccacuacaucauggugggcaacgagaccggccuggagcugacccugaccaacaccagcaucaucaaccacaaguucugcaaccugagcgacgcccacaagaagaaccuguacgaccacgcccugaugagcaucaucagcaccuuccaccugagcauccccaacuucaaccaguacgaggccaugagcugcgacuucaacggcggcaagaucagcgugcaguacaaccugagccacagcuacgccggcgacgccgccaaccacugcggcaccguggccaacggcgugcugcagaccuucaugagaauggccuggggcggcagcuacaucgcccuggacagcggcagaggcaacugggacugcaucaugaccagcuaccaguaccugaucauccagaacaccaccugggaggaccacugccaguucagcagacccagccccaucggcuaccugggccugcugagccagagaaccagagacaucuacaucagcagaagacugcugggcaccuucaccuggacccugagcgacagcgagggcgaggacacccccggcggcuacugccugaccagauggaugcugaucgaggccgagcugaagugcuucggcaacaccgccguggccaagugcaacgagaagcacgacgaggaguucugcgacaugcugagacuguucgacuucaacaagcaggccauccagagacugaaggccgaggcccagaugagcauccagcugaucaacaaggccgugaacgcccugaucaacgaccagcugaucaugaagaaccaccugagagacaucaugggcauccccuacugcaacuacagcaaguacugguaccugaaccacaccaccaccggcagaaccagccugcccaagugcuggcuggugagcaacggcagcuaccugaacgagacccacuucagcgacgacaucgagcagcaggccgacaacaugaucaccgagaugcugcagaaggaguacauggagagacagggcaagaccccccugggccugguggaccuguucguguucagcaccagcuucuaccugaucagcaucuuccugcaccuggugaagauccccacccacagacacaucgugggcaagagcugccccaagccccacagacugaaccacaugggcaucugcagcugcggccuguacaagcagcccggcgugcccgugaaguggaagagaugaggacuaguaauaaggaaacuguaugaaugucugugggcaggaagugaagagauccuucuguaaagguuuuuggaauuaugucugcugaauaauaaacuuuuuugaaauaauaaaucugguagaaaaaugagaucuaaaaaaaaaaaaaaaaaaaaaaaaaaaaaaaaaaaaaaaaaaaaaaaaaaaaaaaaaaaaaaaaugcaucccccccccccccccccccccccccccccccaaaggcucuuuucagagccaccagaauu

SEQ ID NO: 2955 - RNA, 1816 nt, Artificial Sequence
  mRNA product Design b-4 comprising derived and/or modified sequence from LASV(LM765-SLE-2012;Clade IV)__AIT17814__GPC (opt4)
gggagagucccgcagucggcguccagcggcucugcuuguucgugugugugucguugcaggccuuauucaagcuuaccaugggccagaucgugaccuucuuccaggaggugccccacgugaucgaggaggugaugaacaucgugcugaucgcccugagcauccuggccgugcugaagggccuguacaacuucgccaccugcggccuggugggccuggugaccuuccugcugcugugcggcagaagcugcaccaccagccuguacaagggcguguacgagcugcagacccuggagcugaacauggagacccugaacaugaccaugccccugagcugcaccaagaacaacagccaccacuacaucauggugggcaacgagaccggccuggagcugacccugaccaacaccagcaucaucgaccacaaguucugcaaccugagcgacgcccacagaaagaaccuguacgaccacgcccugaugagcaucaucagcaccuuccaccugagcauccccaacuucaaccaguacgaggccaugagcugcgacuucaacggcggcaagaucagcgugcaguacaaccugagccacagcuacgccaaggacgccgccgaccacugcggcaccguggccaacggcgugcugcagaccuucaugagaauggccuggggcggcagcuacaucgcccuggacagcggcagaggcagaugggacugcaucaugaccagcuaccaguaccugaucauccagaacaccaccugggaggaccacugccaguucagcagacccagccccaucggcuaccugggccugcugagccagagaaccagagacaucuacaucagcagaagacugcugggcaccuucaccuggacccugagcgacagcgagggcaaggacacccccggcggcuacugccugaccagauggaugcugaucgaggccgagcugaagugcuucggcaacaccgccguggccaagugcaacgagaagcacgacgaggaguucugcgacaugcugagacuguucgacuucaacaagcaggccauccagagacugaaggccgaggcccagaugagcauccagcugaucaacaaggccgugaacgcccugaucaacgaccagcugaucaugaagaaccaccugagagacaucaugggcauccccuacugcaacuacagcaaguacugguaccugaaccacaccaccaccggcaagaccagccugcccaagugcuggcuggugagcaacggcagcuaccugaacgagacccacuucagcgacgacaucgagcagcaggccgacaacaugaucaccgagaugcugcagaaggaguacauggagagacagggcaagaccccccugggccugguggaccuguucguguucagcaccagcuucuaccugaucagcaucuuccugcaccuggugaagauccccacccacagacacaucgugggcaagcccugccccaagccccacagacugaaccacaugggcaucugcagcugcggccuguacaagcagcccggcgugcccgugaaguggaagagaugaggacuaguaauaaggaaacuguaugaaugucugugggcaggaagugaagagauccuucuguaaagguuuuuggaauuaugucugcugaauaauaaacuuuuuugaaauaauaaaucugguagaaaaaugagaucuaaaaaaaaaaaaaaaaaaaaaaaaaaaaaaaaaaaaaaaaaaaaaaaaaaaaaaaaaaaaaaaaugcaucccccccccccccccccccccccccccccccaaaggcucuuuucagagccaccagaauu

SEQ ID NO: 2956 - RNA, 1816 nt, Artificial Sequence
  mRNA product Design b-4 comprising derived and/or modified sequence from LASV(LM776-SLE-2012;Clade IV)__AIT17824__GPC (opt4)
gggagagucccgcagucggcguccagcggcucugcuuguucgugugugugucguugcaggccuuauucaagcuuaccaugggccagaucgugaccuucuuccaggaggugccccacgugaucgaggaggugaugaacaucgugcugaucgcccugagcauccuggccgugcugaagggccuguacaacuucgccaccugcggccuggugggccuggugaccuuccugcugcugugcggcagaagcugcaccaccagcguguacaagggcguguacgagcugcagacccuggagcugaacauggagacccugaacaugaccaugccccugagcugcaccaagaacaacagccaccacuacaucauggugggcaacgagaccggccuggagcugacccugaccaacaccagcaucaucaaccacaaguucugcaaccugagcgacgcccacaagaagaaccuguacgaccacgcccugaugagcaucaucagcaccuuccaccugagcauccccaacuucaaccaguacgaggccaugagcugcgacuucaacggcggcaagaucagcgugcaguacaaccugagccacagcuacgccggcgacgccgccaaccacugcggcaccguggccaacggcgugcugcagaccuucaugagaauggccuggggcggcagcuacaucgcccuggacagcggccacggcaagugggacugcaucaugaccagcuaccaguaccugaucauccagaacaccaccugggaggaccacugccaguucagcagacccagccccaucggcuaccugggccugcugagccagagaaccagagacaucuacaucagcagaagacugcugggcaccuucaccuggacccugagcgacagcgagggcaaggacacccccggcggcuacugccugaccagauggaugcugaucgaggccgagcugaagugcuucggcaacaccgccguggccaagugcaacgagaagcacgacgaggaguucugcgacaugcugagacuguucgacuucaacaagcaggccauccagagacugaaggccgaggcccagaugagcauccagcugaucaacaaggccgugaacgcccugaucaacgaccagcugaucaugaagaaccaccugagagacaucaugggcauccccuacugcaacuacagcaaguacugguaccugaaccacaccaccaccggcaagaccagccugcccaagugcuggcuggugagcaacggcagcuaccugaacgagacccacuucagcgacgacaucgagcagcaggccgacaacaugaucaccgagaugcugcagaaggaguacauggagagacagggcaagaccccccugggccugguggaccuguucguguucagcaccagcuucuaccugaucagcaucuuccugcaccuggugaagauccccacccacagacacaucgugggcaagagcugccccaagccccacagacugaaccacaugggcaucugcagcugcggccuguacaagcagcccggcgugcccgugagauggaagagaugaggacuaguaauaaggaaacuguaugaaugucugugggcaggaagugaagagauccuucuguaaagguuuuuggaauuaugucugcugaauaauaaacuuuuuugaaauaauaaaucugguagaaaaaugagaucuaaaaaaaaaaaaaaaaaaaaaaaaaaaaaaaaaaaaaaaaaaaaaaaaaaaaaaaaaaaaaaaaugcaucccccccccccccccccccccccccccccccaaaggcucuuuucagagccaccagaauu

SEQ ID NO: 2957 - RNA, 1816 nt, Artificial Sequence
  mRNA product Design b-4 comprising derived and/or modified sequence from LASV(Mad39;Clade IV)__ANH09722__GPC (opt4)
gggagagucccgcagucggcguccagcggcucugcuuguucgugugugugucguugcaggccuuauucaagcuuaccaugggccagaucgugaccuucuuccaggaggugccccacgugaucgaggaggugaugaacaucgugcugaucgcccugagcauccuggccgugcugaagggccuguacaacguggccaccugcggccugaucggccuggugaccuuccugcugcugugcggcagaagcugcaccaccacccuguacaagggcguguacgagcugcaggcccuggagcugaacauggagacccugaacaugaccaugccccugagcugcaccaagaacaacagccaccacuacaucagagugggcaacgagaccggccuggagcugacccugaccaacaccagccugaucaaccacaaguucugcaaccugagcgacgcccacaagaagaaccuguacgaccacgcccugaugagcaucaucagcaccuuccaccugagcauccccaacuucaaccaguacgaggccaugagcugcgacuucaacgacggcaagaucagcgugcaguacaaccugagccacaccuacgccggcgacaccgccaaccacugcggcaccguggccaacggcgugcugcagaccuucaugagaauggccuggggcggcagcuacaucgcccuggacagcggcagaggcggcugggacugcaucaugaccagcuaccaguaccugaucauccagaacaccaccugggaggaccacugccaguucagcagacccagccccaucggcuaccugggccugcugagccagagaaccagagacaucuacaucagcagaagacugcugggcaccuucaccuggacccugagcgacagcgagggcaaggacacccccggcggcuacugccugaccagauggaugcugaucgaggccgagcugaagugcuucggcaacaccgccguggccaagugcaacgagaagcacgacgaggaguucugcgacaugcugagacuguucgacuucaacaagcaggccauccagagacugaaggccgaggcccagaugagcauccagcugaucaacaaggccgugaacgcccugaucaacgaccagcugaucaugaagaaccaccugagagacaucaugggcauccccuacugcaacuacagcaaguacugguaccugaaccacaccgugaccggcaagaccagccugcccaagugcuggcuggugagcaacggcagcuaccugaacgagacccacuucagcgacgacaucgagcagcaggccgacaacaugaucaccgagaugcugcagaaggaguacauggagagacagggcaagaccccccugggccugguggaccuguucguguucagcaccagcuucuaccugaucagcaucuuccugcaccuggugaagauccccacccacagacacguggugggcaagcccugccccaagccccacagacugaaccacaugggcaucugcagcugcggcuucuacaagcagcccggcgugcccgugagauggaagagaugaggacuaguaauaaggaaacuguaugaaugucugugggcaggaagugaagagauccuucuguaaagguuuuuggaauuaugucugcugaauaauaaacuuuuuugaaauaauaaaucugguagaaaaaugagaucuaaaaaaaaaaaaaaaaaaaaaaaaaaaaaaaaaaaaaaaaaaaaaaaaaaaaaaaaaaaaaaaaugcaucccccccccccccccccccccccccccccccaaaggcucuuuucagagccaccagaauu

SEQ ID NO: 2958 - RNA, 1816 nt, Artificial Sequence
  mRNA product Design b-4 comprising derived and/or modified sequence from LASV(Z0947-SLE-2011;Clade IV)__AIT17840__GPC (opt4)
gggagagucccgcagucggcguccagcggcucugcuuguucgugugugugucguugcaggccuuauucaagcuuaccaugggccagaucgugaccuucuuccaggaggugccccacgugaucgaggaggugaugaacaucgugcugaucgcccugagcauccuggccgugcugaagggccuguacaacuucgccaccugcggccuggugggccuggugaccuuccugcugcugugcggcagaagcugcaccaucagccuguacaagggcguguacgagcugcagacccuggagcugaacauggagacccugaacaugaccaugccccugagcugcaccaagaacaacagccaccacuacaucauggugggcaacgagaccggccuggagcugacccugaccaacaccagcaucaucaaccacaaguucugcaaccugagcgacgcccacaagaagaaccuguacgaccacgcccugaugagcaucaucagcaccuuccaccugagcauccccaacuucaaccaguacgaggccaugagcugcgacuucaacggcggcaagaucagcgugcaguacaaccugagccacagcuacgccggcgacgccgccaaccacugcggcaccguggccaacggcgugcugcagaccuucaugagaauggccuggggcggcagcuacaucgcccuggacagcggcagagacagaugggacugcaucaugaccagcuaccaguaccugaucauccagaacaccaccugggaggaccacugccaguucagcagacccagccccaucggcuaccugggccugcugagccagagaaccagagacaucuacaucagcagaagacugcugggcaccuucaccuggacccugagcgacagcgagggcaaggacacccccggcggcuacugccugaccagauggaugcugaucgaggccgagcugaagugcuucggcaacaccgccguggccaagugcaacgagaagcacgacgaggaguucugcgacaugcugagacuguucgacuucaacaagcaggccauccagagacugaaggccgaggcccagaugagcauccagcugaucaacaaggccgugaacgcccugaucaacgaccagcugaucaugaagaaccaccugagagacaucaugggcauccccuacugcaacuacagcaaguacugguaccugaaccacaccaccaccggcaagaccagccugcccaagugcuggcuggugagcaacggcagcuaccugaacgagacccacuucagcgacgacaucgagcagcaggccgacaacaugaucaccgagaugcugcagaaggaguacauggagagacagggcaagaccccccugggccugguggaccuguucguguucagcaccagcuucuaccugaucagcaucuuccugcaccuggugaagauccccacccacagacacaucgugggcaagcccugccccaagccccacagacugaaccacaugggcaucugcagcugcggccuguacaagcagcccggcgugcccgugaaguggaagagaugaggacuaguaauaaggaaacuguaugaaugucugugggcaggaagugaagagauccuucuguaaagguuuuuggaauuaugucugcugaauaauaaacuuuuuugaaauaauaaaucugguagaaaaaugagaucuaaaaaaaaaaaaaaaaaaaaaaaaaaaaaaaaaaaaaaaaaaaaaaaaaaaaaaaaaaaaaaaaugcaucccccccccccccccccccccccccccccccaaaggcucuuuucagagccaccagaauu

SEQ ID NO: 2959 - RNA, 1816 nt, Artificial Sequence
  mRNA product Design b-4 comprising derived and/or modified sequence from LASV(Josiah;Clade IV)__NP_694870__GPC (opt5)
gggagagucccgcagucggcguccagcggcucugcuuguucgugugugugucguugcaggccuuauucaagcuuaccaugggccagaucgugaccuucuuucaagaggucccccacguuauugaagaggugaugaacaucgugcugauugcccucagcguccuggcugugcuuaaggggcuguacaauuucgccacaugcggacucguuggccuggugacguuucuucugcucugugggagauccugcaccacaucucuguauaaaggagucuacgaacugcagacccucgagcugaacauggaaacacuuaauaugaccaugccucugagcuguacaaagaacaauucccaucacuauaucauggugggcaacgagaccgggcucgagcugacgcuuaccaauacaucuauuaucaaccauaaauucugcaaucugagcgacgcgcacaagaaaaaccucuacgaucaugcucugauguccaucauuucuaccuuucaccugagcaucccgaauuucaaccaguaugaagccauguccugugacuuuaauggaggcaagauuagcguucaguacaaccucucucacuccuaugccggcgaugcugccaaucauugcgggacaguggcuaacggaguccugcaaaccuucaugcggauggccuggggcgggagcuacaucgcgcuugacucuggacgcggcaacugggauuguauuaugacguccuaccaguaucugaucauucagaauacaaccugggaggaccacugccaguuuagcagacccucuccuaucggguaccucggacugcuuucccaacggacacgcgauaucuauauuagcagacggcugcucggcaccuucaccuggacacuguccgacucugaaggcaaggauacgcccgggggauacugucugacccgcuggaugcucaucgaggccgagcugaaaugcuuuggcaacacagcuguggccaaguguaaugaaaaacaugacgaggaguucugcgauaugcuuagacuguuugacuucaacaagcaggcuauucagcggcucaaagccgaagcgcagaugagcauccaacugauuaauaaggccgugaacgcucuuaucaaugaucagcugaucaugaagaaccaccuccgcgacauuauggggaucccuuauugcaauuacuccaaauauugguaccugaaccacaccacaaccggaagaacgagccugcccaaguguuggcucgucucuaauggcuccuaccugaacgaaacacauuucagcgacgauauugagcagcaagccgacaauaugaucaccgagaugcuucagaaagaauauauggagcggcaggggaagaccccucugggacucguugaucuguuuguguucucuaccagcuuuuaccugauuuccaucuuccuucaccucgugaaaaucccgacacaucgccacauugucggcaagucuugccccaaaccucauagacugaaccacaugggcaucuguagcugcgggcuguauaagcagcccggagugccuguuaaguggaaacggugaggacuaguaauaaggaaacuguaugaaugucugugggcaggaagugaagagauccuucuguaaagguuuuuggaauuaugucugcugaauaauaaacuuuuuugaaauaauaaaucugguagaaaaaugagaucuaaaaaaaaaaaaaaaaaaaaaaaaaaaaaaaaaaaaaaaaaaaaaaaaaaaaaaaaaaaaaaaaugcaucccccccccccccccccccccccccccccccaaaggcucuuuucagagccaccagaauu

SEQ ID NO: 2960 - RNA, 1813 nt, Artificial Sequence
  mRNA product Design b-4 comprising derived and/or modified sequence from LASV(LP;Clade I)__AAF86701__GPC (opt5)
gggagagucccgcagucggcguccagcggcucugcuuguucgugugugugucguugcaggccuuauucaagcuuaccaugggccagaucauuaccuucuuucaagaggugccccacgucaucgaagagguuaugaacauugugcugaucgcccucagccugcuugcuauucugaaggggcucuacaauaucgccacaugcggaaucauuggccugguggcguuccuuuuucugugugggaaauccugcucucucacgcugaagggaggcuaugaacugcagacccucgagcugaacauggaaacacuuaauaugaccaugccucugagcuguaccaaaaacuccucucaucacuacaucagagucgggaaugagacaggacucgagcugacacuuaccaacacgagcauuaucaaucauaaguucugcaaccuguccgacgcucacaaaaagaaucucuaugaucaugcccugaugucuauuaucagcaccuuucaccuguccauuccgaacuucaaucaguacgaagccaugagcugugacuuuaacggcggcaagaucucugugcaguauaaucucucccacagcuacgcuggggaugccgcugagcauugcggaacaguugccaacggcgugcugcaaaccuucaugcggauggcguggggagggcgcuauaucgcccuugacucuggcaaagggaauugggauuguauuaugacauccuaccaguaccugaucauucagaacaccacgugggaagaccacugccaguuuagcagacccucuccuaucggauaucucggccugcuuucccaacggacacgcgauauuuacaucagcagacggcugcucggcaccuucacauggacccuguccgacucugaggggaacgagacccccggaggcuauugucugacacgcuggaugcucaucgaagcugagcugaagugcuuugggaauacggccgucgcuaaauguaacgaaaagcaugaugaggaguucugcgacaugcuuagacuguuugauuucaauaaacaggccauucggcgccucaaggcggaagcccagaugagcauccagcugauuaacaaggcugugaaugcccuuaucaacgaccaacugauuaugaaaaaucaccucagagauaucaugggaaucccuuacugcaacuauuccaaguacugguaucugaaucacaccagcucuggccggacaucccugcccaaauguuggcucauuagcaacgggucuuaccugaaugagacccaguucagcgacgacaucgaacagcaagcugauaacaugauuacagagaugcuucagaaggaauacaucgagcgccagggaaaaaccccucugggccucguugacauuuuuaucuucuccacgucuuuuuaucugauuagcaucuuccugcaucuuaucaagauuccgacacacagacauaucgugggcaaacccugcccuaagccccaccggcucaaucauaugggggucuguuccugcggacuguacaagcacccuggcgugcccaccaaauggaagcgcugaggacuaguaauaaggaaacuguaugaaugucugugggcaggaagugaagagauccuucuguaaagguuuuuggaauuaugucugcugaauaauaaacuuuuuugaaauaauaaaucugguagaaaaaugagaucuaaaaaaaaaaaaaaaaaaaaaaaaaaaaaaaaaaaaaaaaaaaaaaaaaaaaaaaaaaaaaaaaugcaucccccccccccccccccccccccccccccccaaaggcucuuuucagagccaccagaauu

SEQ ID NO: 2961 - RNA, 1813 nt, Artificial Sequence
  mRNA product Design b-4 comprising derived and/or modified sequence from LASV(803213;Clade II)__AAF86703__GPC (opt5)
gggagagucccgcagucggcguccagcggcucugcuuguucgugugugugucguugcaggccuuauucaagcuuaccaugggccagaucauuaccuucuuucaagaggugccccacgucaucgaagagguuaugaacauugugcugaucgcccucagccugcuugcuauucugaaggggaucuacaauguggccacaugcggacucuucggccugaucuccuuucuucugcucugugggagaucuugcagcgucacguauaaaggaguguacgaacugcagacccuggagcucaacauggcgaaucugaacaugacaaugccucuuuccuguaccaagaauaacucucaucacuauauuaugguuggcaaugaaacagggcuggagcucacccugacaaacaccagcaucauuaaucauaaauucugcaaccuuuccgacgcucacaagaaaaaucuguacgaucaugcccucaugucuaucauuagcacguuucaccuguccaucccgaacuucaaucaguaugaggccaugagcugugacuuuaacggaggcaagauuucugugcaguacaaucugucccacagcuucgcugucgaugccgcuaaccauugcggcaccaucgccaacggggugcuccaaacauuuaugcggauggcguggggaggcucuuauaucgcccuggacuccgggaagggaaauugggauuguauuaugaccagcuaccaguaccuuaucauucagaacacaaccugggaagaccacugccaguucucucgccccuccccuaucggcuaucuggggcuccugagccaaagaacgcgggauauuuacaucucccgcagacuucugggaacauuuaccuggacacucucugacagcgagggcaaugaagcucccggcggguauugucugacccgguggaugcugaucgaggccgagcucaaaugcuucggaaacaccgcuguugccaaguguaaugaaaaacaugaugaggaauuuugcgacaugcugcgccuuuucgauuucaacaagcaggcgauuaaaagacugaagacagaggcccagauguccauccagcucauuaauaaggcugugaacgcccugaucaaugaccaacuuauuaugaaaaaccaucugcgggauaucaugggcaucccuuacugcaauuauagccgcuacugguaucucaaccacacggucaccgggaagacaucucugcccagauguuggcugguguccaauggaagcuaccucaacgaaacccacuuuucugacgacauugagcagcaggcugauaauaugaucacagagaugcugcaaaaagaauacauggaccggcagggcaagaccccucuugggcugguggaucucuucgucuuuagcacguccuucuaucugauuucuaucuuucugcaccuuguuaaaauuccgacacaucgccacaucgugggaaagcccugcccuaaaccccauagacucaaccacaugggcauuuguagcugcggccuguacaagcacccuggggugcccgucaaguggaaacggugaggacuaguaauaaggaaacuguaugaaugucugugggcaggaagugaagagauccuucuguaaagguuuuuggaauuaugucugcugaauaauaaacuuuuuugaaauaauaaaucugguagaaaaaugagaucuaaaaaaaaaaaaaaaaaaaaaaaaaaaaaaaaaaaaaaaaaaaaaaaaaaaaaaaaaaaaaaaaugcaucccccccccccccccccccccccccccccccaaaggcucuuuucagagccaccagaauu

SEQ ID NO: 2962 - RNA, 1813 nt, Artificial Sequence
  mRNA product Design b-4 comprising derived and/or modified sequence from LASV(GA391;Clade III)__CAA36645__GPC (opt5)
gggagagucccgcagucggcguccagcggcucugcuuguucgugugugugucguugcaggccuuauucaagcuuaccaugggccagaucgugaccuucuuucaagaggucccccacguuauugaagaggugaugaacaucgugcugauugcccucagcauccuggcuauucuuaaggggcuguacaaugucgccacaugcggacucaucggccuggugacguuccuucugcucuccgggagaucuuguagccugaucuauaaaggaaccuacgaacugcagacacucgagcugaacauggaaacccuuaauaugacaaugccucuguccugcaccaagaacaauucucaucacuauauucggguuggcaacgagacagggcucgagcugacccuuacgaauaccagcauccugaaccauaaauuuuguaaucucuccgacgcgcacaagcgcaaccuguacgaucauucucugaugagcauuaucuccacauuccaccucagcauuccgaauuuuaaccaguaugaagcuaugucuugcgacuucaauggaggcaaaaucaccgugcaguacaaccugucccacagcuuugccgucgaugccgcuggccauugugggacacuugccaauggagugcugcaaaccuucaugagaauggcuuggggcgggucuuauauugcccucgacuccggacggggcaacugggauugcaucaugacgagcuaccaguaccugaucauucagaacacaaccugggacgaucacugucaguuuucucgccccuccccuaucggguaucuuggacugcucagccaaagaacacgggacauuuacaucucccgcagacugcugggcaccuucaccuggacacucucugauagcgagggcaaugaaacgcccgggggauauugccugacccgguggaugcuuauugaggcggagcugaaguguuuuggcaacacagccguugcuaagugcaaugaaaaacaugacgaggaguucugugauaugcuccgccuguuugacuucaacaagcaggccaucagacggcuuaaaaccgaagcucagauguccauccagcugauuaauaaggccgugaacgcgcucaucaaugaucaacugauuaugaaaaaccaucugcgcgacaucauggggauuccuuacugcaauuauagcagauacugguaucucaaccacacaucuaccggaaagacgucccugccccggugcuggcuuaucagcaauggcucuuaccugaacgaaacaaaguucagcgacgauaucgagcagcaggccgacaauaugauuaccgagaugcuccaaaaagaauacaucgaucgccaggggaagaccccucugggacuggucgaccuuuuuguguucuccacaucuuuuuaucucauuagcaucuuccugcaccuggugaaaauuccgacccacagacauaucgucggcaagcccuguccuaaaccccaccggcucaaccauaugggcauuugcuccugugggcuguacaagcagccuggaguucccgugagauggaaacgcugaggacuaguaauaaggaaacuguaugaaugucugugggcaggaagugaagagauccuucuguaaagguuuuuggaauuaugucugcugaauaauaaacuuuuuugaaauaauaaaucugguagaaaaaugagaucuaaaaaaaaaaaaaaaaaaaaaaaaaaaaaaaaaaaaaaaaaaaaaaaaaaaaaaaaaaaaaaaaugcaucccccccccccccccccccccccccccccccaaaggcucuuuucagagccaccagaauu

SEQ ID NO: 2963 - RNA, 1816 nt, Artificial Sequence
  mRNA product Design b-4 comprising derived and/or modified sequence from LASV(AV;Clade V)__CCA30314__GPC (opt5)
gggagagucccgcagucggcguccagcggcucugcuuguucgugugugugucguugcaggccuuauucaagcuuaccaugggccagaucgugaccuucuuucaagaggucccccacguuauugaagaggugaugaacaucgugcugauugcccucagcauccuggcuguccuuaaggggcuguacaauauugccacaugcggacucaucggccugaucacguuccuucugcucugugggagauccugcucuagcaaccuguauaaaggaguguacgaacugcagucccucgaccugaauauggagacccuuaacaugacaaugccucugucuuguaccaagaauaacagccaucacuauauucggguuggcaaugauacagggcucgaacugacccuuacaaacaccuccauccugaaucauaaauuuugcaaccucucugacgcgcacaagaaagaucuguacgaccaugcucugaugagcauuaucuccacguuccaccucagcauuccgaauuuuaaccaguaugaggccaugucuugugauuucaauggaggcaagaucuccgugcaguacaaccugagccacucuuaugccauugacgcugccaaucauugcggcaccgucgcuaacgggauccuucaaacauuuaugcgcauggccuggggaggcuccuacaucgcgcuggauagcgggagaggaaacugggacuguauuaugaccucuuaccaguaucucaucauucagaauacaaccugggagaaccacugccaguucucccggcccagcccuaucggcuaccuggggcuucugucccaacgcacgagagauauuuauaucucucggcgccuccugggaacauuuaccuggacacugagcgacuccgaaggcaaugccacccccggcggguacugucucaccagauggaugcugaucgaggcugaacuuaagugcuucggaaacacagccguggcuaaauguaaugagaagcaugaugaggaauuuugcgacaugcugcgccucuucgauuuuaacaaacaggccauuagccggcugaagucugaggcgcagauguccauccagcuuauuaauaaagccguuaacgcucugaucaaugaccaacucauuaugaagaaccaccugagagacaucaugggcaucccuuauugcaauuacagcaaguauugguaccugaaccacacgauuaccgggaaaacaucucuccccaaguguuggcuggugagcaauggauccuaccuuaacgaaacccauuucucugaugacaucgagcagcaggccgauaauaugauuacagaaaugcugcaaaaagaguauauggagcggcagggcaagaccccucucgggcuggucgaccuguucguguuuagcacguccuucuaccuuaucagcauuuuucuccgccuggugaaaaucccgacacacagacauauugucggaaagcccugcccuaaaccccaccggcugaaccauaugggcaucuguucuugcggccucuauaagcagccugggguucccgugcgcuggaagagaugaggacuaguaauaaggaaacuguaugaaugucugugggcaggaagugaagagauccuucuguaaagguuuuuggaauuaugucugcugaauaauaaacuuuuuugaaauaauaaaucugguagaaaaaugagaucuaaaaaaaaaaaaaaaaaaaaaaaaaaaaaaaaaaaaaaaaaaaaaaaaaaaaaaaaaaaaaaaaugcaucccccccccccccccccccccccccccccccaaaggcucuuuucagagccaccagaauu

SEQ ID NO: 2964 - RNA, 1813 nt, Artificial Sequence
  mRNA product Design b-4 comprising derived and/or modified sequence from LASV(Togo/2016/7082;Clade VI)__AMR44577__GPC (opt5)
gggagagucccgcagucggcguccagcggcucugcuuguucgugugugugucguugcaggccuuauucaagcuuaccaugggccagaucauuaccuucuuucaagaggugccccacgucaucgaagagguuaugaacauugugcugaucgcccucagccugcuugcuauucugaaggggguguacaaugucgccacaugcggaaucaucggccucgugacguuccuguuucuuugugggagauccugcucucugauuuauaaaggaagcuacgaacuccagacccuggagcugaacauggaaacacucaauaugaccaugccucuguccuguacaaagaacucuagccaucacuauauccggguuggcaaugagaccgggcuugagcugacacucaccaacacguccauuaucaaucauaaauucugcaaccugucugacgcgcacaagcgcaaucuuuacgaucaugcucugaugagcauucucuccaccuuucaccugagcaucccgaacuucaaucaguaugaagccaugucuugugacuuuaacggaggcaaaauuuccgugcaguacaaucugagccacgccuaugcugucgaugccgcugagcauugcggcacaguggccaacgggguucuccaaaccuucaugagaauggcguggggaggcucuuacaucgcccuggacuccgggcggggaaauugggauuguaucaugacaagcuaccaguaucuuauuauccagaacaccacgugggaagaccacugccaguuuucucgccccuccccuauuggcuaccuggggcuccugagccaaagaacacgggauaucuauauuucccgcagacuucugggaaccuucacauggacccucucugacagcgagggcaacgagacccccggcggguacugucugacacgguggaugcugaucgaagcugagcucaagugcuuuggaaauacggccguggcuaaguguaacgaaaaacaugaugaggaguucugcgacaugcugcgccuuuuugauuucaauaagcaggccauccagagacugaaauccgaagcgcagaugagcauucaacucaucaacaaggccgucaaugcucugauuaacgaccagcuuaucaugaaaaaucaucugcgggauaugaugggcauuccuuauugcaacuacucuaaguauugguaccucaaucacaccuccagcgggcgcacaucucugcccaaguguuggcuggugagcaacggauccuaccucaaugagacccacuucucugacgacaucgaacagcaagccgauaacaugaucacagagaugcugcagaaagaauauauugacagacagggcaagaccccucuugggcugguggaucucuuugucuucagcacguccuuuuaccugaucagcauuuuccugcaccuuaucaaaauuccgacacaucggcacaucguuggaaagcccugcccuaaaccccaucgccucaaucacaugggcauuuguucuugcggccuguauaagcagccuggggugcccaccagauggaaacggugaggacuaguaauaaggaaacuguaugaaugucugugggcaggaagugaagagauccuucuguaaagguuuuuggaauuaugucugcugaauaauaaacuuuuuugaaauaauaaaucugguagaaaaaugagaucuaaaaaaaaaaaaaaaaaaaaaaaaaaaaaaaaaaaaaaaaaaaaaaaaaaaaaaaaaaaaaaaaugcaucccccccccccccccccccccccccccccccaaaggcucuuuucagagccaccagaauu

SEQ ID NO: 2965 - RNA, 1813 nt, Artificial Sequence
  mRNA product Design b-4 comprising derived and/or modified sequence from LASV(KAK-428;Clade n.d. (VII))__ANH09740__GPC (opt5)
gggagagucccgcagucggcguccagcggcucugcuuguucgugugugugucguugcaggccuuauucaagcuuaccaugggccagaucgugaccuucuuucaagaggucccccacguuauugaagaggugaugaacaucgugcugauugcccucagccugcuugcuauccugaaggggcucuacaauuucgccacaugcggagucauuggccugaucacguuucuucugcucugugggagauccugcucugcgaccuauaaaggacaguacgaacugcagacacuggagcucaacauggaaagccugaauaugaccaugccucuuuccuguacaaagaacaauucucaucacuauauccgggcuggcaacaauaccgggcuggagcucacacugaccaacacgagcauuaucucccauaaauucugcaaucuuucugacgcccacaagaaaaaccuguacgaucauacccucaugagcauuaucacaaccuuucaccuguccauuccgaauuucaaccaguaugaggccaugagcugugacuuuaauggaggcaagaucucuauucaauacaaccugucccacagcuaugcuggcgaugccgcucagcauugcgggacaguggccaauggaguucuccagaccuucaugcgcauggcguggggcgggucuuaccuggcccuugacuccggaagacggggcugggauuguaucaucagcucuuaccaguaucugauuauccaaaacacgacaugggacgaucacugccaguuuucccgccccagcccuauuggguaccucggauucgugucccagaagaccagagacaucuauauuucucggcgccugcuuggcacauuuaccuggacccugagcgauuccgaaggccaugacaugcccgggggauacugucucacaagauggaugcugaucgaggcugaucugaaaugcuucggcaacacggccgucgcuaaguguaaugaaaaacacgacgaggaguuuugcgauauguggcgccucuucgacuucaacaagcaggccauccaacggcugaaagcggaagcccagaugaauauucagcuuaucaacaaggcugugaaugcccugauuaacgaccaacucaugaugaagaaucaccugagagauaucauggggauuccuuauugcaacuacagcaaauuuugguaucuuaauaacaccacaaccggacggacaucucugccccgcuguuggcucaucuccaauggcagcuaccugaacgagacccauuucucugacgauaucgaacagcaggcugacaauaugauuacggagaugcugcagaaggaauacauggauagacaagggaaaacaccucucggacugguugaccuuuuuguguucagcaccuccuuuuaucugaucaccauuuuccuccaccuggucaagaucccgacacaucggcacauugugggcaaacccugcccuaagccccaucgccugaaccacaugggcaucuguucuugcgggcuuuacaaacagccuggagugcccgucagauggaagcggugaggacuaguaauaaggaaacuguaugaaugucugugggcaggaagugaagagauccuucuguaaagguuuuuggaauuaugucugcugaauaauaaacuuuuuugaaauaauaaaucugguagaaaaaugagaucuaaaaaaaaaaaaaaaaaaaaaaaaaaaaaaaaaaaaaaaaaaaaaaaaaaaaaaaaaaaaaaaaugcaucccccccccccccccccccccccccccccccaaaggcucuuuucagagccaccagaauu

SEQ ID NO: 2966 - RNA, 1813 nt, Artificial Sequence; identical to SEQ ID NO: 2960
  mRNA product Design b-4 comprising derived and/or modified sequence from LASV(Pinneo-NIG-1969;Clade I)__AIT17836__GPC (opt5)

SEQ ID NO: 2967 - RNA, 1813 nt, Artificial Sequence
  mRNA product Design b-4 comprising derived and/or modified sequence from LASV(ISTH0009-NIG-2011;Clade II)__AIT17404__GPC (opt5)
gggagagucccgcagucggcguccagcggcucugcuuguucgugugugugucguugcaggccuuauucaagcuuaccaugggccagaucauuaccuucuuucaagaggugccccacgucaucgaagagguuaugaacauugugcugaucgcccucagccugcuugcuauucugaaggggaucuacaauguggccacaugcggacucuucggccuggucuccuuucuucugcucugugggagaucuugcagcacgaccuauaaaggaguguacgaacugcagacacuggagcucgacauggcgucccugaacaugaccaugccucuuucuuguacaaagaauaacagccaucacuauaucaugguuggcaaugaaaccgggcuggagcucacacugaccaacacguccauuaucaaucauaaauucugcaaccuuucugaugcucacaagaaaaaucuguacgaccaugcccucaugagcauuaucuccaccuuucaccugagcauuccgaacuucaaucaguaugaggccaugucuugugauuuuaacggaggcaagaucuccgugcaguacaaucugagccacgcuuaugccgucgacgcugccaaccauugcggcacaauugcgaauggggugcuccaaaccuucaugcggauggccuggggaggcucuuacaucgcucuggauuccgggaagggaagcugggacuguaucaugacaucuuaccaguaucuuauuauccagaacaccacgugggaagaucacugccaguuuucccgccccagcccuauuggcuaccuggggcuccugucccaaagaacacgggacaucuauauuucucgcagacuucugggaaccuucacauggacccucagcgauuccgagggcaacgaaacccccggcggguacugucugacacgguggaugcugaucgaggccgagcucaaaugcuuuggaaauacggcuguugccaaguguaacgaaaaacaugacgaggaguucugcgauaugcugcgccuuuuugacuucaauaagcaggcgaucagacggcugaaaaccgaagcccagaugagcauucagcucaucaacaaggcugugaaugcccugauuaacgaucaacuuaucaugaagaaucaucugcgcgacauuaugggcaucccuuauugcaacuacucuaaauauugguaccucaaucacacagucaccgggaagacaucccugcccagauguuggcuggugagcaacggaucuuaccucaaugaaacccacuucagcgacgauaucgagcagcaggcugacaacaugauuacggagcugcuucaaaaagaauauauggaucggcagggcaagacaccucuggggcucguggaccuguuugucuucuccaccucuuuuuaccugaucagcauuuuccuucaccucaucaaaauuccgacccaucgccacaucacaggaaagcccugcccuaaaccccauagacugaaucacaugggcauuuguuccugcggccuguauaagcacccugggguucccgugaaguggaaacggugaggacuaguaauaaggaaacuguaugaaugucugugggcaggaagugaagagauccuucuguaaagguuuuuggaauuaugucugcugaauaauaaacuuuuuugaaauaauaaaucugguagaaaaaugagaucuaaaaaaaaaaaaaaaaaaaaaaaaaaaaaaaaaaaaaaaaaaaaaaaaaaaaaaaaaaaaaaaaugcaucccccccccccccccccccccccccccccccaaaggcucuuuucagagccaccagaauu

SEQ ID NO: 2968 - RNA, 1813 nt, Artificial Sequence
  mRNA product Design b-4 comprising derived and/or modified sequence from LASV(ISTH2010-NIG-2012;Clade II)__AIT17482__GPC (opt5)
gggagagucccgcagucggcguccagcggcucugcuuguucgugugugugucguugcaggccuuauucaagcuuaccaugggccagaucauuaccuucuuucaagaggugccccacgucaucgaagagguuaugaacauugugcugaucgcccucagccugcuugcuauucugaaggggaucuacaauguggccacaugcggacucuucggccuggucuccuuucuucugcucugugggagaucuugcagcacgaccuauaaaggaguguacgaacugcagacacuggagcucgacauggcgucccugaacaugaccaugccucuuucuuguacaaagaauaacagccaucacuauaucaugguuggcaaugaaaccgggcuggagcucacacugaccaacacguccauuaucaaucauaaauucugcaaccuuucugaugcucacaagaaaaaucuguacgaccaugcccucaugagcauuaucuccaccuuucaccugagcauuccgaacuucaaucaguaugaggccaugucuugugauuuuaacggaggcaagaucuccgugcaguacaaucugagccacgcuuaugccgucgacgcugccaaccauugcggcacaauugcgaauggggugcuccaaaccuucaugcggauggccuggggaggcucuuacaucgcucuggauuccgggaagggaagcugggacuguaucaugacaucuuaccaguaucuuauuauccagaacauuaccugggaagaucacugccaguuuucccgccccagcccuaucggcuaccuggggcuccugucccaaagaacgcgggacauuuauaucucucgcagacuucugggaacauucaccuggacacucagcgauuccgagggcaacgaaacccccggcggguacugucugacccgguggaugcugaucgaggccgagcucaaaugcuuuggaaauacagcuguugccaaguguaacgaaaaacaugacgaggaguucugcgauaugcugcgccuuuuugacuucaauaagcaggcgauuagacggcugaaaacggaagcccagaugagcauccagcucauuaacaaggcugugaaugcccugaucaacgaucaacuuauuaugaagaaucaucugcgcgacaucaugggcaucccuuauugcaacuacucuaaauauugguaccucaaucacaccgucacagggaagaccucccugcccagauguuggcuggugagcaacggaucuuaccucaaugaaacacacuucagcgacgauauugagcagcaggcugacaacaugaucaccgagcugcuucaaaaagaauauauugaucggcagggcaagacgccucuggggcucguggaccuguuugucuucuccacaucuuuuuaccugaucagcauuuuccuucaccucguuaaaaucccgacccaucgccacguggugggaaagcccugcccuaaaccccauagacugaaucacaugggcauuuguuccugcggccuguauaagcacccugggguccccgugaaguggaaacggugaggacuaguaauaaggaaacuguaugaaugucugugggcaggaagugaagagauccuucuguaaagguuuuuggaauuaugucugcugaauaauaaacuuuuuugaaauaauaaaucugguagaaaaaugagaucuaaaaaaaaaaaaaaaaaaaaaaaaaaaaaaaaaaaaaaaaaaaaaaaaaaaaaaaaaaaaaaaaugcaucccccccccccccccccccccccccccccccaaaggcucuuuucagagccaccagaauu

SEQ ID NO: 2969 - RNA, 1813 nt, Artificial Sequence
  mRNA product Design b-4 comprising derived and/or modified sequence from LASV(Lassa virus/H.sapiens-wt/NGA/2015/ISTH_0543;Clade II)__AVO03639__GPC (opt5)
gggagagucccgcagucggcguccagcggcucugcuuguucgugugugugucguugcaggccuuauucaagcuuaccaugggccagaucauuaccuucuuucaagaggugccccacgucaucgaagagguuaugaacauugugcugaucgcccucagccugcuugcuauucugaaggggaucuacaauguggccacaugcggacucuucggccuggucuccuuucuucugcucugugggagaucuugcagcacgaccuauaaaggaguguacgaacugcagacacuggagcucgacauggcgaaccugaauaugaccaugccucuuuccuguacaaagaacaauucucaucacuauaucaugguuggcaacgaaaccgggcuggagcucacacugaccaauacgagcauuaucaaccauaaauucugcaaucuuuccgaugcucacaagaaaaaccuguacgaccaugcccucaugucuauuaucagcaccuuucaccuguccauuccgaauuucaaccaguaugaggccaugagcugugauuuuaauggaggcaagaucucugugcaguacaaccugucccacacauaugcugucgacgccgcuaaucauugcggcaccauugccaacggggugcuccaaacauucaugcggauggcguggggaggcagcuacaucgcccuggauucugggaagggauccugggacuguaucaugaccagcuaccaguaucuuguuauucagaacacgacaugggaagaucacugccaguuuucucgccccuccccuaucggcuaccuggggcuccugagccaaagaacccgggacauuuauaucucccgcagacuucugggaacauucaccuggacccucucugauagcgagggcaaugaaacacccggcggguacugucugacgcgguggaugcugauugaggcugagcucaaaugcuuuggaaacaccgccguggcuaaguguaaugaaaaacaugacgaggaguucugcgauaugcugcgccuuuuugacuucaacaagcaggccaucagacggcugaaaacagaagcgcagauguccauccagcucauuaauaaggccgucaacgcucugaucaaugaucaacuuauuaugaagaaccaucugcgcgacaucaugggcauuccuuauugcaauuacagcaaauauugguaccucaaccacaccgugacagggaagaccucucugcccagauguuggcugguguccaauggaagcuaccucaacgaaacgcacuucucugacgauaucgagcagcaggccgacaauaugaucacagagcugcuucaaaaagaauauauugaucggcagggcaagaccccucuggggcucgucgaccuguuuguuuucagcaccuccuuuuaccugaucucuauuuuccuucaccucgugaaaaucccgacacaucgccacauuaccggaaagcccugcccuaaaccccauagacugaaccacaugggcaucuguagcugcggccuguauaagcacccuggggugcccgucaaguggaaacggugaggacuaguaauaaggaaacuguaugaaugucugugggcaggaagugaagagauccuucuguaaagguuuuuggaauuaugucugcugaauaauaaacuuuuuugaaauaauaaaucugguagaaaaaugagaucuaaaaaaaaaaaaaaaaaaaaaaaaaaaaaaaaaaaaaaaaaaaaaaaaaaaaaaaaaaaaaaaaugcaucccccccccccccccccccccccccccccccaaaggcucuuuucagagccaccagaauu

SEQ ID NO: 2970 - RNA, 1813 nt, Artificial Sequence
  mRNA product Design b-4 comprising derived and/or modified sequence from LASV(Lassa virus/H.sapiens-wt/NGA/2016/ISTH_0009;Clade II)__AVO03571__GPC (opt5)
gggagagucccgcagucggcguccagcggcucugcuuguucgugugugugucguugcaggccuuauucaagcuuaccaugggccagaucauuaccuucuuucaagaggugccccacgucaucgaagagguuaugaacauugugcugaucgcccucagccugcuugcuauucugaaggggaucuacaauguggccacaugcggacuccugggccuugucuccuuccugcuccugugugggagaucuugcagcacgaccuauaaaggaguguacgaacugcagacacucgagcuggacauggcgucccuuaacaugaccaugccucugucuuguacaaagaauaacagccaucacuauaucaugguuggcaaugaaaccgggcucgagcugacacuuaccaacacguccauuaucaaucauaaauuuugcaaccugucugaugcucacaagaaaaaucucuacgaccaugcccugaugagcauuaucuccaccuuccaccugagcauuccgaacuuuaaucaguaugaggccaugucuugugauuucaacggaggccggaucuccgugcaguacaaucucagccacucuuaugcugucgacgccgcuaaccauugcggcacaauugccaauggggugcugcaaaccuuuaugcgcauggcguggggaggcuccuacaucgcccuugauagcgggaagggaucuugggacuguaucaugacauccuaccaguaucugauuauccagaacaccacgugggaagaucacugccaguucagcagacccuccccuauuggcuaccucgggcugcuuucucaacggacacgcgacaucuauauuagcagacggcugcucggaaccuuuacauggacccuguccgauagcgagggcaacgaaacccccggcggguacugucugacacgcuggaugcucaucgaggcugagcugaagugcuucggaaauacggccguugcuaaauguaacgaaaagcaugacgaggaauuuugcgauaugcuuagacuguucgacuuuaauaaacaggccauccggcgccucaagaccgaggcgcagaugucuauucagcugaucaacaaagccgugaaugcucuuauuaacgaucaacugaucaugaagaaucaccucagagacauuaugggcaucccuuauugcaacuacuccaaguauugguaccugaaucacacagucaccgggaaaacaagccugccccgguguuggcucgugucuaacggaagcuaccugaaugaaacccauuucuccgacgauaucgagcagcaggccgacaacaugauuacggagcuucugcaaaaggaauauaucgaucgccagggcaaaacaccucucgggcugguggaccuguucgucuuuucuaccagcuucuaccuuauuuccaucuuucuccaccugguuaagauuccgacccauagacacaucacaggaaaacccugcccuaagccccaucggcugaaucacaugggcauuuguagcugcggccucuauaaccacccuggggugcccgugaaauggaagcgcugaggacuaguaauaaggaaacuguaugaaugucugugggcaggaagugaagagauccuucuguaaagguuuuuggaauuaugucugcugaauaauaaacuuuuuugaaauaauaaaucugguagaaaaaugagaucuaaaaaaaaaaaaaaaaaaaaaaaaaaaaaaaaaaaaaaaaaaaaaaaaaaaaaaaaaaaaaaaaugcaucccccccccccccccccccccccccccccccaaaggcucuuuucagagccaccagaauu

SEQ ID NO: 2971 - RNA, 1813 nt, Artificial Sequence
  mRNA product Design b-4 comprising derived and/or modified sequence from LASV(Lassa virus/H.sapiens-wt/NGA/2016/ISTH_0017;Clade II)__AVO03567__GPC (opt5)
gggagagucccgcagucggcguccagcggcucugcuuguucgugugugugucguugcaggccuuauucaagcuuaccaugggccagaucauuaccuucuuucaagaggugccccacgucaucgaagagguuaugaacauugugcugaucgcccucagccugcuugcuauucugaaggggaucuacaauguggccacaugcggacucuucggccuggucuccuuucuucugcucugugggagaucuugcagcacgaccuauaaaggaguguacgaacugcagacacuggagcucgacauggcgucccugaacaugaccaugccucuuucuuguacaaagaauaacagccaucacuauaucaugguuggcaaugaaaccgggcuggagcucacacugaccaacacguccauuaucaaucauaaauucugcaaccuuucugaugcucacaagaaaaaucuguacgaccaugcccucaugagcauuaucuccaccuuucaccugagcauuccgaacuucaaucaguaugaggccaugucuugugauuuuaacggaggcaagaucuccgugcaguacaaucugagccacacauaugcuauugacgccgcuaaccauugcggcaccaucgccaaugggguccuccaaacauucaugcggauggcguggggaggcucuuacaucgcccuggauuccgggaagggaagcugggacuguauuaugaccucuuaccaguaucuuaucauucagaacacgacaugggaagaucacugccaguuuucccgccccagcccuaucggcuaccuggggcuccugucccaaagaacccgggacauuuauaucucucgcagacuucugggaacauucaccuggacccucagcgauuccgagggcaacgaaacacccggcggguacugucugacgcgguggaugcugaucgaggcugagcucaaaugcuuuggaaauaccgccguggcuaaguguaacgaaaaacaugacgaggaguucugcgauaugcugcgccuuuuugacuucaauaagcaggccauuagacggcugaaaacagaagcgcagaugagcauccagcucauuaacaaggccguuaaugcucugaucaacgaucaacuuauuaugaagaaucaucugcgcgacaucaugggcaucccuuauugcaacuacucuaaauauugguaccucaaucacaccgugacagggaagaccucccugcccagauguuggcuggucagcaacggaucuuaccucaaugaaacgcacuucagcgacgauauugagcagcaggccgacaacaugaucacagagcugcuucaaaaagaauauauggaucggcagggcaagaccccucuggggcucguggaccuguuuguguucuccaccucuuuuuaccugauuagcaucuuccuucaccucguccgcauuccgacacauagacacguuaucggaaaacccugcccuaagccccaucggcugaaucacaugggcauuuguuccugcggccuguauaaacacccuggggugcccgugaaguggaagcgcugaggacuaguaauaaggaaacuguaugaaugucugugggcaggaagugaagagauccuucuguaaagguuuuuggaauuaugucugcugaauaauaaacuuuuuugaaauaauaaaucugguagaaaaaugagaucuaaaaaaaaaaaaaaaaaaaaaaaaaaaaaaaaaaaaaaaaaaaaaaaaaaaaaaaaaaaaaaaaugcaucccccccccccccccccccccccccccccccaaaggcucuuuucagagccaccagaauu

SEQ ID NO: 2972 - RNA, 1813 nt, Artificial Sequence
  mRNA product Design b-4 comprising derived and/or modified sequence from LASV(Lassa virus/H.sapiens-wt/NGA/2018/ISTH_0959;Clade II)__AVV65099__GPC (opt5)
gggagagucccgcagucggcguccagcggcucugcuuguucgugugugugucguugcaggccuuauucaagcuuaccaugggccagaucauuaccuucuuucaagaggugccccacgucaucgaagagguuaugaacauugugcugaucgcccucagccugcuugcuauucugaaggggaucuacaauguggucacaugcggacucuucggccugguguccuuucuucugcucugugggagaucuugcagcacgaccuauaaaggaguuuacgaacugcagacacuggagcucgacauggccucccugaacaugaccaugccucuuucuuguacaaagaauaacagccaucacuauaucauggugggcaaugaaaccgggcuggagcucacacugaccaacacguccauuaucaaucauaaauucugcaaccuuucugaugcgcacaagaaaaaucuguacgaccaugcucucaugagcauuaucuccaccuuucaccugagcauuccgaacuucaaucaguaugaggccaugucuugugauuuuaacggaggcaagaucuccguccaguacaaucugagccacgccuaugcuauugacgccgcuaaccauugcggcacaaucgccaauggggugcuccaaaccuucaugcggauggcguggggaggcucuuacaucgcccuggauuccgggaagggaagcugggacuguauuaugacaucuuaccaguaucuuaucauucagaacaccacgugggaagaucacugccaguuuucccgccccagcccuaucggcuaccuggggcuccugucccaaagaacacgggacauuuauaucucucgcagacuucugggaaccuucacauggacccucagcgauuccgagggcaacgaaacccccggcggguacugucugacacgguggaugcugaucgaggcugagcucaaaugcuuuggaaauacggccguugcuaaguguaacgaaaaacaugacgaggaguucugcgauaugcugcgccuuuuugacuucaauaagcaggccauuagacggcugaaaaccgaagcgcagaugagcauccagcucauuaacaaggccgugaaugcucugaucaacgaucaacuuauuaugaagaaucaucugcgcgacaucaugggcaucccuuauugcaacuacucuaaauauugguaccucaaucacacagucaccgggaagacaucccugcccagauguuggcuggugagcaacggaucuuaccucaaugaaacccacuucagcgacgauauugagcagcaggccgacaacaugaucacggagcugcuucaaaaagaauauauugaucggcagggcaagacaccucuggggcucguggaccuguuugucuucuccaccucuuuuuaccugaucagcauuuuccuucaccucguuaaaaucccgacccaucgccacgugauuggaaagcccugcccuaaaccccauagacugaaucacaugggcaucuguuccugcggccuguauaagcacccuggggugcccgucaaguggaaacggugaggacuaguaauaaggaaacuguaugaaugucugugggcaggaagugaagagauccuucuguaaagguuuuuggaauuaugucugcugaauaauaaacuuuuuugaaauaauaaaucugguagaaaaaugagaucuaaaaaaaaaaaaaaaaaaaaaaaaaaaaaaaaaaaaaaaaaaaaaaaaaaaaaaaaaaaaaaaaugcaucccccccccccccccccccccccccccccccaaaggcucuuuucagagccaccagaauu

SEQ ID NO: 2973 - RNA, 1813 nt, Artificial Sequence
  mRNA product Design b-4 comprising derived and/or modified sequence from LASV(LASV003-NIG-2008;Clade II)__AIT17580__GPC (opt5)
gggagagucccgcagucggcguccagcggcucugcuuguucgugugugugucguugcaggccuuauucaagcuuaccaugggccagaucauuaccuucuuucaagaggugccccacgucaucgaagagguuaugaacauugugcugaucgcccucagccugcuugcuauucugaaggggaucuacaauguggccacaugcggacucuucggccuggucuccuuucuucugcucugugggagaucuugcagcacgaccuauaaaggaguguacgaacugcagacacuggagcucgacauggcgucccugaacaugaccaugccucuuucuuguacaaagaauaacagccaucacuauaucaugguuggcaaugaaaccgggcuggagcucacacugaccaacacguccauuaucaaucauaaauucugcaaccuuucugaugcucacaagaaaaaucuguacgaccaugcccucaugagcauuaucuccaccuuucaccugagcauuccgaacuucaaucaguaugaggccaugucuugugauuuuaacggaggcaagaucuccgugcaguacaaucugagccacacauaugcugucgacgccgcuaaccauugcggcaccauugccaauggggugcuccaaacauucaugcggauggcguggggaggcucuuacaucgcccuggauuccgggaagggaagcugggacuguaucaugaccucuuaccaguaucuuauuauccagaacacgacaugggaagaucacugccaguuuucccgccccagcccuauuggcuaccuggggcuccugucccaaagaacccgggacaucuauauuucucgcagacuucugggaacauucaccuggacccucagcgauuccgagagcaacgaaacacccggcggcuacugucugacgcgguggaugcugaucgaggcugagcucaaaugcuuugggaauaccgccguugcuaaguguaacgaaaaacaugacgaggaguucugcgauaugcugcgccuuuuugacuucaauaagcaggccaucagacggcugaaagcggaagcccagaugucuauucagcucaucaacaaggcugugaaugcccugauuaacgaucaacuuaucaugaagaaucaucugcgcgacauuaugggaaucccuuauugcaacuacuccaaauauugguaccucaaucacacagucaccggcagaacaagccugccccgguguuggcuggugucuaacgggagcuaccucaaugaaacccacuucuccgacgauaucgagcagcaggcugacaacaugauuacggagcugcuucaaaaggaauauauggaucgccagggaaaaacaccucugggccucguggaccuguuugucuucucuaccagcuuuuaccugaucuccauuuuccuucaccucguuaagaucccgacccauagacacgugauugggaaacccugcccuaagccccaucggcugaaucacaugggaaucuguagcugcggccuguauaaacacccuggcgugcccgucaaguggaagcgcugaggacuaguaauaaggaaacuguaugaaugucugugggcaggaagugaagagauccuucuguaaagguuuuuggaauuaugucugcugaauaauaaacuuuuuugaaauaauaaaucugguagaaaaaugagaucuaaaaaaaaaaaaaaaaaaaaaaaaaaaaaaaaaaaaaaaaaaaaaaaaaaaaaaaaaaaaaaaaugcaucccccccccccccccccccccccccccccccaaaggcucuuuucagagccaccagaauu

SEQ ID NO: 2974 - RNA, 1813 nt, Artificial Sequence
  mRNA product Design b-4 comprising derived and/or modified sequence from LASV(LASV035-NIG-2009;Clade II)__AIT17588__GPC (opt5)
gggagagucccgcagucggcguccagcggcucugcuuguucgugugugugucguugcaggccuuauucaagcuuaccaugggccagaucauuaccuucuuucaagaggugccccacgucaucgaagagguuaugaacauugugcugaucgcccucagccugcuugcuauucugaaggggaucuacaauguggccacaugcggacucuucggccuggucuccuuucuucugcucugugggagaucuugcagcacgaccuauaaaggaguguacgaacugcagacacuggagcucgacauggcgucccugaacaugaccaugccucuuucuuguacaaagaauaacagccaucacuauaucaugguuggcaaugaaaccgggcuggagcucacacugaccaacacguccauuaucaaucauaaauucugcaaccuuucugaugcucacaagaaaaaucuguacgaccaugcccucaugagcauuaucuccaccuuucaccugagcauuccgaacuucaaucaguaugaggccaugucuugugauuuuaacggaggcaagaucuccgugcaguacaaucugagccacgcuuaugccgucgacgcugccaaccauugcggcacaauugcgaauggggugcuccaaaccuucaugcggauggccuggggaggcucuuacaucgcucuggauuccgggaagggaagcugggacuguaucaugacaucuuaccaguaucuuauuauccagaacaccacgugggaagaucacugccaguuuucccgccccagcccuauuggcuaccuggggcuccugucccaaagaacacgggacaucuauauuucucgcagacuucugggaaccuucacauggacccucagcgauuccgagggcaacgaaacccccggcggguacugucugacacgguggaugcugaucgaggccgagcucaaaugcuuuggaaauacggcuguugccaaguguaacgaaaaacaugacgaggaguucugcgauaugcugcgccuuuuugacuucaauaagcaggcgaucagacggcugaaagccgaagcucagaugagcauucagcucaucaacaaggccgugaaugcucugauuaacgaucaacuuaucaugaagaaucaucugcgcgacauuaugggcaucccuuauugcaacuacucuaaauauugguaccucaaucacaccgucacagggaagaccucccugcccagauguuggcuggugagcaacggaucuuaccucaaugaaacacacuucagcgacgauaucgagcagcaggccgacaacaugauuaccgagcugcuucaaaaagaauauaucgaucggcagggcaagacgccucuggggcucguggaccuguuugucuucuccacaucuuuuuaccugauuagcaucuuccuucaccucguuaaaauuccgacccaucgccacgugaucggaaagcccugcccuaaaccccauagacugaaucacaugggcauuuguuccugcggccuguauaagcacccuggggugcccgucaaguggaaacggugaggacuaguaauaaggaaacuguaugaaugucugugggcaggaagugaagagauccuucuguaaagguuuuuggaauuaugucugcugaauaauaaacuuuuuugaaauaauaaaucugguagaaaaaugagaucuaaaaaaaaaaaaaaaaaaaaaaaaaaaaaaaaaaaaaaaaaaaaaaaaaaaaaaaaaaaaaaaaugcaucccccccccccccccccccccccccccccccaaaggcucuuuucagagccaccagaauu

SEQ ID NO: 2975 - RNA, 1813 nt, Artificial Sequence
  mRNA product Design b-4 comprising derived and/or modified sequence from LASV(LASV1000-NIG-2009;Clade II)__AIT17782__GPC (opt5)
gggagagucccgcagucggcguccagcggcucugcuuguucgugugugugucguugcaggccuuauucaagcuuaccaugggccagaucauuaccuucuuucaagaggugccccacgucaucgaagagguuaugaacauugugcugaucgcccucagccugcuugcuauucugaaggggaucuacaauguggccacaugcggacucuucggccuggucuccuuucuucugcucugugggagaucuugcagcacgaccuauaaaggaguguacgaacugcagacacuggagcucgacauggcgucccugaacaugaccaugccucuuucuuguacaaagaauaacagccaucacuauaucaugguuggcaaugaaaccgggcuggagcucacacugaccaacacguccauuaucaaucauaaauucugcaaccuuucugaugcucacaagaaaaaucuguacgaccaugcccucaugagcauuaucuccaccuuucaccugagcauuccgaacuucaaucaguaugaggccaugucuugugauuuuaacggaggcaagaucuccgugcaguacaaucugagccacacauaugcugucgacgccgcuaaccauugcggcaccauugccaauggggugcuccaaacauucaugcggauggcguggggaggcucuuacaucgcccuggauuccgggaagggaagcugggacuguaucaugaccucuuaccaguaucuuauuauccagaacacgacaugggaagaucacugccaguuuucccgccccagcccuauuggcuaccuggggcuccugucccaaagaacccgggacaucuauauuucucgcagacuucugggaacauucaccuggacccucagcgauuccgagggcaacgaaacacccggcggguacugucugacgcgguggaugcugaucgaggcugagcucaaaugcuuuggaaauaccgccguugcuaaguguaacgaaaaacaugacgaggaguucugcgauaugcugcgccuuuuugacuucaauaagcaggccaucaaaagacugaagacagaagcgcagaugagcauucagcucaucaacaaggccgugaaugcucugauuaacgaucaacuuaucaugaaaaaucaucugcgggacauuaugggcaucccuuauugcaacuacucuaaguauugguaccucaaucacaccgucacagggaaaaccucccugccccgcuguuggcuggugagcaacggaucuuaccucaaugaaacgcacuucagcgacgauaucgagcagcaggccgacaacaugauuacagagcugcuucaaaaggaauauaucgauagacagggcaaaaccccucuggggcucguggaccuguuugucuucuccaccucuuuuuaccugauuagcaucuuccuucaccucguuaagauuccgacacaucggcacguggugggaaaacccugcccuaagccccaucgccugaaucacaugggcaucuguuccugcggccuguauaagcacccugggguccccgugaaauggaagagaugaggacuaguaauaaggaaacuguaugaaugucugugggcaggaagugaagagauccuucuguaaagguuuuuggaauuaugucugcugaauaauaaacuuuuuugaaauaauaaaucugguagaaaaaugagaucuaaaaaaaaaaaaaaaaaaaaaaaaaaaaaaaaaaaaaaaaaaaaaaaaaaaaaaaaaaaaaaaaugcaucccccccccccccccccccccccccccccccaaaggcucuuuucagagccaccagaauu

SEQ ID NO: 2976 - RNA, 1813 nt, Artificial Sequence
  mRNA product Design b-4 comprising derived and/or modified sequence from LASV(LASV221-NIG-2010;Clade II)__AIT17624__GPC (opt5)
gggagagucccgcagucggcguccagcggcucugcuuguucgugugugugucguugcaggccuuauucaagcuuaccaugggccagaucauuaccuucuuucaagaggugccccacgucaucgaagagguuaugaacauugugcugaucgcccucagccugcuugcuauucugaaggggaucuacaauguggccacaugcggacucuucggccuggucuccuuucuucugcucugugggagaucuugcagcacgaccuauaaaggaguguacgaacugcagacacuggagcucgacauggcgucccugaacaugaccaugccucuuucuuguacaaagaauaacagccaucacuauaucaugguuggcaaugaaaccgggcuggagcucacacugaccaacacguccauuaucaaucauaaauucugcaaccuuucugaugcucacaagaaaaaucuguacgaccaugcccucaugagcauuaucuccaccuuucaccugagcauuccgaacuucaaucaguaugaggccaugucuugugauuuuaacggaggcaagaucuccgugcaguacaaucugagccacacauaugcuauugacgccgcuaaccauugcggcaccaucgccaaugggguccuccaaacauucaugcggauggcguggggaggcucuuacaucgcccuggauuccgggaagggaagcugggacuguauuaugaccucuuaccaguaucuuaucauucagaacacgacaugggaagaucacugccaguuuucccgccccagcccuaucggcuaccuggggcuccugucccaaagaacccgggacauuuauaucucucgcagacuucugggaacauucaccuggacccucagcgauuccgagggcaacgaaacacccggcggguacugucugacgcgguggaugcugaucgaggcugagcucaaaugcuuuggaaauaccgccguggcuaaguguaacgaaaaacaugacgaggaguucugcgauaugcugcgccuuuuugacuucaauaagcaggccauuagacggcugaaaacagaagcgcagaugagcauccagcucauuaacaaggccguuaaugcucugaucaacgaucaacuuauuaugaagaaucaucugcgcgacaucaugggcaucccuuauugcaacuacucuaaauauugguaccucaaucacaccgugacagggaagaccucccugcccagauguuggcuggucagcaacggaucuuaccucaaugaaacgcacuucagcgacgauauugagcagcaggccgacaacaugaucacagagaugcugcaaaaagaauauauggaucggcagggcaagaccccucuugggcugguggaccucuuuguguucuccaccucuuuuuaccugauuagcaucuuccugcaccuugucaaaauuccgacacaucgccacguuaucggaaagcccugcccuaaaccccauagacucaaucacaugggcauuuguuccugcggccuguauaagcacccuggggugcccgugaaguggaaacggugaggacuaguaauaaggaaacuguaugaaugucugugggcaggaagugaagagauccuucuguaaagguuuuuggaauuaugucugcugaauaauaaacuuuuuugaaauaauaaaucugguagaaaaaugagaucuaaaaaaaaaaaaaaaaaaaaaaaaaaaaaaaaaaaaaaaaaaaaaaaaaaaaaaaaaaaaaaaaugcaucccccccccccccccccccccccccccccccaaaggcucuuuucagagccaccagaauu

SEQ ID NO: 2977 - RNA, 1813 nt, Artificial Sequence
  mRNA product Design b-4 comprising derived and/or modified sequence from LASV(LASV237-NIG-2010;Clade II)__AIT17638__GPC (opt5)
gggagagucccgcagucggcguccagcggcucugcuuguucgugugugugucguugcaggccuuauucaagcuuaccaugggccagaucauuaccuucuuucaagaggugccccacgucaucgaagagguuaugaacauugugcugaucgcccucagccugcuugcuauucugaaggggaucuacaauguggccacaugcggacucuucggccuggucuccuuucuucugcucugugggagaucuugcagcacgaccuauaaaggaguguacgaacugcagacacuggagcucgacauggcgucccugaacaugaccaugccucuuucuuguacaaagaauaacagccaucacuauaucaugguuggcaaugaaaccgggcuggagcucacacugaccaacacguccauuaucaaucauaaauucugcaaccuuucugaugcucacaagaaagaccuguacgaucaugcccucaugagcauuaucuccaccuuucaccugagcauuccgaauuucaaccaguaugaggccaugucuugugacuuuaauggaggcaagaucuccgugcaguacaaccugagccacacauaugcugucgaugccgcuaaucauugcggcaccauugccaacggggugcuccaaacauucaugcggauggcguggggaggcucuuacaucgcccuggacuccgggaagggaagcugggauuguaucaugaccucuuaccaguaucuuauuauccagaauacgacaugggaagaccacugccaguuuucccgccccagcccuauuggcuaccuggggcuccugucccaaagaacccgggauaucuauauuucucgcagacuucugggaacauucaccuggacccucagcgacuccgagggcaacgaaacacccggcggguacugucugacgcgguggaugcugaucgaggcugagcucaaaugcuuuggaaacaccgccguugcuaaguguaaugaaaaacaugaugaggaguucugcgacaugcugcgccuuuuugauuucaacaagcaggccaucagacggcugaaaacagaagcgcagaugagcauucagcucaucaauaaggccgugaacgcucugauuaaugaccaacuuaucaugaagaaccaucugcgcgacauuaugggcaucccuuauugcaauuacucuaaauauugguaccucaaccacaccgucacagggaagaccucccugcccagauguuggcuggugagcaauggaucuuaccucaacgaaacgcacuucagcgaugacaucgagcagcaggccgauaauaugauuacagagcugcuucaaaaagaauauauggaccggcagggcaagaccccucuggggcucguggaucuguuugucuucuccaccucuuuuuaccugaucagcauuuuccuucaccucaucaaaauuccgacacaucgccacaucaccggaaagcccugcccuaaaccccauagacugaaccacaugggcauuuguuccugcggccuguauaagcacccugggguucccgugaaguggaaacggugaggacuaguaauaaggaaacuguaugaaugucugugggcaggaagugaagagauccuucuguaaagguuuuuggaauuaugucugcugaauaauaaacuuuuuugaaauaauaaaucugguagaaaaaugagaucuaaaaaaaaaaaaaaaaaaaaaaaaaaaaaaaaaaaaaaaaaaaaaaaaaaaaaaaaaaaaaaaaugcaucccccccccccccccccccccccccccccccaaaggcucuuuucagagccaccagaauu

SEQ ID NO: 2978 - RNA, 1813 nt, Artificial Sequence
  mRNA product Design b-4 comprising derived and/or modified sequence from LASV(LASV253-NIG-2011;Clade II)__AIT17670__GPC (opt5)
gggagagucccgcagucggcguccagcggcucugcuuguucgugugugugucguugcaggccuuauucaagcuuaccaugggccagaucauuaccuucuuucaagaggugccccacgucaucgaagagguuaugaacauugugcugaucgcccucagccugcuugcuauucugaaggggaucuacaauguggccacaugcggacucuucggccuggucuccuuucuucugcucugugggagaucuugcagcacgaccuauaaaggaguguacgaacugcagacacuggagcucgacauggcgucccugaacaugaccaugccucuuucuuguacaaagaauaacagccaucacuauaucaugguuggcaaugaaaccgggcuggagcucacacugaccaacacguccauuaucaaucauaaauucugcaaccuuucugaugcucacaagaaaaaucuguacgaccaugcccucaugagcauuaucuccaccuuucaccugagcauuccgaacuucaaucaguaugaggccaugucuugugauuuuaacggaggcaagaucuccgugcaguacaaucugagccacacauaugcugucgacgccgcuaaccauugcggcaccauugccaauggggugcuccaaacauucaugcggauggcguggggaggcucuuacaucgcccuggauuccgggaagggaagcugggacuguaucaugaccucuuaccaguaucuuauuauccagaacacgacaugggaagaucacugccaguuuucccgccccagcccuauuggcuaccuggggcuccugucccaaagaacccgggacaucuauauuucucgcagacuucugggaacauucaccuggacccucagcgauuccgagggcaacgaaacacccggcggguacugucugacgcgguggaugcugaucgaggcugagcucaaaugcuuuggaaauaccgccguugcuaaguguaacgaaaaacaugacgaggaguucugcgauaugcugcgccuuuuugacuucaauaagcaggccaucagacggcugaaagcggaagcccagaugagcauucagcucaucaacaaggcugugaaugcccugauuaacgaucaacuuaucaugaagaaucaucugcgcgacauuaugggcaucccuuauugcaacuacucuaaauauugguaccucaaucacacagucaccgggagaacaucccugccccgguguuggcuggugagcaacggaucuuaccucaaugaaacccacuucagcgacgauaucgagcagcaggcugacaacaugauuacggagcugcuucaaaaggaauauaucgaucgccagggcaaaacaccucuggggcucguggaccuguuugucuucuccaccucuuuuuaccugauuagcaucuuccuucaccucguuaagauuccgacccauagacacaucauuggaaaacccugcccuaagccccaucggcugaaucacaugggcaucuguuccugcggccuguauaaacacccuggggugcccgugaaguggaagcgcugaggacuaguaauaaggaaacuguaugaaugucugugggcaggaagugaagagauccuucuguaaagguuuuuggaauuaugucugcugaauaauaaacuuuuuugaaauaauaaaucugguagaaaaaugagaucuaaaaaaaaaaaaaaaaaaaaaaaaaaaaaaaaaaaaaaaaaaaaaaaaaaaaaaaaaaaaaaaaugcaucccccccccccccccccccccccccccccccaaaggcucuuuucagagccaccagaauu

SEQ ID NO: 2979 - RNA, 1813 nt, Artificial Sequence
  mRNA product Design b-4 comprising derived and/or modified sequence from LASV(LASV254-NIG-2011;Clade II)__AIT17674__GPC (opt5)
gggagagucccgcagucggcguccagcggcucugcuuguucgugugugugucguugcaggccuuauucaagcuuaccaugggccagaucauuaccuucuuucaagaggugccccacgucaucgaagagguuaugaacauugugcugaucgcccucagccugcuugcuauucugaaggggaucuacaauguggccacaugcggacucuucggccuggucuccuuucuucugcucugugggagaucuugcagcacgaccuauaaaggaguguacgaacugcagacacuggagcucgacaugaccaaccugaauaugacaaugccucuuuccuguaccaagaacaauucucaucacuauaucaugguuggcaacgaaacagggcuggagcucacccugacgaauaccagcauuaucaaccauaaauucugcaaucuuuccgaugcgcacaagaaaaaccuguacaaucaugcucucaugucuauuaucagcacauuucaccuguccauuccgaacuucaaucaguaugaggccaugagcugugacuuuaacggaggcaagaucucugugcaguacaaucugucccacagcuaugccgucgaugcugccaaccauugcggcaccauugcuaacggggugcuccaaacauucaugcggauggccuggggaggcucuuacaucgcgcuggacuccgggaagggaaauugggauuguaucaugaccagcuaccaguaucuuauuauccagaacacgacaugggaagaccacugccaguuuucucgccccuccccuauuggcuaccuggggcuccugagccaaagaacccgggauaucuauauuucccgcagacuucugggaacauucaccuggacccucucugacagcgagggcaaugaaacacccggcggguacugucugacgcgguggaugcugaucgaggccgagcucaaaugcuuuggaaacaccgcuguugccaaguguaaugaaaaacaugaugaggaguucugcgacaugcugcgccuuuuugauuucaacaagcaggcuaucagacggcugaaaacagaagcccaggcgaauauucagcucaucaacaaggccgugaaugcucugauuaacgaccaacuuaucaugaagaaucaucugcgcgauauuaugggcaucccuuauugcaacuacuccaaauauugguaccucaaucacaccgucacagggaagaccagccugcccagauguuggcuggugucuaacggauccuaccucaaugaaacgcacuucagcgacgacaucgagcagcaggccgauaacaugauuacagagcugcuucaaaaagaauauauggaccggcagggcaagaccccucuggggcucguggaucuguuugucuucucuaccagcuuuuaccugaucuccauuuuccuucaccucguuaaaaucccgacacaucgccacgugauuggaaagcccugcccuaaaccccauagacugaaccacaugggcaucuguucuugcggccuguauaagcacccuggggugcccgucaaguggaaacggugaggacuaguaauaaggaaacuguaugaaugucugugggcaggaagugaagagauccuucuguaaagguuuuuggaauuaugucugcugaauaauaaacuuuuuugaaauaauaaaucugguagaaaaaugagaucuaaaaaaaaaaaaaaaaaaaaaaaaaaaaaaaaaaaaaaaaaaaaaaaaaaaaaaaaaaaaaaaaugcaucccccccccccccccccccccccccccccccaaaggcucuuuucagagccaccagaauu

SEQ ID NO: 2980 - RNA, 1813 nt, Artificial Sequence
  mRNA product Design b-4 comprising derived and/or modified sequence from LASV(Nig08-A19;Clade III)__ADU56618__GPC (opt5)
gggagagucccgcagucggcguccagcggcucugcuuguucgugugugugucguugcaggccuuauucaagcuuaccaugggccagaucgugaccuucuuucaagaggucccccacguuauugaagaggugaugaacaucgugcugauugcccucagcauccuggcuauucuuaaggggcuguacaauaucgccacaugcggacucaucggccuggucacguuccuucugcucuccgggagaucuuguagcaugaccuauaaaggaguguacgaacugcagacacuggagcucaacaugaauacccugaacaugacaaugccucuuuccugcaccaagaauaacucucaucacuauauuaugguuggcaaugaaacagggcuggagcucacccugacgaacaccagccuucugcaucacaaauuuuguaaucucuccgacgcgcauaagaaaaaccuguacgaucacacacugaugucuaucauuagcaccuuccaccucuccaucccgaauuuuaaccaguaugaggcuaugagcugcgacuucaauggaggcaagauuacagugcaguacaaccugucucauuccuaugccaucgaugccgcuaaucacuguggcaccgucgccaacggggugcuucaaacguuuaugcggauggcuuggggaggcagcuacauugcccuggacucugggcgcggaaagugggauugcaucaugacauccuaccaguaucucaucauucagaacaccacaugggaagaccauugucaguucagcagacccucuccuaucggcuaccuggggcuucugucccaacggacccgcgauauuuauaucagcagacggcuccugggaaccuuuacauggacgcuguccgacucugagggcaaugaaacccccggcggguacugccucacacgcuggaugcugauugaggcggagcuuaaauguuucggaaacaccgccguugcuaagugcaaugaaaaacacgaugaggaauuuugugacaugcugagacucuucgauuuuaacaagcaggccauccggcgccugaaagcugaggcccagaugagcauccagcuuauuaauaaggcggugaacgcccugaucaaugaccaacucauuaugaagaaccaccugagagauaucaugggcauuccuuauugcaauuacuccaaauauugguaccugaaccauacaagcaccgggcggacgucucucccccgcugcuggcuggucuccaauggaagcuaccuuaacgaaacacacuucucugacgacaucgagcagcaggcugauaauaugaucaccgagaugcugcaaaaggaauaucucgacagacagggcaaaaccccucuggggcugguggaucuuuucguguuuagcacauccuucuaccucauuucuaucuuucugcaucuggucaagauuccgacccaccggcauaucguuggaaaacccuguccuaagccccaccgccucaaccacaugggcauuugcagcuguggccuguauaaacagccuggggugcccgugagauggaagcggugaggacuaguaauaaggaaacuguaugaaugucugugggcaggaagugaagagauccuucuguaaagguuuuuggaauuaugucugcugaauaauaaacuuuuuugaaauaauaaaucugguagaaaaaugagaucuaaaaaaaaaaaaaaaaaaaaaaaaaaaaaaaaaaaaaaaaaaaaaaaaaaaaaaaaaaaaaaaaugcaucccccccccccccccccccccccccccccccaaaggcucuuuucagagccaccagaauu

SEQ ID NO: 2981 - RNA, 1816 nt, Artificial Sequence
  mRNA product Design b-4 comprising derived and/or modified sequence from LASV(G1180-SLE-2010;Clade IV)__AIT17168__GPC (opt5)
gggagagucccgcagucggcguccagcggcucugcuuguucgugugugugucguugcaggccuuauucaagcuuaccaugggccagaucgugaccuucuuucaagaggucccccacguuauugaagaggugaugaacaucgugcugauugcccucagcauccuggcuguccuuaaggggcuguacaauuucgccacaugcggacucgugggccugcuuacguuucugcuccugugugggagauccugcaccgcgucucgguauaaaggaguuuacgaacugcagacacucgagcugaacauggaaacccuuaauaugacaaugccucugagcuguaccaagaacaauucccaucacuauauuauggugggcaacgagacagggcucgagcugacccuuacgaauaccucuaucaucaaccauaaauucugcaaucugagcgacgcucacaagaaaaaccucuacgaucaugcccugauguccauuaucucuacauuucaccugagcauuccgaauuucaaccaguaugaagccauguccugugacuuuaauggaggcaagaucagcguccaguacaaccucucucacuccuaugcuggcgaugccgcuaaucauugcgggaccguggccaacggaguucugcaaacauucaugcgcauggcguggggcgggagcuacauugcccuugacucuggacacggcuccugggauuguaucaugaccagcuaccaguaucugauuauccagaacacgacaugggaggaccauugccaguuuucuagacccuccccuaucggguaccucggacugcuuagccaacggacccgcgauauuuauaucuccagacggcugcucggcacauucaccuggacccugucugacagcgaaggcaaggauacacccgggggauacugucugacgcgcuggaugcucauugaggcugagcugaaaugcuuuggcaauaccgccguggcuaaguguaacgaaaaacacgacgaggaguucugcgauaugcuuagacuguuugacuucaauaagcaggccauccagcggcucaaagcggaagcccagauguccauucaacugaucaacaaggcugucaaugcccuuaucaacgaucagcugauuaugaagaaucaccuccgcgacaucauggggauuccuuauugcaacuacagcaaauauugguaccugaaucauacaaccacaggaaagaccucucugcccaaauguuggcucguguccaacggcagcuaccugaaugaaacgcacuucucugacgauaucgagcagcaagcugacaacaugauuacagagaugcuucagaaggaauauauggagagacaggggaaaaccccucugggacucguggaucuguuugucuucagcaccuccuuuuaccugaucucuaucuuccuucaucucguuaagauuccgacacaccggcauaucgugggcaaaagcugccccaagccucaccgccugaaucacaugggcauuuguuccugcgggcuguauaagcagcccggagugccugucaaauggaagagaugaggacuaguaauaaggaaacuguaugaaugucugugggcaggaagugaagagauccuucuguaaagguuuuuggaauuaugucugcugaauaauaaacuuuuuugaaauaauaaaucugguagaaaaaugagaucuaaaaaaaaaaaaaaaaaaaaaaaaaaaaaaaaaaaaaaaaaaaaaaaaaaaaaaaaaaaaaaaaugcaucccccccccccccccccccccccccccccccaaaggcucuuuucagagccaccagaauu

SEQ ID NO: 2982 - RNA, 1816 nt, Artificial Sequence
  mRNA product Design b-4 comprising derived and/or modified sequence from LASV(G1442-SLE-2011;Clade IV)__AIT17180__GPC (opt5)
gggagagucccgcagucggcguccagcggcucugcuuguucgugugugugucguugcaggccuuauucaagcuuaccaugggccagaucgugaccuucuuucaagaggucccccacguuauugaagaggugaugaacaucgugcugauugcccucagcauccuggcuguccuuaaggggcuguacaauguggccacaugcggacucauuggccugguuacguuccuucugcucugugggagauccugcaccacaacccuguauaaaggaguguacgaacugcagacacucgagcugaacauggaaacccuuaauaugacaaugccucugucuuguaccaagaacaauagccaucacuauauccgggucggcaacgagacggggcucgagcugacccuuacaaauaccuccaucauuaaccauaaauuuugcaaucugucugacgcgcacaagaaaaaccucuacgaucaugcucugaugagcaucauuuccacauuccaccugucuaucccgaauuuuaaccaguaugaagccaugagcugugacuucaauggaggcaagauuuccgugcaguacaaccucagccacucuuaugccggcgaugcugccaaucauugcgggaccguugcuaacggagugcugcaaacguuuaugcgcauggccuggggcggguccuacaucgcgcuugacagcggaagaggcaacugggauuguauuaugacaucuuaccaguaucugaucauccagaauaccacaugggacgaucacugccaguucucccggcccagcccuauuggguaccucggacugcuuucucaacgcaccagagacgucuauaucucccggcgccugcucggcaccuuuacauggacgcugagcgauuccgagggcaaggacacccccgggggauacugucugacaagauggaugcucauugaagccgagcugaaaugcuucggcaacaccgcuguggccaaguguaaugagaaacaugaugaagaguuuugcgacaugcuucggcuguucgauuuuaacaagcaggcuauccagcgccucaaagccgaagcgcagaugucuauucaacugaucaauaaggccgugaacgcucuuaucaaugaccagcugauuaugaagaaccaccucagagacaucauggggauuccuuauugcaauuacagcaaauauugguaccugaacaauacagccaccggaaagacgucccugcccaaauguuggcucaucagcaacggcucuuaccugaaugagacacacuucuccgaugacauugaacaggaggcugauaacaugaucaccgagaugcuucaaaaggaauauauggagcggcaggggaaaaccccucugggacucgucgaccuguucguuuuuagcacaucuuucuaccugaucagcauuuuucuucaucucgugaagaucccgacccaccgccauauugugggcaaauccugccccaagccucacagacugaaucauaugggcaucuguucuugcgggcuguauaagcagcccggagucccugugcgguggaaacgcugaggacuaguaauaaggaaacuguaugaaugucugugggcaggaagugaagagauccuucuguaaagguuuuuggaauuaugucugcugaauaauaaacuuuuuugaaauaauaaaucugguagaaaaaugagaucuaaaaaaaaaaaaaaaaaaaaaaaaaaaaaaaaaaaaaaaaaaaaaaaaaaaaaaaaaaaaaaaaugcaucccccccccccccccccccccccccccccccaaaggcucuuuucagagccaccagaauu

SEQ ID NO: 2983 - RNA, 1816 nt, Artificial Sequence
  mRNA product Design b-4 comprising derived and/or modified sequence from LASV(G3010-SLE-2013;Clade IV)__AIT17344__GPC (opt5)
gggagagucccgcagucggcguccagcggcucugcuuguucgugugugugucguugcaggccuuauucaagcuuaccaugggccagaucgugaccuucuuucaagaggucccccacguuauugaagaggugaugaacaucgugcugauugcccucagcauccuggcuguccuuaaggggcuguacaauuucgccacaugcggacucgugggccugguuacguuucuucugcucugugggagauccugcaccacaucucuguauaaaggaguguacgaacugcagacccucgagcugaacauggaaacacuuaauaugaccaugccucugagcuguacaaagaacaauucccaucacuauauuauggucggcaacgagaccgggcucgagcugacgcuuaccaauacaucuaucaucaaccauaaauucugcaaucugagcgacgcgcacaagaaaaaccucuacaaucaugcucugauguccauuaucucuaccuuucaccugagcauuccgaacuucaaucaguaugaagccauguccugugauuuuaacggaggcaagaucagcgugcaguacaaucucucucacuccuaugccggcgacgcugccagccauugcgggacaguugcuaacggagugcugcaaaccuucaugcggauggccuggggcgggucuuacauugcgcuugauuccggauacggcaagugggacuguaucaugacgagcuaucaguaccugauuauccagaacacaaccugggaggaucacugccaguuuucucgccccuccccuaucggguaucucggacugcuuagccaaagaacacgggacauuuacaucucccgcagacugcucggcaccuucaccuggacacugucugauagcgaaggcaaagacacgcccgggggauauugucugacccgguggaugcucauugaggccgagcugaagugcuuuggcaauacagcugucgccaaauguaacgaaaagcaugaugaggaguucugcgacaugcuucgccuguuugauuucaauaaacaggcuauccagagacucaagaccgaagcccagauguccauucaacugaucaacaaggcggugaaugcccuuaucaacgaccagcugauuaugaaaaaucaccuccgggauaucauggggauuccuuacugcaacuauagcaaguacugguaccugaaucacacaaccacgggaaaaacaucucugcccaaguguuggcucguguccaacggcagcuaucugaaugaaacccauuucucugacgacaucgagcagcaagcugauaacaugauuaccgagaugcuucagaaagaauacauggagcgccaggggaagacaccucugggacucgucgaccuguuuguuuucagcaccuccuuuuaucugaucucuaucuuccuucaccucgugaaaauuccgacacauagacacaucgugggcaagagcugccccaagccucaucggcugaaucacaugggcauuuguuccugcgggcuguacaaacagcccggagucccugugcgcuggaagagaugaggacuaguaauaaggaaacuguaugaaugucugugggcaggaagugaagagauccuucuguaaagguuuuuggaauuaugucugcugaauaauaaacuuuuuugaaauaauaaaucugguagaaaaaugagaucuaaaaaaaaaaaaaaaaaaaaaaaaaaaaaaaaaaaaaaaaaaaaaaaaaaaaaaaaaaaaaaaaugcaucccccccccccccccccccccccccccccccaaaggcucuuuucagagccaccagaauu

SEQ ID NO: 2984 - RNA, 1816 nt, Artificial Sequence
  mRNA product Design b-4 comprising derived and/or modified sequence from LASV(G502-SLE-2009;Clade IV)__AIT17126__GPC (opt5)
gggagagucccgcagucggcguccagcggcucugcuuguucgugugugugucguugcaggccuuauucaagcuuaccaugggccagaucgugaccuucuuucaagaggucccccacguuauugaagaggugaugaacaucgugcugauugcccucagcauccuggcuguccuuaaggggcuguacaauuucgccacaugcggacucgugggccugcuuacguuucugcuccugugugggagauccugcaccacaggacuguauaaaggcguuuacgaacuccagacccuggagcuuaacauggaaacacugaauaugaccaugccucucucuuguacaaagaacaauagccaucacuauauuaugguggggaacgagaccggacuggagcuuacgcugaccaauacauccaucaucaaccauaaauucugcaaucucucugacgcgcacaagaaaaaccuguacgaucaugcucugaugagcauuaucuccaccuuucaccucucuauuccgaauuucaaccaguaugaagccaugagcugugacuuuaauggcggcaagaucuccguccaguacaaccugagccacucuuaugccggggaugcugccgaccauugcggaacaguggcuaauggcguucuucaaaccuucaugcggauggccuggggaggguccuacauugcgcuggauagcggccgcgggagaugggacuguaucaugacgucuuaccaguaucucauuauccagaacacaaccugggaggaucacugccaguuuucccggcccagcccuaucggauaccugggccuucugucucaacgcacaagagacauuuauaucucccggcgccuccugggcaccuucaccuggacacugagcgauuccgaagggaaggacacgcccggaggcuacugucucaccagauggaugcugauugaggccgagcuuaaaugcuuugggaacacagcuguggccaaguguaaugaaaaacaugaugaggaguucugcgacaugcugcggcucuuugauuucaacaagcaggcuauccagcgccugaaagccgaagcgcagaugucuauucaacuuaucaauaaggccgucaacgcucugaucaaugaccagcucgugaugaagaaccaccugagagacauuaugggaaucccuuauugcaauuacagccgguauugguaccugaaccacaccacaaccggccgcacgucccuccccaaauguuggcuggugagcaaugggucuuaccuuaacgaaacacauuucuccgaugacauugagcagcaagccgauaauaugaucaccgagaugcugcagaaggaauauauggagagacagggaaaaaccccucucggccuggucgaccuguuuguuuucagcacaucuuuuuaccuuauuagcaucuuccuccaccuggugaagaucccgacccaucggcacauugugggcaaauccugccccaagccucaucgccugaaccacauggggaucuguucuugcggacucuauaaacagcccggcgucccugugaaguggaagagaugaggacuaguaauaaggaaacuguaugaaugucugugggcaggaagugaagagauccuucuguaaagguuuuuggaauuaugucugcugaauaauaaacuuuuuugaaauaauaaaucugguagaaaaaugagaucuaaaaaaaaaaaaaaaaaaaaaaaaaaaaaaaaaaaaaaaaaaaaaaaaaaaaaaaaaaaaaaaaugcaucccccccccccccccccccccccccccccccaaaggcucuuuucagagccaccagaauu

SEQ ID NO: 2985 - RNA, 1816 nt, Artificial Sequence
  mRNA product Design b-4 comprising derived and/or modified sequence from LASV(G733-SLE-2010;Clade IV)__AIT17154__GPC (opt5)
gggagagucccgcagucggcguccagcggcucugcuuguucgugugugugucguugcaggccuuauucaagcuuaccaugggccagaucgugaccuucuuucaagaggucccccacguuauugaagaggugaugaacaucgugcugauugcccucagcauccuggcuguccuuaaggggcuguacaauuucgccacaugcggaauugugggccucguuuccuuucugcuucugugugggagaucuugcacgaccagccucuauaaaggaguguacgaacugcagacacuggagcucaacauggaaacccugaauaugacaaugccucuuuccuguaccaagaacaauucucaucacuauaucauggucggcaacgagacagggcuggagcucacccugacgaauaccagcaucauuaaccauaaauucugcaaucuuuccgacgcgcacaagaaaaaccuguacgaucaugcucucaugucuaucauuagcacauuucaccuguccaucccgaauuucaaccaguaugaagccaugagcugugacuuuaauggaggcaagauuucugugcaguacaaccugucccacagcuaugccggcgaugcugccaaucauugcgggaccaucgcuaacggaguucuccaaacauucaugcggauggccuggggcgggucuuacauugcgcuggacuccggacgcgauagaugggacuguaucaugaccagcuaccaguaucuuaucauucagaacacgacaugggaggaucacugccaguuuucucggcccuccccuaucggcuaccuggggcuccugagccaacgcaccagagacauuuauaucucccggcgccuucugggaacauucaccuggacccucucugauagcgaaggcaaggacacacccggcggguacugucugacgagauggaugcugauugaggccgagcucaaaugcuuuggaaauaccgcuguggccaaguguaacgaaaaacaugaugaggaguucugcgacaugcugcggcuuuuugauuucaauaagcaggcuauccagcgccugaaagccgaagcgcagauguccauccaacucauuaacaaggccgucaaugcucugaucaacgaccagcuuauuaugaagaaucaccugagagacaucaugggcauuccuuauugcaacuacagcaaauauugguaccucaaucacacaaccacagggaagaccucucugcccaaauguuggcugguguccaacggaagcuaccucaaugaaacgcauuucucugaugacaucgagcagcaagccgauaacaugaucacagagaugcugcagaaggaauauauggagcggcagggcaaaaccccucuugggcugguggaccucuuugucuucagcaccuccuuuuaccugauuucuaucuuccugcaccuuguuaagauuccgacacaucgccacguggugggaaaaagcugccccaagccucauagacucaaucacaugggcaucuguuccugcggccuguaugggcagcccggagucccugugaaguggaaacggugaggacuaguaauaaggaaacuguaugaaugucugugggcaggaagugaagagauccuucuguaaagguuuuuggaauuaugucugcugaauaauaaacuuuuuugaaauaauaaaucugguagaaaaaugagaucuaaaaaaaaaaaaaaaaaaaaaaaaaaaaaaaaaaaaaaaaaaaaaaaaaaaaaaaaaaaaaaaaugcaucccccccccccccccccccccccccccccccaaaggcucuuuucagagccaccagaauu

SEQ ID NO: 2986 - RNA, 1816 nt, Artificial Sequence
  mRNA product Design b-4 comprising derived and/or modified sequence from MOPV/LASV reassortant(IGS-1;Clade IV)__AFY05576__GPC (opt5)
gggagagucccgcagucggcguccagcggcucugcuuguucgugugugugucguugcaggccuuauucaagcuuaccaugggccagaucgugaccuucuuucaagaggucccccacguuauugaagaggugaugaacaucgugcugauugcccucagcguccuggcugugcuuaaggggcuguacaauuucgccacaugcggacucguuggccuggugacguuucuucugcucugugggagauccugcaccacaucucuguauaaaggagucuacgaacugcagacccucgagcugaacauggaaacacuuaauaugaccaugccucugagcuguacaaagaacaauucccaucacuauaucauggugggcaacgagaccgggcucgagcugacgcuuaccaauacaucuauuaucaaccauaaauucugcaaucugagcgacgcgcacaagaaaaaccucuacgaucaugcucugauguccaucauuucuaccuuucaccugagcaucccgaauuucaaccaguaugaagccauguccugugacuuuaauggaggcaagauuagcguucaguacaaccucucucacuccuaugccggcgaugcugccaaucauugcgggacaguggcuaacggaguccugcaaaccuucaugcggauggccuggggcgggagcuacaucgcgcuugacucuggacgcggcaacugggauuguauuaugacguccuaccaguaucugaucauucagaauacaaccugggaggaccacugccaguuuagcagacccucuccuaucggguaccucggacugcuuucccaacggacacgcgauaucuauauuagcagacggcugcucggcaccuucaccuggacacuguccgacucugaaggcgaggauacgcccgggggauacugucugacccgcuggaugcucaucgaggccgaacugaagugcuuuggcaacacagcuguggccaaauguaaugagaagcaugacgaagaguucugcgauaugcuuagacuguuugacuucaacaaacaggcuauucagcggcucaaggccgaagcgcagaugagcauccaacugauuaauaaagccgugaacgcucuuaucaaugaucagcugaucaugaagaaccaccuccgcgacauuauggggaucccuuauugcaauuacuccaaguauugguaccugaaccacaccacaaccggaagaacgagccugcccaaauguuggcucgucucuaauggcuccuaccugaacgagacacauuucagcgacgauauugagcagcaagccgacaauaugaucaccgaaaugcuucagaaggaguauauggaacggcaggggaaaaccccucugggacucguugaucuguuuguguucucuaccagcuuuuaccugauuuccaucuuccuucaccucgugaagaucccgacacaucgccacauugucggcaaaucuugccccaagccucauagacugaaccacaugggcaucuguagcugcgggcuguauaaacagcccggagugccuguuaaguggaagcggugaggacuaguaauaaggaaacuguaugaaugucugugggcaggaagugaagagauccuucuguaaagguuuuuggaauuaugucugcugaauaauaaacuuuuuugaaauaauaaaucugguagaaaaaugagaucuaaaaaaaaaaaaaaaaaaaaaaaaaaaaaaaaaaaaaaaaaaaaaaaaaaaaaaaaaaaaaaaaugcaucccccccccccccccccccccccccccccccaaaggcucuuuucagagccaccagaauu

SEQ ID NO: 2987 - RNA, 1816 nt, Artificial Sequence
  mRNA product Design b-4 comprising derived and/or modified sequence from LASV(LM765-SLE-2012;Clade IV)__AIT17814__GPC (opt5)
gggagagucccgcagucggcguccagcggcucugcuuguucgugugugugucguugcaggccuuauucaagcuuaccaugggccagaucgugaccuucuuucaagaggucccccacguuauugaagaggugaugaacaucgugcugauugcccucagcauccuggcuguccuuaaggggcuguacaauuucgccacaugcggacucgugggccugguuacguuucuucugcucugugggagauccugcaccacaucucuguauaaaggaguguacgaacugcagacccucgagcugaacauggaaacacuuaauaugaccaugccucugagcuguacaaagaacaauucccaucacuauauuauggucggcaacgagaccgggcucgagcugacgcuuaccaauacaucuaucaucgaccauaaauucugcaaccugagcgaugcgcaccggaagaaucucuacgaccaugcucugauguccauuaucucuaccuuucaccugagcauuccgaacuucaaucaguaugaagccauguccugugauuuuaacggaggcaaaaucagcgugcaguacaaucucucucacuccuaugccaaggacgcugccgaucauugcggcacaguugcuaacggggugcugcaaaccuucaugcgcauggccuggggaggcagcuacauugcgcuugacucugggagaggacggugggauuguaucaugacguccuaccaguaucugauuauccagaauacaaccugggaggaccacugccaguuuagccgccccucuccuaucggcuaccucgggcugcuuucccaaagaacacgggauauuuauaucagccgcagacugcucggaaccuucaccuggacacuguccgacucugaaggcaaggauacgcccggcggguacugucugacccgguggaugcucauugaggccgagcugaaaugcuuuggaaacacagcugucgccaaguguaacgaaaaacaugacgaggaguucugcgauaugcuucgccuguuugacuucaauaagcaggcuauccagagacucaaagccgaagcgcagaugagcauucaacugaucaacaaggccgugaaugcucuuaucaacgaccagcugauuaugaagaaucaccuccgggauaucaugggcauuccuuauugcaacuacuccaaauauugguaccugaaucacaccacaaccgggaagacgagccugcccaaauguuggcucgugucuaacggauccuaccugaaugaaacacauuucagcgacgauaucgagcagcaagccgacaacaugauuaccgagaugcuucagaaggaauauauggagcgccagggcaaaaccccucuggggcucgucgaucuguuuguuuucucuaccagcuuuuaccugaucuccaucuuccuucaccucgugaagauuccgacacauagacacaucgugggaaaacccugcccuaagccccaucggcugaaucacaugggcauuuguucuugcggccuguauaagcagccugggguccccgugaaauggaagcgcugaggacuaguaauaaggaaacuguaugaaugucugugggcaggaagugaagagauccuucuguaaagguuuuuggaauuaugucugcugaauaauaaacuuuuuugaaauaauaaaucugguagaaaaaugagaucuaaaaaaaaaaaaaaaaaaaaaaaaaaaaaaaaaaaaaaaaaaaaaaaaaaaaaaaaaaaaaaaaugcaucccccccccccccccccccccccccccccccaaaggcucuuuucagagccaccagaauu

SEQ ID NO: 2988 - RNA, 1816 nt, Artificial Sequence
  mRNA product Design b-4 comprising derived and/or modified sequence from LASV(LM776-SLE-2012;Clade IV)__AIT17824__GPC (opt5)
gggagagucccgcagucggcguccagcggcucugcuuguucgugugugugucguugcaggccuuauucaagcuuaccaugggccagaucgugaccuucuuucaagaggucccccacguuauugaagaggugaugaacaucgugcugauugcccucagcauccuggcuguccuuaaggggcuguacaauuucgccacaugcggacucgugggccugguuacguuucuucugcucugugggagauccugcaccacaucuguguauaaaggagucuacgaacugcagacccuggagcucaacauggaaacacugaauaugaccaugccucuuagcuguacaaagaacaauucccaucacuauauuauggugggcaacgagaccgggcuggagcucacgcugaccaauacaucuaucaucaaccauaaauucugcaaucuuagcgacgcgcacaagaaaaaccuguacgaucaugcucucauguccauuaucucuaccuuucaccugagcauuccgaauuucaaccaguaugaagccauguccugugacuuuaauggaggcaagaucagcguucaguacaaccugucucacuccuaugccggcgaugcugccaaucauugcgggacaguggcuaacggaguccuccaaaccuucaugcggauggccuggggcgggagcuacauugcgcuggacucuggacacggcaagugggauuguaucaugacguccuaccaguaucuuauuauccagaacacaaccugggaggaccauugccaguuuagccgccccucuccuaucggguaccugggacuccugucccaaagaacacgggauauuuauaucagccgcagacuucugggcaccuucaccuggacacucuccgacucugaaggcaaagauacgcccgggggauacugucugacccgguggaugcugauugaggccgagcucaagugcuuuggcaauacagcuguggccaaauguaacgaaaagcacgacgaggaguucugcgauaugcugcgccuuuuugacuucaauaaacaggcuauccagagacugaaggccgaagcgcagaugagcauucaacucaucaacaaggccgugaaugcucugaucaacgaucagcuuauuaugaaaaaucaucugcgggacaucauggggauuccuuauugcaacuacuccaaguauugguaccucaaucacaccacaaccggaaaaacgagccugcccaaguguuggcuggucucuaacggcuccuaccucaaugaaacacacuucagcgacgauaucgagcagcaagccgacaacaugauuaccgagaugcugcagaaagaauauauggagcgccaggggaagaccccucuuggacugguugaucucuuuguguucucuaccagcuuuuaccugaucuccaucuuccugcaucuugugaaaauuccgacacacagacauaucgucggcaagucuugccccaagccucaccggcucaaucacaugggcauuuguagcugcgggcuguauaaacagcccggagugccuguucgcuggaagagaugaggacuaguaauaaggaaacuguaugaaugucugugggcaggaagugaagagauccuucuguaaagguuuuuggaauuaugucugcugaauaauaaacuuuuuugaaauaauaaaucugguagaaaaaugagaucuaaaaaaaaaaaaaaaaaaaaaaaaaaaaaaaaaaaaaaaaaaaaaaaaaaaaaaaaaaaaaaaaugcaucccccccccccccccccccccccccccccccaaaggcucuuuucagagccaccagaauu

SEQ ID NO: 2989 - RNA, 1816 nt, Artificial Sequence
  mRNA product Design b-4 comprising derived and/or modified sequence from LASV(Mad39;Clade IV)__ANH09722__GPC (opt5)
gggagagucccgcagucggcguccagcggcucugcuuguucgugugugugucguugcaggccuuauucaagcuuaccaugggccagaucgugaccuucuuucaagaggucccccacguuauugaagaggugaugaacaucgugcugauugcccucagcauccuggcuguccuuaaggggcuguacaauguggccacaugcggacucauuggccugguuacguuccuucugcucugugggagauccugcaccacaacccuguauaaaggaguguacgaacugcaggcgcucgagcugaacauggaaacacuuaauaugaccaugccucugucuuguacaaagaacaauagccaucacuauauccgggucggcaacgagaccgggcucgagcugacgcuuaccaauacaucccugaucaaccauaaauuuugcaaucucucugacgcucacaagaaaaaccuguacgaucaugcccugaugagcauuaucuccaccuuccaccucucuauuccgaauuuuaaccaguaugaagccaugagcugugacuucaaugauggaaagaucuccgugcaguacaaccugagccacacauaugcuggcgacaccgccaaucauugcggcacgguugcuaacggggugcuucaaacauuuaugcgcauggccuggggaggcucuuacauugcgcuggauuccgggagaggaggcugggacuguaucaugaccagcuaccaguaucucauuauccagaacacaaccugggaggaucacugccaguucucucggcccuccccuaucggguaccugggacuucugagccaacgcaccagagacauuuauaucucucggcgccuccugggcacauuuacguggacccuguccgauagcgaaggcaaggacacacccgggggauacugucucaccagauggaugcugauugaggccgagcuuaaaugcuucggcaauacagcugucgccaaguguaacgaaaaacaugaugaggaauuuugcgacaugcugcgccucuucgauuuuaauaagcaggcuauccagcggcugaaagccgaggcgcagauguccauucaacuuaucaacaaggccgugaaugcucugaucaacgaccagcucauuaugaagaaucaccugagagacaucauggggauuccuuauugcaacuacucuaaauauugguaccugaaucacaccgugacgggaaagacaagccuccccaaauguuggcuggucuccaacggcagcuaccuuaaugaaacccauuucucugaugacaucgagcagcaagccgauaacaugauuaccgagaugcugcagaaggaauauauggagcggcaggggaaaacaccucucggacugguugaccuguucguguuuuccaccagcuucuaccuuaucucuaucuuucuccaccuggugaagauuccgacacaucgccacgucgugggcaaacccugcccuaagccccauagacugaaucacaugggcaucuguagcugcggguucuauaagcagccuggaguucccgugcgguggaaacgcugaggacuaguaauaaggaaacuguaugaaugucugugggcaggaagugaagagauccuucuguaaagguuuuuggaauuaugucugcugaauaauaaacuuuuuugaaauaauaaaucugguagaaaaaugagaucuaaaaaaaaaaaaaaaaaaaaaaaaaaaaaaaaaaaaaaaaaaaaaaaaaaaaaaaaaaaaaaaaugcaucccccccccccccccccccccccccccccccaaaggcucuuuucagagccaccagaauu

SEQ ID NO: 2990 - RNA, 1816 nt, Artificial Sequence
  mRNA product Design b-4 comprising derived and/or modified sequence from LASV(Z0947-SLE-2011;Clade IV)__AIT17840__GPC (opt5)
gggagagucccgcagucggcguccagcggcucugcuuguucgugugugugucguugcaggccuuauucaagcuuaccaugggccagaucgugaccuucuuucaagaggucccccacguuauugaagaggugaugaacaucgugcugauugcccucagcauccuggcuguccuuaaggggcuguacaauuucgccacaugcggacucgugggccugguuacguuucuucugcucugugggagauccugcaccauuucucuguauaaaggaguguacgaacugcagacacucgagcugaacauggaaacccuuaauaugacaaugccucugagcuguaccaagaacaauucccaucacuauaucauggucggcaacgagacagggcucgagcugacccuuacgaauaccucuaucauuaaccauaaauucugcaaucugagcgacgcgcacaagaaaaaccucuacgaucaugcucugauguccaucauuucuacauuucaccugagcaucccgaauuucaaccaguaugaagccauguccugugacuuuaauggaggcaagauuagcgugcaguacaaccucucucacuccuaugccggcgaugcugccaaucauugcgggaccguugcuaacggagugcugcaaacauucaugcggauggccuggggcgggagcuacaucgcgcuugacucuggacgcgauagaugggacuguauuaugaccuccuaccaguaucugaucauccagaacacgacaugggaggaucacugccaguuuagccggcccucuccuauuggcuaccucgggcugcuuucccaacgcaccagagacaucuauauuagccggcgccugcucggaacauucaccuggacccuguccgauucugaaggcaaggacacacccggcggguacugucugacgagauggaugcucaucgaggccgagcugaaaugcuuuggaaauaccgcugucgccaaguguaacgaaaaacaugaugaggaguucugcgacaugcuucggcuguuugauuucaauaagcaggcuauucagcgccucaaagccgaagcgcagaugagcauccaacugaucaacaaggccgugaaugcucuuauuaacgaccagcugaucaugaagaaucaccucagagacauuaugggcaucccuuauugcaacuacuccaaauauugguaccugaaucacacaaccacagggaagaccagccugcccaaauguuggcucgugucuaacggauccuaccugaaugaaacgcauuucagcgaugacauugagcagcaagccgauaacaugaucacagagaugcuucagaaggaauauauggagcggcagggcaaaaccccucuggggcucgucgaccuguuuguuuucucuaccagcuuuuaccugaucuccauuuuccuucaccucgugaagaucccgacacaucgccacauugugggaaaacccugcccuaagccccauagacugaaucacaugggcaucuguucuugcggccuguauaagcagccugggguccccgugaaauggaagcggugaggacuaguaauaaggaaacuguaugaaugucugugggcaggaagugaagagauccuucuguaaagguuuuuggaauuaugucugcugaauaauaaacuuuuuugaaauaauaaaucugguagaaaaaugagaucuaaaaaaaaaaaaaaaaaaaaaaaaaaaaaaaaaaaaaaaaaaaaaaaaaaaaaaaaaaaaaaaaugcaucccccccccccccccccccccccccccccccaaaggcucuuuucagagccaccagaauu

SEQ ID NO: 2991 - RNA, 1816 nt, Artificial Sequence
  mRNA product Design b-4 comprising derived and/or modified sequence from LASV(Josiah;Clade IV)__NP_694870__GPC (opt6)
gggagagucccgcagucggcguccagcggcucugcuuguucgugugugugucguugcaggccuuauucaagcuuaccaugggccaaauaguaaccuucuuucaagaaguaccacacguaauagaagaaguaaugaauauaguacuaauagcucuaagcguucucgccgucuuaaaaggacuauacaacuucgcaacauguggccuaguaggauuaguaacauuucuacuccuaugcggacgaucaugcacaacaucacuauauaaaggaguauacgaacugcaaacacuagaacuaaacauggaaacacuaaauaugacaaugcccuuaaguugcacuaaaaacaacucccaccacuauauaauggucggaaacgaaacaggccucgaauuaacauuaacaaacacaaguauaauaaaucacaaauuuuguaaucuaagcgaugcacacaaaaagaauuuauaugaccacgcacuaaugucaauaauaaguaccuuucauuuaucaaucccuaacuuuaaccaauaugaagcaaugucuugcgauuucaacggaggaaaaauaucaguacaauauaacuuaucacacaguuacgcaggagaugcagccaaccacugcggcacuguagcaaacggaguacuccaaaccuucaugagaauggcauggggcggauccuauauugcacucgacaguggaagagguaacugggauugcaucaugaccucauaccaauauuuaauaauacagaauacaacaugggaagaccauugccaauuuucuagaccaucaccuauagguuacuuaggcuuauuaucacaaagaacacgagauauauacauauccagaagauuacuaggaacauuuacauggacacuaagugauagcgaaggcaaagacaccccaggagguuacugcuuaaccagauggauguuaauagaagcagaauuaaaauguuuuggcaauacagcaguagcaaaaugcaacgaaaaacacgaugaagaauuuugcgauaugcucagacuuuucgacuucaacaaacaagcaauccaaagauuaaaagcugaagcacaaaugagcauacaacuaaucaauaaagcaguuaaugccuuaauaaacgaccaacuaauaaugaaaaaccacuuaagagacauaaugggaauaccauacugcaacuauaguaaauacugguaucuaaaucacacaacuacaggccguacuucacugccaaaauguuggcuaguaagcaacggaucauauuuaaacgaaacacauuuuucagacgauauagaacaacaagcugauaacaugauaaccgaaaugcuucaaaaagaauacauggaaagacaaggcaaaacaccccucggucuaguagaccuauuugucuucagcacaaguuuuuacuuaauaucaauauucuuacaccuuguaaaaauaccaacacauagacacauaguaggaaaaucauguccaaaaccacauagacuaaaccacaugggaauauguagcugcggucuauauaaacaaccaggagucccaguaaaauggaaacgauaaggacuaguaauaaggaaacuguaugaaugucugugggcaggaagugaagagauccuucuguaaagguuuuuggaauuaugucugcugaauaauaaacuuuuuugaaauaauaaaucugguagaaaaaugagaucuaaaaaaaaaaaaaaaaaaaaaaaaaaaaaaaaaaaaaaaaaaaaaaaaaaaaaaaaaaaaaaaaugcaucccccccccccccccccccccccccccccccaaaggcucuuuucagagccaccagaauu

SEQ ID NO: 2992 - RNA, 1813 nt, Artificial Sequence
  mRNA product Design b-4 comprising derived and/or modified sequence from LASV(LP;Clade I)__AAF86701__GPC (opt6)
gggagagucccgcagucggcguccagcggcucugcuuguucgugugugugucguugcaggccuuauucaagcuuaccaugggacaaauuauaacauucuuucaagaaguaccccauguaauagaagaagucaugaacauaguucuaauagcacuaucuuuauuagcaauucuaaaaggcuuauauaacauagcaaccugcggcauaaucggccuagucgcuuuccuauucuuaugcggaaaaaguugcucauuaacacuaaaaggaggauaugaacuacaaacucucgaauuaaacauggaaacauuaaacaugacaaugccuuuaucuugcacaaaaaauucaucacaucacuacauaagagucggaaaugaaacaggacuagaacuuacacuaacaaacacaucaauaauuaaccacaaauuuugcaaccucucugacgcacauaaaaaaaaccuauacgaccaugcacuaaugucaauaauaucgacauuccaccuaucaauaccaaacuuuaaccaauaugaagccaugucaugcgacuucaacggugguaaaauauccguccaauacaaucuaucccauuccuacgcaggagacgccgcagaacauugcggaacugucgcaaacggaguacuacaaacuuucaugagaauggcauggggaggaagauauauugcccuagauucaggaaaaggaaacugggacugcaucaugaccucauaccaauaccuuauaauacaaaauacuacaugggaagaccacugccaauucucacgaccaucuccuaucggauaucuaggacuacuaucacaacgaacucgagacauauacauaagcagacgauuauuaggcacauuuacuuggacuuuaucagacucagaaggcaaugaaacaccaggaggauacuguuuaacacgauggaugcucauagaagcagaauuaaaauguuucggaaauacagcaguagcaaaaugcaacgaaaaacacgacgaagaauucugcgacauguuaagauuauucgacuucaauaaacaagcaauacguagacuaaaagcagaagcucaaaugucaauacaacuuauaaacaaagccguaaacgcacuaaucaacgaccaauuaaucaugaaaaaucauuuacgagacauuauggguauaccauacugcaacuacucuaaauacugguaucuaaaucacacaucuucaggacgaacaucauuaccaaaaugcuggcuuauaaguaacggaucauacuuaaaugaaacacaauucucagacgacauagaacaacaagcagauaacaugauaacugaaaugcuacaaaaagaauacauagaacgucaaggaaaaacacccuuaggacuaguagacauauucauauuuuccacaucauuuuacuuaauuucaaucuuccuacaccucauaaaaaucccuacccacagacacauaguaggaaaaccaugcccaaaaccacauagacuaaaccauaugggaguaugcucaugcggcuuauacaaacauccaggaguaccaacaaaauggaaacgauaaggacuaguaauaaggaaacuguaugaaugucugugggcaggaagugaagagauccuucuguaaagguuuuuggaauuaugucugcugaauaauaaacuuuuuugaaauaauaaaucugguagaaaaaugagaucuaaaaaaaaaaaaaaaaaaaaaaaaaaaaaaaaaaaaaaaaaaaaaaaaaaaaaaaaaaaaaaaaugcaucccccccccccccccccccccccccccccccaaaggcucuuuucagagccaccagaauu

SEQ ID NO: 2993 - RNA, 1813 nt, Artificial Sequence
  mRNA product Design b-4 comprising derived and/or modified sequence from LASV(803213;Clade II)__AAF86703__GPC (opt6)
gggagagucccgcagucggcguccagcggcucugcuuguucgugugugugucguugcaggccuuauucaagcuuaccaugggacaaauaauaaccuucuuccaagaaguaccacacguaauagaagaagucaugaacauagucuuaauagcauuaucauuauuagcaauauuaaaaggaauauacaacguagcaacaugcggauuauucggacuaauauccuuucuauuauuaugcggacgcagcugcucugucacauacaaaggagucuaugaacuacaaacauuagaacuaaacauggcaaacuuaaacaugacaaugccacuauccugcacaaaaaacaauucccaccacuacauaaugguuggcaacgaaacaggacucgaacuaacccuuacaaacacuucuauaauuaaccauaaauucugcaaccuaucagaugcacacaaaaaaaaccucuaugaccacgcacuaaugucuauaauaucaacauuucaccuaucuauaccaaacuuuaaccaauaugaagcaauguccugugauuuuaaugguggcaaaauaucuguacaauacaacuuaucacauucauucgcaguagacgcagcaaaccacugcggaacaauagcaaacggaguucuccaaacauuuaugagaauggccuggggaggaucauacaucgcacuagacucaggaaaaggaaauugggacuguauaaugaccucauaccaauaccuaaucauacaaaacacaacaugggaagaucauugccaauucucacgucccucuccaauaggauaucuaggccuccuaucacaaagaacaagagauaucuacauaucaagacgacuacucggaacauucacauggacacuaagcgacuccgaaggaaacgaagccccaggaggauacugccuuacacgauggaugcuaaucgaagccgaacuaaaaugcuuuggaaacacagcagucgcaaaauguaaugaaaaacaugaugaagaauuuugcgauaugcuaagacuauuugacuucaacaaacaagcaauaaaaagacucaaaacagaagcccaaaugucuauucaacucauaaauaaagcaguaaaugcauuaauuaacgaccaacuaaucaugaaaaaccaucuuagagauauuaugggaauaccauacuguaacuacucaagauacugguaccuaaaccacacaguaacuggaaaaacaucucuaccacgaugcuggcucguaucuaacgguucauaccuaaaugaaacacacuuuucugacgacaucgaacaacaagcagacaacaugauaacagaaaugcuacaaaaagaauacauggacagacaaggaaaaacaccacuaggucuaguagauuuauucguauucaguacaucuuucuaccuaauaucaauauuccuacaccucguaaaaauacccacacaccgccacauaguaggaaaaccauguccaaaaccacaccgacuaaaccacaugggcaucugcucaugcggacuauauaaacaccccggaguaccagucaaauggaaaagauaaggacuaguaauaaggaaacuguaugaaugucugugggcaggaagugaagagauccuucuguaaagguuuuuggaauuaugucugcugaauaauaaacuuuuuugaaauaauaaaucugguagaaaaaugagaucuaaaaaaaaaaaaaaaaaaaaaaaaaaaaaaaaaaaaaaaaaaaaaaaaaaaaaaaaaaaaaaaaugcaucccccccccccccccccccccccccccccccaaaggcucuuuucagagccaccagaauu

SEQ ID NO: 2994 - RNA, 1813 nt, Artificial Sequence
  mRNA product Design b-4 comprising derived and/or modified sequence from LASV(GA391;Clade III)__CAA36645__GPC (opt6)
gggagagucccgcagucggcguccagcggcucugcuuguucgugugugugucguugcaggccuuauucaagcuuaccaugggacaaauaguaacauucuuccaagaaguaccacauguaauugaagaaguaaugaacauaguacuaauagcacuaucaauccuagcaauauuaaaaggauuauauaaugucgcuacuuguggacuaauaggacucguaacauuucuacuauuaucagguagaucaugcagccuuauauacaaaggaacauacgaauuacaaacauuagaacuaaacauggaaacccuaaacaugaccaugccacuauccuguaccaaaaacaacucacaccauuacauuagaguaggaaacgaaacaggucuugaacuaacauugacaaacacaagcauacuaaaccauaaauucugcaaccuaucagaugcacacaaaagaaaccuauaugaccauucacuuaugucuauaaucucaacauuucauuuauccauaccuaacuucaaucaauaugaagcaaugucuugcgauuucaacggcggaaaaauaacaguacaauacaaccucucccauuccuucgcaguagacgcagcaggccacugcgguacauuagcaaacggcguacuacaaacauuuaugagaauggcauggggcggaucauacauagcuuuagacucagguagaggaaacugggauugcaucaugacaaguuaucaauaccuaauaauucaaaacacaacaugggacgaccacugccaauucucaagaccuucaccaauaggauauuuaggucuacucucccaaagaacacgcgacauauauauaucaagaagacuacuagguacauucacauggacacuaucagauucagaaggaaacgaaacaccaggaggauacuguuuaacacgcuggaugcucauagaagcugaacuaaaaugcuuuggcaacacagcaguagcaaaauguaacgaaaaacacgacgaagaauuuugcgacauguuacgacuauucgacuuuaacaaacaagcaauaagaagacuaaaaacagaagcacaaaugucaauccaacucauuaacaaagcaguaaacgcuuuaauaaacgaccaauuaauaaugaaaaaccaccuacgagacauaaugggaauacccuauuguaacuacucacgauauugguaucuaaaccauaccucaacaggaaaaaccucccuacccagaugcuggcuaaucucaaacggaucauaccuaaacgaaacaaaauucucugacgacauagaacaacaagcugacaacaugauaaccgaaauguuacaaaaagaauacauagauagacaaggcaaaacaccacuaggauuaguagacuuauucguauucucaacaucauucuacuuaauaaguaucuuccuacaccuagugaaaauaccaacccacagacacaucgucgguaaaccauguccaaaaccacacagacuaaaucacauggguauaugcucaugcggcuuauauaaacaaccaggaguaccaguuagauggaaaagauaaggacuaguaauaaggaaacuguaugaaugucugugggcaggaagugaagagauccuucuguaaagguuuuuggaauuaugucugcugaauaauaaacuuuuuugaaauaauaaaucugguagaaaaaugagaucuaaaaaaaaaaaaaaaaaaaaaaaaaaaaaaaaaaaaaaaaaaaaaaaaaaaaaaaaaaaaaaaaugcaucccccccccccccccccccccccccccccccaaaggcucuuuucagagccaccagaauu

SEQ ID NO: 2995 - RNA, 1816 nt, Artificial Sequence
  mRNA product Design b-4 comprising derived and/or modified sequence from LASV(AV;Clade V)__CCA30314__GPC (opt6)
gggagagucccgcagucggcguccagcggcucugcuuguucgugugugugucguugcaggccuuauucaagcuuaccaugggacaaauaguuaccuucuuccaagaaguaccacacguaauagaagaaguaaugaacauaguacucaucgcauuaagcauacuagcuguauuaaaaggucuauauaauauagcuaccuguggacuaaucggacucaucacauuuuuacuuuuaugcggucgaucauguucuucaaaccucuacaaaggaguauaugaauuacaaucauuagaccuaaauauggaaacauuaaacaugacaaugccacuaucaugcacaaaaaacaacucccaccacuacaucagaguaggaaaugauaccggacuagaacuaacucuaacaaacacaucaauacucaaccacaaauucugcaaccuaucugaugcacacaaaaaagaucuauacgaccaugcauuaauguccauaauaaguacuuuucacuuauccauaccaaacuucaaccaauacgaagcuaugucaugcgacuucaacggaggaaaaauauccguacaauauaaucuaucucacuccuacgcaauagacgcagcaaaucacugcggaaccguagcaaacgguaucuuacaaacuuucaugcgaauggccuggggaggaucauacauagccuuagacucaggaagaggaaacugggacuguauaaugacauccuaccaauaccuaaucauacaaaacacaaccugggaaaaccacugccaauucucuagaccaucacccaucggcuacuuaggauuacuaucacaacgaacuagagauauauacauaucaagaagacuacuaggaacuuuuacauggacauuauccgacucagaaggcaacgcaacaccaggaggauacugccuaacaagauggaugcuaauugaagcagaacuaaaaugcuucggcaauacagcaguagcaaaaugcaacgaaaaacacgacgaagaauuuugcgauaugcuaagauuauucgacuuuaauaaacaagcaauauccagacuaaaaucagaagcacaaaugucaauacaauuaauaaacaaagcuguuaaugcucuaauaaaugaucaacuuauaaugaaaaaccacuuacgagacauaaugggaauaccauauugcaacuacucaaaauacugguacuuaaaccauacaauaacaggaaaaacaucacuuccaaaauguuggcuagucuccaacggaucauaucuaaacgaaacccacuuuucagacgacauagaacaacaagcagacaacaugauaacagaaaugcuacaaaaagaauacauggaaagacagggaaaaacaccauuaggacuaguagaccucuucguauuuucuacaaguuucuaucuaauaucgauauuccuacgacuaguaaaaauacccacccacagacauaucgucggaaaaccaugcccaaaaccacauagacuaaaccauaugggaauaugcucauguggacuauacaaacaaccaggcguaccugucagauggaaaagauaaggacuaguaauaaggaaacuguaugaaugucugugggcaggaagugaagagauccuucuguaaagguuuuuggaauuaugucugcugaauaauaaacuuuuuugaaauaauaaaucugguagaaaaaugagaucuaaaaaaaaaaaaaaaaaaaaaaaaaaaaaaaaaaaaaaaaaaaaaaaaaaaaaaaaaaaaaaaaugcaucccccccccccccccccccccccccccccccaaaggcucuuuucagagccaccagaauu

SEQ ID NO: 2996 - RNA, 1813 nt, Artificial Sequence
  mRNA product Design b-4 comprising derived and/or modified sequence from LASV(Togo/2016/7082;Clade VI)__AMR44577__GPC (opt6)
gggagagucccgcagucggcguccagcggcucugcuuguucgugugugugucguugcaggccuuauucaagcuuaccaugggacaaauaauaacauuuuuccaagaaguaccacacgucauugaagaaguaaugaacauaguacuaauagcacuaucauuacuagcaauacuaaaaggaguuuacaacguagcuacaugcggcauuauaggucucguaacauuccuauucuuauguggaagauccugcucacucaucuauaaaggaucauaugaacuacaaacucuagaacucaacauggaaacauuaaacaugacaaugccacucucuugcacuaaaaauucaagccaccacuacauaagaguuggaaacgaaacaggacucgaacuaaccuuaacaaauaccuccauaauaaaccacaaauucuguaauuuaucagacgcacauaaaagaaaucuauacgaccaugcauuaaugucaauacuauccacauuucaccuaucaauccccaacuucaaccaauacgaagcuaugucaugcgacuucaauggcggaaaaauaucaguccaauauaacuuaucccacgcauacgcuguagacgcagcagaacauugcggcacagucgcaaacggaguacuacaaacauucaugagaauggcauggggaggaucauacauagcacuugauucaggcagaggaaacugggauugcauaaugacaucauaccaauacuuaauaauucaaaacacaacaugggaagaucacugccaauuuucgagaccaucacccauaggauaccuaggccuacuaucacaaagaacacgcgacauauacaucucucguagacuacuaggaacauucaccuggacacuaagcgacuccgaaggcaacgaaacacccggaggauauugccuaaccagauggauguuaauagaagcugaacuaaaauguuucggaaacacugcuguagcuaaauguaaugaaaaacacgaugaggaguucugcgacaugcuaagacuauucgacuucaauaaacaagcaauccaaagauuaaaaucagaagcacaaaugucuauacaacuaauaaacaaagccguaaacgcacuaauaaaugaucaacuaaucaugaaaaaucaccucagagauaugauggguauaccauauugcaauuacucaaaauacugguaucuaaaccacacgaguucuggaagaacaucccuaccaaaaugcuggcuaguaagcaauggcagcuaccuaaacgaaacacacuucucagacgacauagaacaacaggcagacaacaugauaacagaaauguuacaaaaagaauacaucgaccgacaaggaaaaacuccacuaggccuaguugaccuauucguauuuucaacaucauuuuacuuaauaucaauauuccuacaucuaauaaaaauaccaacacauagacacauaguaggaaaaccuugccccaagccacacagauuaaaccauaugggaauaugcuccuguggacuauacaaacaaccaggaguaccaacaagauggaaaagauaaggacuaguaauaaggaaacuguaugaaugucugugggcaggaagugaagagauccuucuguaaagguuuuuggaauuaugucugcugaauaauaaacuuuuuugaaauaauaaaucugguagaaaaaugagaucuaaaaaaaaaaaaaaaaaaaaaaaaaaaaaaaaaaaaaaaaaaaaaaaaaaaaaaaaaaaaaaaaugcaucccccccccccccccccccccccccccccccaaaggcucuuuucagagccaccagaauu

SEQ ID NO: 2997 - RNA, 1813 nt, Artificial Sequence
  mRNA product Design b-4 comprising derived and/or modified sequence from LASV(KAK-428;Clade n.d. (VII))__ANH09740__GPC (opt6)
gggagagucccgcagucggcguccagcggcucugcuuguucgugugugugucguugcaggccuuauucaagcuuaccaugggacaaauaguaacauucuuccaagaaguaccacacgucaucgaagaaguaaugaacauaguacuaauagcccucucauuauuagcaauauuaaaaggacuauacaacuucgcaacuuguggaguaauaggccuuauaacauuccuucuacuaugcggcagaucaugcuccgcaacauacaaaggacaauacgaauuacaaacauuagaacuaaauauggaaagcuuaaacaugaccaugccacucucaugcacaaaaaacaacucccaccacuauauacgcgccggaaacaacacaggacuugaauuaacccuaaccaacaccucuaucauaucacacaaauuuugcaaucuaucagacgcucacaaaaaaaaucuuuacgaccacacccuaauguccauaauaacaacauuccacuuaucuauaccaaacuucaaccaauacgaagcaaugucaugugauuucaacggaggaaagauuuccauacaauacaacuuaucucacucuuacgccggagacgccgcacaacacugcggaacaguagcaaacggaguacuucaaacauucaugagaauggcauggggaggauccuaccucgcauuagauucaggaagacgaggaugggacuguauaauauccucauaucaauaccuaaucauacaaaacacaacaugggacgaucauugccaauucucaagaccuucaccaauuggauaccuuggauucguuucacaaaaaacacgagauauuuacaucucacgcagauuauuaggaacauucaccuggacacucagcgacucagaaggccacgauaugccaggcgguuacugccuaacaagauggauguuaauagaagcagaccuaaaaugcuucggaaacacugccguagcaaaauguaacgaaaaacacgacgaagaauucugcgacauguggcgccuauucgacuucaacaaacaagcaauccaaagauuaaaagcugaagcacaaaugaauauacaacuaauaaauaaagccguaaacgcacucauaaacgaccaacuaaugaugaaaaaccaucuaagagacauaaugggaaucccauacugcaacuacuccaaauucugguaucucaauaacacaaccacaggaagaaccucuuuaccaagaugcuggcuaauaucaaacggaagcuacuuaaacgaaacacacuucucagacgacauagaacaacaagcugauaacaugauuacagaaaugcuacaaaaagaauacauggauagacaaggaaaaaccccacuaggacuuguugaccuauuuguauuuucaacaaguuucuaccuaauaacaaucuuccuacaucucguaaaaauaccuacacacagacacauaguaggaaaaccaugccccaaaccacacagacuaaaccacauggguauaugcucauguggacucuacaaacaaccaggcguuccaguccgauggaaacgauaaggacuaguaauaaggaaacuguaugaaugucugugggcaggaagugaagagauccuucuguaaagguuuuuggaauuaugucugcugaauaauaaacuuuuuugaaauaauaaaucugguagaaaaaugagaucuaaaaaaaaaaaaaaaaaaaaaaaaaaaaaaaaaaaaaaaaaaaaaaaaaaaaaaaaaaaaaaaaugcaucccccccccccccccccccccccccccccccaaaggcucuuuucagagccaccagaauu

SEQ ID NO: 2998 - RNA, 1813 nt, Artificial Sequence
  mRNA product Design b-4 comprising derived and/or modified sequence from LASV(Pinneo-NIG-1969;Clade I)__AIT17836__GPC (opt6)
gggagagucccgcagucggcguccagcggcucugcuuguucgugugugugucguugcaggccuuauucaagcuuaccaugggacaaauaaucacauucuuucaagaagucccccacguuauagaagaaguaaugaauauaguacuaauagcacucucauuacucgcaauacuaaaaggacuauauaacauagccacaugcggaauuauaggauuaguagcauuccuuuucuuaugcggaaaauccugcucacuaacacuaaaaggcggauacgaacuacaaacacuagaauuaaacauggaaacacuaaauaugacaaugccccuaucauguaccaaaaacuccucacaccauuacaucagaguaggaaaugaaacaggacuagaauuaaccuuaacaaacacaucuauaauuaaccacaaauuuugcaaccuauccgacgcacacaaaaaaaacuuauaugaucacgcacuaaugucaauuauaucaacuuuccaccuaucaaucccaaauuuuaaucaauacgaagcaaugucaugcgacuucaacggaggaaaaauauccguacaauauaaccucucucacucauacgcaggagacgcagcagaacacuguggaacaguagcaaacgguguucuacaaacauucaugagaauggcauggggaggacgauacauagcauuagacuccggaaaaggaaauugggauugcauuaugacaucauaucaauaucuuaucauacaaaacacaacaugggaagaccacugccaauuuucacgaccaagccccauagguuacuuagguuuacucucccaaagaacaagagauauauacauuucuagaagauuauuaggaacuuucacuuggaccuuaucugacucugaaggaaacgaaacaccaggaggauauugcuuaacuagauggaugcuaauugaagccgaauuaaaaugcuucggaaacacagcagucgccaaaugcaacgaaaaacaugacgaagaauuuugugacaugcuaagacuuuucgacuucaacaaacaagcuauaagaagauuaaaagcagaagcacaaaugucaauacaauuaauaaacaaagcuguaaacgcauuaauaaacgaccaauuaauaaugaaaaaccaccuaagagacauuaugggaauacccuacuguaauuacucaaaauacugguacuuaaaccauaccucauccgggcgaaccucucuacccaaaugcuggcucauaagcaacggauccuacuuaaacgaaacacaauuuucagacgacauagaacaacaagcagauaauaugauaacagaaaugcuacaaaaagaauauauagaaagacaaggaaaaaccccacuaggauuaguugacauauuuauauucucaaccucauuuuaccucauaucaauauuuuuacaucuaauaaaaauaccaacucacagacauauaguaggaaaaccaugcccaaaaccacauagauuaaaccacaugggaguauguuccugcggacuauacaaacauccaggaguacccacaaaauggaaacgauaaggacuaguaauaaggaaacuguaugaaugucugugggcaggaagugaagagauccuucuguaaagguuuuuggaauuaugucugcugaauaauaaacuuuuuugaaauaauaaaucugguagaaaaaugagaucuaaaaaaaaaaaaaaaaaaaaaaaaaaaaaaaaaaaaaaaaaaaaaaaaaaaaaaaaaaaaaaaaugcaucccccccccccccccccccccccccccccccaaaggcucuuuucagagccaccagaauu

SEQ ID NO: 2999 - RNA, 1813 nt, Artificial Sequence
  mRNA product Design b-4 comprising derived and/or modified sequence from LASV(ISTH0009-NIG-2011;Clade II)__AIT17404__GPC (opt6)
gggagagucccgcagucggcguccagcggcucugcuuguucgugugugugucguugcaggccuuauucaagcuuaccaugggacaaaucauaacauucuuucaagaagucccacacguaauagaagaaguaaugaauaucguauuaauagcacuauccuuacuagcaauauuaaaaggaauauacaauguagccacauguggacuauucgguuuaguaucauucuuacuucuaugcggaagaucuugcucaaccacuuacaaaggaguauacgaacuucaaacacucgaacuagauauggcaagucuaaacaugaccaugccacuaucaugcacaaaaaacaauucccaccauuacauaauggucggaaaugaaacaggauuagaauuaacauuaacaaacacaucuauuauaaaccacaaauucugcaaucuaucagacgcucacaaaaaaaaccuauacgaccacgcacucauguccauaauauccacuuuucaccuaucaauaccaaacuucaaccaauacgaagcaaugucaugugacuucaauggaggaaaaauaucaguacaauacaaccuaucccaugcauaugcaguagacgcagccaaucacuguggaacuauagcaaacgguguucuacaaacauuuaugcgaauggccugggguggauccuacauagcacuagacucuggaaaaggaucaugggauugcauaaugacuucauaccaauaccuaauaauacaaaacacaacaugggaagaccacugucaauucucaagacccucuccaauaggauaccuagguuuacuaucucaaagaacaagagauauauacaucagcagacgacuacuuggaacauucacauggacccuauccgacucagaaggaaaugaaacaccuggcggcuacugccuuaccagauggauguuaauagaagcugaauuaaaaugcuucggaaacacagccguagcaaaaugcaacgaaaaacaugacgaagaauuuugugacaugcuuagauuauucgacuuuaacaaacaagcuauacgcagauuaaaaacagaagcacaaaugaguauacaacuaauaaauaaagcaguaaacgcauuaauaaacgaccaacuaaucaugaaaaaccacuuaagagacauaaugggaauaccauacugcaacuacucaaaauacugguacuuaaaccacacugucacuggaaaaaccucauuaccacgcugcuggcuaguaucaaacggaaguuauuuaaaugaaacacauuucucagaugacauagaacaacaagcagacaauaugauaaccgaacucuuacaaaaagaauacauggacagacaaggaaaaacaccauuaggacuaguagaccucuucguuuucucaacaucauucuacuuaauaagcauuuuccuacacuuaauaaaaauaccaacacaccgccacauaaccggaaaaccaugcccaaaaccacacagauuaaaccauaugggaaucugcaguuguggucuauauaaacauccaggagucccaguaaaauggaaaagauaaggacuaguaauaaggaaacuguaugaaugucugugggcaggaagugaagagauccuucuguaaagguuuuuggaauuaugucugcugaauaauaaacuuuuuugaaauaauaaaucugguagaaaaaugagaucuaaaaaaaaaaaaaaaaaaaaaaaaaaaaaaaaaaaaaaaaaaaaaaaaaaaaaaaaaaaaaaaaugcaucccccccccccccccccccccccccccccccaaaggcucuuuucagagccaccagaauu

SEQ ID NO: 3000 - RNA, 1813 nt, Artificial Sequence
  mRNA product Design b-4 comprising derived and/or modified sequence from LASV(ISTH2010-NIG-2012;Clade II)__AIT17482__GPC (opt6)
gggagagucccgcagucggcguccagcggcucugcuuguucgugugugugucguugcaggccuuauucaagcuuaccaugggacaaaucauaacuuucuuucaagaaguaccccacguaauagaagaaguaaugaacauaguauuaauagcacuaucucuacucgccauacucaaaggcaucuauaauguagcaacaugcggcuuauuuggauuaguaucuuuucucuuauuauguggacgauccugcucaacaacauauaaagguguauacgaauuacaaacacuagaacuagacauggccucacuaaacaugacaaugccacuaucaugcaccaaaaauaacucacaccauuauauuaugguaggcaacgaaacaggacucgaacuaacccuaacaaacacaucaauaauaaaccacaaauucugcaauuuaucugacgcacacaaaaaaaaucucuaugaccaugcccuaaugucaauaauaucaacuuuccaccuaucaaucccaaacuucaaccaauaugaagcaaugucaugcgacuuuaacggaggcaaaaucuccguacaauacaaucucucccacgcauacgcaguagacgccgcaaaccauuguggcacaauagcaaauggugucuuacaaacauucaugcguauggcauggggaggaucauacauagcucuagacagcggaaaaggcucaugggauuguauaaugacuucauaucaauacuuaauaauacaaaacauaaccugggaagaccacugucaauuuucacgacccucacccauagguuacuuaggacuacuaagccaaagaaccagagauauauacauaucuagaagauuacuaggaacauucacauggacacuaucagacuccgaaggcaacgaaacaccaggaggauacuguuuaacuagauggaugcuaauagaagcagaacuaaaaugcuucggaaauacagcaguagccaaauguaaugaaaaacaugaugaagaauucugcgauaugcuacgucuauucgacuucaacaaacaagcaauucgaagauuaaaaacagaagcacaaaugucaauacaacuaauuaacaaagcaguaaacgcauuaauaaacgaucaauuaauuaugaaaaaccacuuaagagacauaaugggaaucccauauugcaacuacucaaaauacugguauuuaaaucauacaguuacaggcaaaacaucccuaccaagaugcuggcuagucucaaacggaucuuaccugaaugaaacacacuuuucagacgacauagaacaacaagcagauaacaugauaacagaacuauuacaaaaagaauacauagacagacaaggaaaaacuccacuaggacuuguagaccuauucguauucaguacaucauucuaccucauaagcauauucuuacaccuaguaaaaauaccaacacauagacauguagucggaaaaccuugcccaaaaccacacagguuaaaccauauggguauaugcucuugcggacuauauaaacacccaggaguaccugucaaauggaaacgauaaggacuaguaauaaggaaacuguaugaaugucugugggcaggaagugaagagauccuucuguaaagguuuuuggaauuaugucugcugaauaauaaacuuuuuugaaauaauaaaucugguagaaaaaugagaucuaaaaaaaaaaaaaaaaaaaaaaaaaaaaaaaaaaaaaaaaaaaaaaaaaaaaaaaaaaaaaaaaugcaucccccccccccccccccccccccccccccccaaaggcucuuuucagagccaccagaauu

SEQ ID NO: 3001 - RNA, 1813 nt, Artificial Sequence
  mRNA product Design b-4 comprising derived and/or modified sequence from LASV(Lassa virus/H.sapiens-wt/NGA/2015/ISTH_0543;Clade II)__AVO03639__GPC (opt6)
gggagagucccgcagucggcguccagcggcucugcuuguucgugugugugucguugcaggccuuauucaagcuuaccaugggccaaauaauaaccuucuuucaagaagucccacacguuauagaagaaguaaugaacauaguacuaauagcauuaucacuacuagcaauccuaaaaggaauauacaacguagcaacuugcggccuauucggacuaguaucauuccuccuacuaugcggacguuccugcuccacaacauacaaaggcguauacgaacuacaaacauuagaacuagacauggcaaacuuaaacaugaccaugccauuauccugcacaaaaaacaacucucaccauuauauaaugguuggaaacgaaacaggacucgaauuaacuuuaaccaacacaucaauaauuaaucauaaauucugcaacuuauccgacgcacacaaaaaaaaccuauacgaucacgcacuaaugagcauaauaucuacuuuccaucuaucaauaccaaauuucaaucaauacgaagcaaugucaugugauuucaauggcggaaaaauauccguacaauauaauuuaucccauacauacgcaguagaugcagcaaaccauugcggaacaauugcaaacggaguccuacaaacauuuaugcgaauggcauggggcggaagcuacauagcacucgauucaggaaaagguuccugggauuguauaaugacuucuuaucaauacuuagucauccaaaacacuacaugggaagaucacugccaauuuucuagaccauccccaauuggauaucugggacuacuuucccaaagaacaagagacauauacaucuccagaagacuauuaggaacauucacauggaccuuaucagacucagaaggaaacgaaacaccaggugguuacugccuaaccagauggaugcuaauagaagcagaacuaaaaugcuuuggaaacaccgcagucgcaaaauguaacgaaaaacacgacgaagaauucugcgauaugcuaagacuauuugacuucaauaaacaagccauaagaagauuaaaaacugaagcacaaaugucaauacaacuaauaaacaaagcaguaaacgcacucauaaacgaccaauuaauaaugaaaaaccacuuacgagacauaaugggcaucccauacugcaacuauucaaaauacugguaccucaaucauacaguaacaggaaaaacaucacuaccaagaugcuggcucguauccaacggaucauacuuaaacgaaacacacuuuucagacgacaucgaacaacaagcagacaauaugauaacagaacuacuccaaaaagaauauauagauagacaaggaaaaaccccacuaggacuagucgaccuauucgucuucagcacaagcuucuaccuaauauccauuuuccuucaucucguaaaaauacccacucacagacacauaacuggaaaaccaugcccaaaaccacacagauuaaaccacaugggaauaugcucauguggacuauacaaacacccagguguuccaguaaaauggaaaagauaaggacuaguaauaaggaaacuguaugaaugucugugggcaggaagugaagagauccuucuguaaagguuuuuggaauuaugucugcugaauaauaaacuuuuuugaaauaauaaaucugguagaaaaaugagaucuaaaaaaaaaaaaaaaaaaaaaaaaaaaaaaaaaaaaaaaaaaaaaaaaaaaaaaaaaaaaaaaaugcaucccccccccccccccccccccccccccccccaaaggcucuuuucagagccaccagaauu

SEQ ID NO: 3002 - RNA, 1813 nt, Artificial Sequence
  mRNA product Design b-4 comprising derived and/or modified sequence from LASV(Lassa virus/H.sapiens-wt/NGA/2016/ISTH_0009;Clade II)__AVO03571__GPC (opt6)
gggagagucccgcagucggcguccagcggcucugcuuguucgugugugugucguugcaggccuuauucaagcuuaccaugggccaaauaauaacauucuuccaagaaguaccacacguaauagaagaaguaaugaacauuguauuaauagcacuaucacuacuagcaaucuuaaaaggaauauacaacguagccacaugcggacuacuaggacuagucucauuccuauuacuaugcggaagaucuugcucaacaacauacaaaggcguauacgaacuacaaacauuagaacuagauauggcaucucuaaacaugacaaugccauuaagcugcacaaaaaauaauucacaccauuacauaaugguaggcaacgaaacaggcuuagaacucacauuaacaaauaccucaaucauaaaucauaaauucugcaaucuaucagacgcacauaaaaaaaaccuuuaugaccacgcacuaaugucaauaauaucaacauuccacuuaucuauaccaaauuuuaaucaauaugaagcaaugucuugcgauuuuaacggaggaagaauaucaguccaauacaaucucucacacuccuacgcaguagacgcagcaaaccauugugggacaauagcaaacggaguacuacaaacauuuaugcgaauggcauggggugguaguuacauagcacuagacucaggaaaaggcucaugggacugcauaaugacaucauaccaauaccucauaauacaaaacaccaccugggaggaccacugccaauucucacgaccaucaccaauaggauauuuaggucuucucagucaaagaacaagagacauauauauaucuagaagacuacuaggaaccuucacauggacacuaucagacucagaagggaaugaaacaccaggaggauacugcuuaacaagauggauguuaauagaagcagaacuaaaaugcuucgguaacacagcaguagcaaaaugcaacgaaaaacacgacgaagaauucugcgacaugcuuagacuguucgauuucaauaaacaagcaauaaggagauuaaaaacagaagcacaaaugucaauacaauuaauaaacaaagcaguaaaugcauuaauaaacgaccaacucauaaugaaaaaucacuuaagagauauaaugggaauaccauacuguaacuacucaaaauacugguaucuaaaccauaccguaacaggcaaaaccucauuaccaagaugcugguuaguaucaaacggcuccuacuuaaacgaaacccacuucucagacgauauagaacaacaagcagacaacaugauaacagaacuacuccaaaaagaauacauagaucgacaaggaaaaacaccacuaggucuaguagaccuauucguauucucaacaagcuucuaccuaauaucaaucuuucuacaccuaguaaaaauaccaacacacagacacauaacagguaaaccaugcccaaaaccccauagacuaaaccacaugggcauauguucauguggcuuauacaaccacccaggaguaccaguaaaauggaaacgauaaggacuaguaauaaggaaacuguaugaaugucugugggcaggaagugaagagauccuucuguaaagguuuuuggaauuaugucugcugaauaauaaacuuuuuugaaauaauaaaucugguagaaaaaugagaucuaaaaaaaaaaaaaaaaaaaaaaaaaaaaaaaaaaaaaaaaaaaaaaaaaaaaaaaaaaaaaaaaugcaucccccccccccccccccccccccccccccccaaaggcucuuuucagagccaccagaauu

SEQ ID NO: 3003 - RNA, 1813 nt, Artificial Sequence
  mRNA product Design b-4 comprising derived and/or modified sequence from LASV(Lassa virus/H.sapiens-wt/NGA/2016/ISTH_0017;Clade II)__AVO03567__GPC (opt6)
gggagagucccgcagucggcguccagcggcucugcuuguucgugugugugucguugcaggccuuauucaagcuuaccaugggacaaauaauaaccuucuuucaagaaguaccacacgucauagaagaaguaaugaacauagucuuaauugcacucucacuacuugcaauauuaaaaggaaucuacaaugucgcaacaugcggacuauuugggcuaguaaguuuucuauuauuaugcggccgauccugcuccacaacauacaaaggaguauacgaacuacaaacacuagaauuagauauggcauccuuaaacaugacaaugcccuuauccugcacuaaaaauaacucacaccacuacauaaugguaggcaaugaaacaggcuuagaauuaacacuaaccaauacaaguauaauaaaucacaaauucugcaaucuaucagaugcacacaaaaaaaaccuuuaugaccaugcauuaaugagcauuauauccaccuuccaccuuucaauaccuaacuucaaccaauacgaagcaaugucgugcgacuucaauggcggaaaaaucucaguacaauauaaccucucacacacauacgcaauagacgccgcaaaccacugcgggacuauagcaaacggaguacuacaaacauuuaugagaauggcauggggaggcucauacauagcacuagacucaggaaaaggaucaugggauugcauaaugacaucauaccaauaccuaaucauacaaaacaccacaugggaagaucauugccaauuuucaagacccucaccaauaggauaccuaggacuauuaucacaaagaacacgugacaucuacauaucaagacgacuacucggaacauucacauggacuuuaucagauuccgaagguaacgaaacccccggagguuacugccuaacaagauggaugcuaauagaagcagaauuaaaaugcuucggaaacacagcaguagcaaaauguaacgaaaaacacgaugaagaauucugugacaugcuaagacuauuugacuucaacaaacaagcaaucagaagacuaaaaacagaagcacaaaugucaauacaacuaauaaauaaagcaguaaacgcucuaauaaaugaccaacuaauaaugaaaaaccaccucagagacaucaugggaauaccauauugcaauuauuccaaauacugguaccuaaaccauaccguuacaggcaaaacaucauuaccaagauguuggcuaguaucaaauggcucauaucuaaacgaaacccacuucucagacgacauagaacaacaagcugacaacaugauaacugaacuauuacaaaaagaauacauggaccgccaaggcaaaacaccucuaggccuaguagaucucuucguauuuucaaccaguuuuuaccuaauaucaauauuccuacaccuaguaagaauaccaacucacagacacguaauaggaaaaccaugcccaaaaccacauagacuuaaccauauggguauaugcucauguggauuauacaaacaccccggcguaccaguaaaauggaaaagauaaggacuaguaauaaggaaacuguaugaaugucugugggcaggaagugaagagauccuucuguaaagguuuuuggaauuaugucugcugaauaauaaacuuuuuugaaauaauaaaucugguagaaaaaugagaucuaaaaaaaaaaaaaaaaaaaaaaaaaaaaaaaaaaaaaaaaaaaaaaaaaaaaaaaaaaaaaaaaugcaucccccccccccccccccccccccccccccccaaaggcucuuuucagagccaccagaauu

SEQ ID NO: 3004 - RNA, 1813 nt, Artificial Sequence
  mRNA product Design b-4 comprising derived and/or modified sequence from LASV(Lassa virus/H.sapiens-wt/NGA/2018/ISTH_0959;Clade II)__AVV65099__GPC (opt6)
gggagagucccgcagucggcguccagcggcucugcuuguucgugugugugucguugcaggccuuauucaagcuuaccaugggccaaauuauaacauucuuccaagaaguaccacauguaauagaagaaguaaugaacaucguauuaauugcacucucauuauuagcuauacucaaagguaucuacaacgucgucacaugcggacuauucggccuaguuucauucuuacuccuuuguggaagaucaugcagcacaacauacaaaggaguauacgaacuacaaaccuuagaacuagauauggcaucacuaaacaugacaaugcccuuauccugcacaaaaaauaacucacaccauuacauaauggucggaaacgaaacaggauuagaauuaacauuaacaaacacauccauaauaaaucauaaauucuguaaccucucagacgcacauaaaaaaaaucuauaugaucacgcauuaaugucaaucaucucaacauuccaccuuucaauaccaaauuucaaccaauacgaagcaaugucaugcgacuucaacgguggaaaaauaucuguacaauacaauuuaucacacgccuaugcaauagaugcagcaaaucacugcggaacaaucgccaacggaguauuacaaacauucaugagaauggcauggggaggaucauacauugcacuagacucaggcaaaggaucuugggacuguaucaugacaucauaucaauacuuaauaauacaaaacacaacaugggaagaccacugccaauucucacgaccaucacccauaggauacuuaggacuacuaucacaacgaacacgagacauauacauaucaagacgacuauuaggaacauuuacuuggacacuauccgacucagaaggaaacgaaaccccugguggauauugucuaaccagauggaugcucauagaagcagaacuaaaaugcuuuggaaacaccgcaguagccaaaugcaacgaaaaacacgacgaagaauucugcgacauguuacgacuauucgauuuuaacaaacaagcaauacgaagacuaaaaacagaagcacaaaugucaauacaacuaauaaacaaagcaguaaacgcacuaauaaacgaccaacuaauaaugaaaaaccacuuacgagacauaaugggaauacccuacugcaacuacucaaaauacugguauuuaaaccacacaguaaccggaaaaacaucacuaccccgauguugguuaguauccaacggaucauaucucaacgaaacacacuucucagaugacauagaacaacaagcagacaacaugauaacagaacuccuucaaaaagaauacauagauagacaaggaaaaacaccucuaggacuaguagacuuauucguauucuccacuucauucuaucuaauaaguauuuucuuacaucuuguuaaaauaccaacacacagacacguuauaggaaaacccuguccaaaaccacacagacuaaaccauaugggcaucuguucaugcggacuauacaaacacccaggaguacccguuaaauggaaaagauaaggacuaguaauaaggaaacuguaugaaugucugugggcaggaagugaagagauccuucuguaaagguuuuuggaauuaugucugcugaauaauaaacuuuuuugaaauaauaaaucugguagaaaaaugagaucuaaaaaaaaaaaaaaaaaaaaaaaaaaaaaaaaaaaaaaaaaaaaaaaaaaaaaaaaaaaaaaaaugcaucccccccccccccccccccccccccccccccaaaggcucuuuucagagccaccagaauu

SEQ ID NO: 3005 - RNA, 1813 nt, Artificial Sequence
  mRNA product Design b-4 comprising derived and/or modified sequence from LASV(LASV003-NIG-2008;Clade II)__AIT17580__GPC (opt6)
gggagagucccgcagucggcguccagcggcucugcuuguucgugugugugucguugcaggccuuauucaagcuuaccaugggacaaauaauaacauucuuccaagaaguaccacauguaauagaagaagucaugaacauaguacuaauagcuuuaucauuacuagcaauacuaaaaggcauauacaacguugcaacaugcggauuauucggauuaguuuccuucuuacuacuauguggaagaucauguucaacaacauauaaaggagucuacgaacuccaaacacuagaauuagacauggcaagucuaaauaugacaaugccauuaucaugcaccaaaaacaacucacaccacuacauuauggucggaaacgaaacaggacucgaacucacacuaacaaacaccucuauaaucaaucacaaauucugcaaccuaucggaugcccacaagaaaaaucuauacgaucacgccuuaauguccauuauaucaacauuccaucucucaauaccaaacuucaaucaauacgaagcaaugucaugugauuucaacgguggcaaaauaucaguacaauacaauuuaucccauacauacgccguagacgcagcaaaccauugcggaacgauagccaacggcguauuacaaaccuucaugagaauggcuuggggaggaucauauauagccuuagacucaggaaaaggauccugggacugcauaaugacaucauaccaauauuuaauaauacaaaacacaaccugggaagaccauugccaauucaguagaccaucacccauaggcuacuuaggauuauuaucacaaagaacucgagacauauacauaaguagaagacuacuaggaacauucacauggacacuaucagauagugaaucaaaugaaacaccaggaggauauugccuaacaagauggauguuaauagaagcagaacuaaaaugcuuuggaaauacagcaguagccaaauguaaugaaaaacaugaugaagaauuuugugauaugcuaagacuuuucgacuucaacaaacaagcuauucgaagauuaaaagcagaagcacaaauguccauacaauuaauaaacaaagcaguuaacgcuuuaauaaacgaccaacuuauaaugaaaaaccaccuaagagacauaaugggaauaccauacuguaacuacuccaaauacugguaccuaaaccacacagucacaggaagaaccaguuuaccacgaugcuggcuaguaucaaacgguagcuaucuaaaugaaacucacuucucagacgacaucgaacaacaagcagacaacaugauaacagaauuauuacaaaaagaauacauggauagacaaggaaaaacaccacuaggauuaguugaccuauucgucuuuuccacaaguuucuaucuaauauccauauuucuacaccucguaaaaauuccuacacacagacauguaauaggcaaacccugcccaaaaccccauagauuaaaccacaugggaauaugcuccugcggauuauacaaacacccaggaguaccuguaaaauggaaaagauaaggacuaguaauaaggaaacuguaugaaugucugugggcaggaagugaagagauccuucuguaaagguuuuuggaauuaugucugcugaauaauaaacuuuuuugaaauaauaaaucugguagaaaaaugagaucuaaaaaaaaaaaaaaaaaaaaaaaaaaaaaaaaaaaaaaaaaaaaaaaaaaaaaaaaaaaaaaaaugcaucccccccccccccccccccccccccccccccaaaggcucuuuucagagccaccagaauu

SEQ ID NO: 3006 - RNA, 1813 nt, Artificial Sequence
  mRNA product Design b-4 comprising derived and/or modified sequence from LASV(LASV035-NIG-2009;Clade II)__AIT17588__GPC (opt6)
gggagagucccgcagucggcguccagcggcucugcuuguucgugugugugucguugcaggccuuauucaagcuuaccaugggucaaauaauaaccuuuuuucaagaaguaccacacguaauagaagaaguaaugaacauaguacuaauagcacucucccuauuagcaauacucaaaggcauuuacaacguagcaacuuguggacuauuuggauuaguaucuuuucuacuauuauguggaagauccugcucaacaaccuauaaagguguauacgaacuacaaaccuuagaauuagauauggcaucacuaaacaugacaaugcccuuaucaugcacaaaaaacaacucgcaccauuauauaaugguaggaaaugaaacgggauuagaacuaacccuaacaaauacaucaauaauaaaccacaaauuuuguaacuuaucugacgcacacaaaaaaaaucucuaugaccaugcacuaaugucaauaaucucaaccuuucacuuauccauaccaaauuucaaucaauacgaagcaaugucaugcgacuucaacggcggaaaaauauccguucaauacaauuuaucacacgcauacgccguagacgcagcuaaccacugcggcacaauagcaaauggaguacuacaaacauucaugagaauggcauggggaggcuccuacauagcacuagauucagguaaaggaucaugggacugcauuaugacaucauaccaauacuuaauaauacaaaauacaacaugggaagaucacugccaauucucaagaccauccccaauaggcuaucucggacuacuaagucaaagaacaagagacauauacauaucacgcagacuauuaggaaccuucacauggacuuuaagugacagcgaaggaaacgaaacaccaggagguuacugucuaaccagauggauguuaauagaagcagaauuaaaaugcuuuggaaacacagcaguagcaaaaugcaacgaaaaacaugacgaagaauucugugacaugcuacgacuauuugacuuuaacaaacaagcaauaagaagacuaaaagcagaagcacaaaugucaauacaacuaaucaacaaagcaguuaaugcucugauaaacgaccaacucaucaugaaaaaccaccuacgagacauaaugggaauacccuacugcaacuacucaaaauacugguaccuuaaucacacgguuacaggcaaaacuucacuaccaagaugcugguuaguauccaacggaucauaucuaaacgaaacacauuuuuccgacgacauagaacaacaagcagacaauaugauaacagaacuauuacaaaaagaauacauagauagacaagguaaaacaccacuaggacuaguagauuuauucguauucaguacauccuuuuacuuaauaucaauuuuccuccaucuaguaaaaaucccaacacaccgacacguaauaggaaaaccaugcccaaaaccccacaggcuaaaccacaugggaauaugcaguugcggauuauacaaacauccugguguaccuguaaaauggaaaagauaaggacuaguaauaaggaaacuguaugaaugucugugggcaggaagugaagagauccuucuguaaagguuuuuggaauuaugucugcugaauaauaaacuuuuuugaaauaauaaaucugguagaaaaaugagaucuaaaaaaaaaaaaaaaaaaaaaaaaaaaaaaaaaaaaaaaaaaaaaaaaaaaaaaaaaaaaaaaaugcaucccccccccccccccccccccccccccccccaaaggcucuuuucagagccaccagaauu

SEQ ID NO: 3007 - RNA, 1813 nt, Artificial Sequence
  mRNA product Design b-4 comprising derived and/or modified sequence from LASV(LASV1000-NIG-2009;Clade II)__AIT17782__GPC (opt6)
gggagagucccgcagucggcguccagcggcucugcuuguucgugugugugucguugcaggccuuauucaagcuuaccaugggacaaauaauaacauucuuccaagaaguaccucacguaaucgaagaagucaugaauauuguccuaauagcacucucauuacuugcaauacuaaaaggaauauauaacguugcaacaugcggucuauucggcuuaguaucuuuuuuacuacuauguggcagaucuugcuccacaacguacaaaggaguauaugaacuacaaacauuagaauuagacauggcaucacuaaauaugacaaugccauuaucaugcacuaaaaacaacucacaccacuacauuauggucggcaacgaaacaggauuagaacuaacccuaacaaacacaucaauaauaaaccauaaauucuguaaucuaucagaugcacacaaaaaaaacuuauacgaccacgcuuuaaugucaauuauaucuacauuccauuuaucaauacccaauuuuaaccaauacgaagcaaugucaugcgacuucaacggaggaaaaaucucaguacaauauaauuuaucccacaccuacgcaguagaugccgcaaaccauugcggcacaauagcaaauggaguccuacaaacauuuaugcgaauggcaugggguggcucauacauagcccuugacucaggaaaaggaucaugggauugcauaaugacauccuaccaauauuuaauaauacaaaacacaacuugggaagaucacugccaauuuucaagacccaguccaaucggauacuuaggacuauuaucacaaagaacacgagauauauacaucagcagaagauuauuaggaacauucacauggacacuaucagauucagaaggcaaugaaaccccaggaggcuacugccuaacaagauggaugcucaucgaagcagaauuaaaaugcuuuggaaauacagcaguagcaaaauguaacgaaaaacacgacgaagaauucugcgacaugcuacgauuauuugacuucaacaaacaagccauaaaaagacuaaaaacagaagcacaaaugucaauacaauuaauaaacaaagccguaaacgcacuaaucaacgaucaauuaaucaugaaaaaucaccuuagagacauaaugggaaucccauauugcaacuacucaaaauacugguacuuaaaucacaccguaacuggaaaaacaucauuaccaagaugcuggcuaguaucaaauggcucauaccucaaugaaacccacuucucagacgacaucgaacaacaagcugacaacaugauaacugaacuauuacaaaaagaauacauugaccgacaaggaaaaacaccauuaggauuaguagaccucuuuguauuuucaacaucauucuaccuaaucucaauauucuuacauuuaguaaaaauuccaacacacagacacguaguaggaaaaccaugcccuaaaccccacagauuaaaccacaugggaauauguagcugcgguuuauacaaacacccaggaguaccaguuaaauggaaaagauaaggacuaguaauaaggaaacuguaugaaugucugugggcaggaagugaagagauccuucuguaaagguuuuuggaauuaugucugcugaauaauaaacuuuuuugaaauaauaaaucugguagaaaaaugagaucuaaaaaaaaaaaaaaaaaaaaaaaaaaaaaaaaaaaaaaaaaaaaaaaaaaaaaaaaaaaaaaaaugcaucccccccccccccccccccccccccccccccaaaggcucuuuucagagccaccagaauu

SEQ ID NO: 3008 - RNA, 1813 nt, Artificial Sequence
  mRNA product Design b-4 comprising derived and/or modified sequence from LASV(LASV221-NIG-2010;Clade II)__AIT17624__GPC (opt6)
gggagagucccgcagucggcguccagcggcucugcuuguucgugugugugucguugcaggccuuauucaagcuuaccaugggacaaaucauaaccuuuuuccaagaaguaccacacguaauugaagaaguaaugaauauaguacucaucgcccuaucacuacuagcaauacuaaaaggaauauacaacgucgcaacaugcggauuauuuggacuaguaucuuuucuauuacuaugcggcagaucaugcucaacaacauacaaaggcgucuacgaauuacaaacacuagaacuagauauggcaucucucaacaugacaaugccacuaucaugcacaaaaaauaacucccaccacuacauaaugguaggaaacgaaacuggacuagaacuaacucuaacaaacacuucaauuauaaaccacaaauucugcaaccuaucagacgcacacaaaaaaaaccuauaugaccaugcccuuauguccauaauaucaacauuccaccuaucaauaccuaacuuuaaccaauacgaagcaaugucuugcgacuucaauggagguaaaauaucaguacaauauaaccuaucacacacuuaugcaauagaugccgcaaaccacugcggaacuauagcaaacgguguauuacaaacauucaugagaauggcauggggcggaucauauaucgcacuagauucaggaaaaggcucuugggacuguaucaugacaucuuaccaauaccuaauaauacaaaacaccacaugggaagaccacugucaauucucacgacccucacccauaggauaccuuggacuacuaagccaaagaacacgcgauauauacauaucaagacgucuacugggaacauuuacauggacacuaagugauucagaaggaaacgaaacaccaggcggauacugcuuaacuagguggaugcuaauagaagcagaacuaaaauguuuuggcaauacagcaguagcaaaaugcaacgaaaaacacgacgaagaauuuugcgacaugcuaagauuauucgacuucaauaaacaagcaauacgaagauuaaaaacagaagcacaaaugucuauucaacuaaucaauaaagcaguaaaugcacuaauaaacgaccaacucauaaugaaaaaccauuuaagagacauaaugggaauaccauacugcaacuauuccaaauacugguacuuaaaccacacaguaaccggaaaaacaucacucccaagauguugguuaguaucaaacggauccuaccuuaaugaaacacauuuuucagacgauauagaacaacaagcagauaacaugauaacagaaaugcuccaaaaagaauacauggauagacaaggaaaaacaccacucggacuagucgaucuuuucguauucucuacaucauucuacuuaauaucaaucuucuuacaucuugucaaaaucccuacucaccgacacguuaucggaaaacccugcccaaaaccacaucgauuaaaccacaugggaauaugcuccugcggacuauacaaacacccaggaguaccagucaaauggaaaagauaaggacuaguaauaaggaaacuguaugaaugucugugggcaggaagugaagagauccuucuguaaagguuuuuggaauuaugucugcugaauaauaaacuuuuuugaaauaauaaaucugguagaaaaaugagaucuaaaaaaaaaaaaaaaaaaaaaaaaaaaaaaaaaaaaaaaaaaaaaaaaaaaaaaaaaaaaaaaaugcaucccccccccccccccccccccccccccccccaaaggcucuuuucagagccaccagaauu

SEQ ID NO: 3009 - RNA, 1813 nt, Artificial Sequence
  mRNA product Design b-4 comprising derived and/or modified sequence from LASV(LASV237-NIG-2010;Clade II)__AIT17638__GPC (opt6)
gggagagucccgcagucggcguccagcggcucugcuuguucgugugugugucguugcaggccuuauucaagcuuaccaugggucaaaucauaaccuucuuucaagaaguuccacaugucaucgaagaaguaaugaacauaguacuaauagcauuauccuuacuagcaauauuaaaaggaaucuacaacguagcaacuugcggcuuauucggacuagucuccuucuuacugcuauguggcagaucauguucaacaacuuacaaaggagucuacgaacuacaaacauuagaacuagacauggcaaguuuaaacaugacaaugccacuaucuugcaccaaaaauaauucccaucacuacauaauggucggcaacgaaacaggacuagaacucacacuaacaaauacaucaauaauuaaccacaaauuuugcaaccucucagaugcacacaaaaaagaccuauacgaccacgcacuaauguccauaauaucaacauuucauuuaucuauaccaaacuucaaccaauacgaagcaaugucuugcgauuucaauggaggaaaaauaucaguacaauacaaccuaucccacacauaugccguagacgcagcuaaccauugcggaacaauagcaaauggaguacuacaaacauucaugagaauggcauggggaggaucauacaucgcacucgacuccggaaaaggaucuugggacugcaucaugaccucuuaccaauaccuaauaauucaaaauacaaccugggaagaccauugccaauucucaagacccucaccaauaggauaucuaggacuacuaucacaaagaaccagagacauauacauaucccgacgacuacuaggaacauucacauggacauuaucagauucagaaggaaacgaaacaccaggaggcuauugcuuaaccagauggaugcuaauagaagcagaacucaaaugcuucggaaacacagcaguugcaaaaugcaacgaaaaacacgacgaagaauuuugugacauguuaagauuauuugacuucaacaaacaagcaauacgaagauuaaaaacagaagcacaaaugucaauacaacuaaucaacaaagcaguaaacgcacuaauaaacgaccaauuaauaaugaaaaaccauuuacgagauaucaugggcauaccuuacugcaauuacucaaaauacugguaccuaaaccacacaguaacaggaaaaaccucccuaccaagauguugguuaguaucaaacggcuccuauuuaaaugaaacacacuucucagaugacauugaacaacaagcagacaacaugauaacagaacuacuucaaaaagaauacauggacagacaagguaaaacaccacucggucuaguagacuuauucguauuuagcaccucguucuaccucauaucaauauuccuacaccuuauaaaaaucccaacacacagacauauaacaggaaaaccuugcccaaaaccacacagauuaaaccauauggguaucugcucauguggacuauacaaacacccaggcguuccaguaaaauggaaacguuaaggacuaguaauaaggaaacuguaugaaugucugugggcaggaagugaagagauccuucuguaaagguuuuuggaauuaugucugcugaauaauaaacuuuuuugaaauaauaaaucugguagaaaaaugagaucuaaaaaaaaaaaaaaaaaaaaaaaaaaaaaaaaaaaaaaaaaaaaaaaaaaaaaaaaaaaaaaaaugcaucccccccccccccccccccccccccccccccaaaggcucuuuucagagccaccagaauu

SEQ ID NO: 3010 - RNA, 1813 nt, Artificial Sequence
  mRNA product Design b-4 comprising derived and/or modified sequence from LASV(LASV253-NIG-2011;Clade II)__AIT17670__GPC (opt6)
gggagagucccgcagucggcguccagcggcucugcuuguucgugugugugucguugcaggccuuauucaagcuuaccaugggacaaauaauaacuuucuuucaagaaguaccccauguaauagaagaaguaaugaacauaguacuaaucgcccuauccuuacuagcaauacuaaaaggaauauacaacguagcaacaugcggauuauucggccuuguaucauuucuacucuuaugcggcagauccuguucaacaacauacaaaggaguauacgaacuacaaacacuagaacuagacauggcaucacuaaauaugacaaugccauuaagcugcacaaaaaacaacucucaccacuacauaaugguaggaaaugaaacaggacucgaacucacacuaacaaauaccucuaucauaaaccacaaauucugcaaucuaucagaugcccacaaaaaaaaccuauaugaucaugcauuaauguccauaauaucaacauuccaucuaucaauucccaacuuuaaccaauacgaagcaaugucaugcgacuuuaacggcggaaaaauaucuguacaauauaaucuaucccacacuuaugcagucgaugccgcaaaucacugcgguaccauagcaaauggaguacuccaaacauucaugcgcauggcuuggggcggaucauacaucgcacuagauuccggaaaaggaucaugggacugcauaaugacaucuuaccaauaucuuaucauacaaaauacuaccugggaagaucacugccaauuuucaagaccgucaccaauaggauaucucggauuacuaucacaacgaaccagagacauauauauaucaagaagacuacuaggaaccuucacauggacauuaagcgauucugaaggaaaugaaacuccagguggauauugccuaacaagauggauguuaauagaagccgaauuaaaaugcuucggaaauacagcaguugcaaaauguaacgaaaaacaugacgaagaauucugugacaugcuaagauuauucgacuucaacaaacaagcaauaagaagacuaaaagcagaagcacaaaugucaauacaacuaauaaauaaagcaguaaaugcucuaauaaaugaccaauuaauaaugaaaaaccaccuuagagacauaaugggaauacccuacuguaacuacucaaaauacugguaccuaaaccacacagucacaggacgcacgucacuaccccgaugcuggcuaguaucaaacggcucuuaccuaaacgaaacacacuucagcgacgacauagaacaacaagcagacaacaugaucaccgaauuauuacaaaaagaauacauagacagacaaggaaaaacaccacuaggccuaguagaccucuuugucuucucaacaucauuuuaccuaauaucaauauuccuacauuuaguuaaaauacccacccauagacacaucauaggaaaacccugccccaaaccacaccgacuaaaccacaugggaauaugcucaugugguuuauacaaacaucccggaguaccaguaaaauggaaaagauaaggacuaguaauaaggaaacuguaugaaugucugugggcaggaagugaagagauccuucuguaaagguuuuuggaauuaugucugcugaauaauaaacuuuuuugaaauaauaaaucugguagaaaaaugagaucuaaaaaaaaaaaaaaaaaaaaaaaaaaaaaaaaaaaaaaaaaaaaaaaaaaaaaaaaaaaaaaaaugcaucccccccccccccccccccccccccccccccaaaggcucuuuucagagccaccagaauu

SEQ ID NO: 3011 - RNA, 1813 nt, Artificial Sequence
  mRNA product Design b-4 comprising derived and/or modified sequence from LASV(LASV254-NIG-2011;Clade II)__AIT17674__GPC (opt6)
gggagagucccgcagucggcguccagcggcucugcuuguucgugugugugucguugcaggccuuauucaagcuuaccaugggacaaauaaucacauucuuucaagaaguaccacauguaauagaagaaguaaugaacauaguucuuauagcacucucauuacuagcaauauuaaaaggaauauacaacguagcuacaugcggccucuuuggacuaguaucauuccuccuccuaugcggaagaucuugcucaacaacauacaaagguguauacgaacuacaaacauuagaauuagacaugacaaaucuuaacaugacaaugccacuauccuguaccaaaaauaacucccaccacuauauuaugguaggaaaugaaacaggacuagaacucacacuaacaaacacaucaauaauaaaccacaaauuuugcaaccuaucugaugcccacaaaaaaaacuuauacaaccacgcacuaaugucaauaauaucaacauuccacuuaucaauaccaaauuuuaaccaauaugaagcaauguccugcgacuucaacggaggaaaaaucucaguacaauauaaccuaucccacucauacgcaguagacgcagcaaaucauugcggaacaauagcaaacggaguccuacaaacauuuaugcgcauggcauggggaggaucuuacaucgcauuagacuccggaaaaggaaauugggacuguauuaugacaucuuaccaauaucuaaucauacaaaacacaacaugggaagaccacugccaauuuaguagacccucacccauaggauaccuaggauuacucucucaaagaacaagagauauauacauaucccgccgcuuacucggaaccuucacuuggacacucucagacucagaaggaaacgaaacaccaggaggauacugccuuacaagauggaugcuaauagaagcagaauuaaaauguuucggaaacacagcaguagcuaaaugcaaugaaaaacacgacgaagaauucugugacaugcuaagacuauucgacuucaacaaacaagcaauacgaagacuaaaaaccgaagcacaagcaaauauacaacucaucaacaaagcaguaaacgcacuuauaaaugaccaauuaauaaugaaaaaccaccucagagacaucaugggaauaccuuauugcaacuauucaaaauauugguaccuuaaccacacagucacagguaaaacaucccuaccaagauguuggcucgucucaaauggauccuaccuaaacgaaacccacuucucugacgauauagaacaacaagcagacaauaugauaacugaacuccuacaaaaagaauacauggacagacaaggaaaaacaccacuaggacucguagaccuauucguauuuucaacaucuuucuacuuaauauccauauuccuacaccuaguaaaaauaccaacccacagacacgucauaggaaaaccaugcccuaaaccacaucguuuaaaucacaugggaauauguucauguggauuauauaaacauccagguguaccaguaaaauggaaaagauaaggacuaguaauaaggaaacuguaugaaugucugugggcaggaagugaagagauccuucuguaaagguuuuuggaauuaugucugcugaauaauaaacuuuuuugaaauaauaaaucugguagaaaaaugagaucuaaaaaaaaaaaaaaaaaaaaaaaaaaaaaaaaaaaaaaaaaaaaaaaaaaaaaaaaaaaaaaaaugcaucccccccccccccccccccccccccccccccaaaggcucuuuucagagccaccagaauu

SEQ ID NO: 3012 - RNA, 1813 nt, Artificial Sequence
  mRNA product Design b-4 comprising derived and/or modified sequence from LASV(Nig08-A19;Clade III)__ADU56618__GPC (opt6)
gggagagucccgcagucggcguccagcggcucugcuuguucgugugugugucguugcaggccuuauucaagcuuaccaugggacaaaucguaacauucuuucaagaaguaccacacguaauagaagaagucaugaacauaguuuuaauagcccucucaauacuagcaauauuaaaaggcuuauacaacauagccaccugcggacuaauaggacuagucacauuccuccuacuaagcggcagaucuugcucaaugacauauaaaggaguauacgaauuacaaacccuagaacuaaauaugaauacauuaaacaugacaaugccacuaucaugcacaaaaaauaacucucaccauuacauaaugguuggaaacgaaacaggacuagaauuaacacuaacaaacaccagccuuuuacaccacaaauucugcaaccuauccgacgcacacaaaaaaaacuuauaugaccauacccuaaugucaauaaucuccacauuucaucuaucaauaccaaauuucaaccaauacgaagcaaugucaugcgacuucaacggaggaaaaauaacaguacaauacaaucuuucucacucauaugcaaucgaugcagcuaaccauugcggaacaguagcaaacggaguacuacaaacauucaugcgaauggcauggggagguucauacauugcucucgauucaggaagaggcaaaugggacuguaucaugacuucauaccaauaccuaaucauccaaaacacaacaugggaagaccacugccaauucucacgcccaucaccaauaggcuaccucggcuuacuaucccaaagaaccagagauauauacauaucaagaagacuacuaggaacauucacauggacucuuuccgacuccgaaggaaacgaaacaccaggaggcuacugccuaacacgauggauguuaauagaagcagaauuaaaaugcuucggcaacacugccgucgcuaaaugcaacgaaaaacaugaugaagaauuuugcgacaugcucagacuauucgacuucaauaaacaagcaaucagaagacuaaaagcagaagcucaaaugucaauccaacuaauaaacaaagcaguaaacgcucuaauaaaugaucaacuaauaaugaaaaaccaccuaagagacauaaugggaaucccauacuguaauuacucaaaauacugguaccuaaaucacacauccacuggaagaacaucacugccaagaugcugguuaguauccaacggaucauaucuaaaugaaacacacuucucagaugacauagaacaacaagcagacaauaugauaacagaaauguuacaaaaagaauaccuagauagacaaggaaaaacaccccuagguuuaguugacuuauucgucuucagcacaucuuucuaccuaauauccauauuccuccaucuaguaaaaauaccaacacacagacacauaguaggaaaaccaugcccaaaaccccaucgccuaaaccauaugggcauaugcucaugcggacuauacaaacaaccaggagucccagucagauggaaaagauaaggacuaguaauaaggaaacuguaugaaugucugugggcaggaagugaagagauccuucuguaaagguuuuuggaauuaugucugcugaauaauaaacuuuuuugaaauaauaaaucugguagaaaaaugagaucuaaaaaaaaaaaaaaaaaaaaaaaaaaaaaaaaaaaaaaaaaaaaaaaaaaaaaaaaaaaaaaaaugcaucccccccccccccccccccccccccccccccaaaggcucuuuucagagccaccagaauu

SEQ ID NO: 3013 - RNA, 1816 nt, Artificial Sequence
  mRNA product Design b-4 comprising derived and/or modified sequence from LASV(G1180-SLE-2010;Clade IV)__AIT17168__GPC (opt6)
gggagagucccgcagucggcguccagcggcucugcuuguucgugugugugucguugcaggccuuauucaagcuuaccaugggacaaauaguaacauucuuccaagaaguaccacauguaauugaagaaguaaugaauauaguacuaaucgcucuaucuauccucgcaguacuaaaaggauuauauaacuucgcaacuuguggacuagucggcuuacuaacuuuccuccuauuaugcggacgaucuugcacagcaucaagauauaaaggaguuuacgaacuacaaacccuugaauuaaacauggaaacacuaaauaugacaaugcccuuaagcuguacaaaaaacaauucucaucauuacauaaugguaggaaacgaaacaggauuagaauuaacauuaacaaauacauccauaauaaaccauaaauucugcaauuuaucagacgcacacaaaaaaaaccucuacgaccaugcacuuaugucaauuauaucaacauuccacuuaucaauacccaacuucaaucaauacgaagcaaugucuugcgacuucaauggaggaaaaauaucaguacaauacaauuuaucccauucauaugcaggagacgcagcaaaccauugcggaacaguugccaacggaguccuacaaacauuuaugcgaauggcauggggaggaucauauaucgcacuagacaguggacacggaucaugggacugcauaaugacaagcuaccaauaucuaaucauacaaaauacuacaugggaagaccacugccaauucagccgaccaagcccaauaggauaucuaggccuacucucacaacgcacaagagauauauacauaucaagaagauuacuaggaacauuuacauggacauugucagacucugaaggaaaagacacaccaggagguuauugccuuacaagauggauguuaauagaagcagaauuaaaaugcuuuggaaacacggcuguagcuaaaugcaacgaaaaacacgaugaagaauucugcgauauguuaagacuauuugauuuuaacaaacaagcaauccaaagacuaaaagcagaagcacaaaugucaauacaacuaaucaacaaagcagucaaugcauuaauaaaugaccaacuuauaaugaaaaaucacuuaagagacauaaugggcauaccauacuguaauuacucaaaauauugguaccuaaaucacacaaccacaggaaaaacuagccuaccaaaaugcugguuaguaucaaauggaucuuacuuaaaugaaacacacuucucugacgauauagaacaacaagcugacaacaugauaacagaaaugcuccaaaaagaauacauggaaagacaaggaaaaacaccacuuggauuaguagaccuauucguauucagcaccuccuuuuauuuaauaucaauauuccuacaccucguaaaaauaccaacacauagacauaucgucggaaaaagcugcccaaaaccacaccgacuaaaucacaugggaauaugcucguguggccuauauaaacaaccaggagucccaguaaaauggaaaagauaaggacuaguaauaaggaaacuguaugaaugucugugggcaggaagugaagagauccuucuguaaagguuuuuggaauuaugucugcugaauaauaaacuuuuuugaaauaauaaaucugguagaaaaaugagaucuaaaaaaaaaaaaaaaaaaaaaaaaaaaaaaaaaaaaaaaaaaaaaaaaaaaaaaaaaaaaaaaaugcaucccccccccccccccccccccccccccccccaaaggcucuuuucagagccaccagaauu

SEQ ID NO: 3014 - RNA, 1816 nt, Artificial Sequence
  mRNA product Design b-4 comprising derived and/or modified sequence from LASV(G1442-SLE-2011;Clade IV)__AIT17180__GPC (opt6)
gggagagucccgcagucggcguccagcggcucugcuuguucgugugugugucguugcaggccuuauucaagcuuaccaugggacaaauagucacuuuuuuccaagaaguaccacauguaauagaagaaguuaugaacauaguauuaauagcauuaucuauauuagccguacucaaaggucuauacaaugucgcaacauguggacuaauagguuuagucacauucuuacuccuaugcggaagaucauguacaacaacacuauacaaaggcguauacgaacuucaaacuuuagaacuaaacauggaaacauuaaacaugaccaugccucuauccugcacaaaaaacaacucacaccauuacauuagaguaggaaacgaaacaggacuagaacuaaccuuaacgaauacaucaauaauuaaccacaaauucugcaaccuaucagacgcccacaaaaaaaaccuauaugaccacgcauuaaugucuauaaucucaacauuccaccuaucaauuccaaacuucaaccaauacgaagcaaugucaugcgauuucaauggaggaaaaauaucaguacaauauaaccuuucacacucauacgcaggagacgcagcuaaccacugcgguacagucgcaaauggaguauuacaaacauucaugcguauggcaugggguggcucauauauagcacuugauucaggaagaggaaauugggauugcauuaugacuuccuaucaauaucuaauaauacaaaauacaacaugggaugaccacugucaauucucaagaccuucaccaauaggcuaccuaggacuauuaucacaaagaacccgagauguauacauaucacgacgacuuuuaggaacauucacauggacauuaucagacucagaaggcaaagacacaccaggagguuacugucuaaccagauggauguuaaucgaagcagaacuaaaaugcuuuggaaacacugcaguagcaaaauguaacgaaaaacacgaugaagaauucugugauauguuaagacuauucgauuucaacaaacaagcaauacaacgacucaaagcagaagcacaaauguccauucaacuaauuaacaaagcaguaaacgcucuaauaaacgaccaacucaucaugaaaaaccacuuaagagauauaaugggaauccccuacugcaauuacucaaaauacugguaccuaaauaacacugcaacuggcaaaaccucauuaccaaaaugcuggcucauaucuaauggcucauauuuaaacgaaacccauuucucagacgacauagaacaagaagccgauaacaugauaacagaaauguuacaaaaagaauacauggaaagacaaggaaaaaccccacuaggauuaguagacuuauucguauuuuccacuucauucuaucuaauaucaauauuccuacaccuagucaaaauaccuacacaccgacacauaguaggaaaauccuguccaaaaccccaucgacuaaaccacauggguauaugcuccugcggacuauacaaacaaccaggagucccaguaagauggaaaagauaaggacuaguaauaaggaaacuguaugaaugucugugggcaggaagugaagagauccuucuguaaagguuuuuggaauuaugucugcugaauaauaaacuuuuuugaaauaauaaaucugguagaaaaaugagaucuaaaaaaaaaaaaaaaaaaaaaaaaaaaaaaaaaaaaaaaaaaaaaaaaaaaaaaaaaaaaaaaaugcaucccccccccccccccccccccccccccccccaaaggcucuuuucagagccaccagaauu

SEQ ID NO: 3015 - RNA, 1816 nt, Artificial Sequence
  mRNA product Design b-4 comprising derived and/or modified sequence from LASV(G3010-SLE-2013;Clade IV)__AIT17344__GPC (opt6)
gggagagucccgcagucggcguccagcggcucugcuuguucgugugugugucguugcaggccuuauucaagcuuaccaugggacaaauaguaacauuuuuccaagaaguaccccacguaauagaagaagucaugaauaucguguuaauugcacuaucaauccucgcaguucuaaaaggccuauacaauuucgccacauguggccuaguuggauuaguaaccuuccuauuacuauguggccgaucuuguacuaccuccuuauauaaaggagucuaugaacuacaaacacuagaacuaaauauggaaacacugaauaugacaaugccacucucauguacaaaaaacaacucacaccacuauauaaugguaggaaacgaaacaggcuuagaacuaacacuaacaaauacaagcauaauaaaccacaaauucugcaaccuuagcgaugcacauaaaaaaaacuuauacaaccacgcccuaaugucuauaauauccacauuccacuuauccauaccuaacuucaaucaauacgaagccaugucaugugacuucaauggaggaaaaaucuccguacaauacaaccuaucucauaguuacgcaggagacgcagccucucauugcggaacuguagcaaauggaguauuacaaacauucaugcgaauggcauggggaggaucauauauagcauuagauucuggauacggaaaaugggauugcaucaugacaucauaccaauacuuaauaauacaaaacaccaccugggaagaccacugucaauucucccgacccaguccaauaggauaccucgguuuauuaucacaacgaacaagagacauauacauaucaagaagauugcuaggaacauuuacauggacacuaagugauucagaaggaaaagacaccccaggaggauacugccuaacaagauggaugcuaauagaagcagaacuaaaaugcuucggaaauacagcagucgccaaaugcaacgaaaaacacgacgaagaauuuugcgacaugcuuagauuauucgacuuuaacaaacaagcuauacaaagauuaaaaaccgaagcacaaaugucaauacaauuaauaaauaaagcaguaaacgcccuaauaaacgaucaacuuauaaugaaaaaccaucuuagagacauaaugggaaucccuuacugcaacuauucaaaauauugguacuuaaaccacaccacaacaggaaaaacaucacuccccaaaugcuggcuaguauccaauggcucauaucucaacgaaacacacuucucagaugauaucgaacaacaagccgacaacaugaucacagaaaugcuucaaaaagaauacauggaacgacaaggaaaaacaccacuaggccucguggaccuauucguauucuccacaucauucuaucuaauuucuauauuccuacaucucguuaaaauaccaacacaccgacauauaguaggcaaaucauguccaaaaccacacagacuaaaccauaugggaaucuguuccuguggacucuauaaacaaccaggaguaccaguaagauggaaaagauaaggacuaguaauaaggaaacuguaugaaugucugugggcaggaagugaagagauccuucuguaaagguuuuuggaauuaugucugcugaauaauaaacuuuuuugaaauaauaaaucugguagaaaaaugagaucuaaaaaaaaaaaaaaaaaaaaaaaaaaaaaaaaaaaaaaaaaaaaaaaaaaaaaaaaaaaaaaaaugcaucccccccccccccccccccccccccccccccaaaggcucuuuucagagccaccagaauu

SEQ ID NO: 3016 - RNA, 1816 nt, Artificial Sequence
  mRNA product Design b-4 comprising derived and/or modified sequence from LASV(G502-SLE-2009;Clade IV)__AIT17126__GPC (opt6)
gggagagucccgcagucggcguccagcggcucugcuuguucgugugugugucguugcaggccuuauucaagcuuaccaugggacaaauaguaacauuuuuccaagaaguaccacacgucauagaagaaguaaugaauauaguauuaauagcccuuagcauccucgcaguacuaaaaggucuauacaacuucgcaacaugcggccuagucggacuacuaacauuccuauuauuauguggucgcucaugcacuacaggacucuauaaaggaguauacgaauuacaaacauuagaauuaaauauggaaacauuaaacaugacaaugccacuauccuguaccaaaaacaacucacaccauuauauaaugguaggcaacgaaacaggacucgaacuaacucuuacaaauacaucuauaauaaaccacaaauucugcaacuuaucugacgcacacaagaaaaaccuauacgaccacgcuuuaaugucaauaaucucaacauuccaucuaucaauaccaaacuucaaccaauaugaagcaaugucaugugauuucaacggaggaaaaauaucaguacaauacaaccuaucacacucauacgcaggagacgcagccgaccacugcggaacaguagcuaaugguguacuacaaacauucaugagaauggcauggggcggauccuacaucgcacuugauuccggaagaggaagaugggacugcaucaugacuucauaucaauacuuaauaauacaaaacaccacaugggaagaccauugccaauucucaagaccaucacccauaggauaccuaggcuuauuaucccaaagaacaagagacauauacauaucuagaagacuacucggaacauucacuuggacacucucugauucagaaggaaaagacacucccggaggauacugccuaacacgauggauguuaauagaagccgaauuaaaaugcuucggaaauacagcaguugcuaaaugcaacgaaaaacaugacgaagaauuuugcgauauguuaagauuauucgacuucaacaaacaagcaauccaaagacuaaaagcagaagcacaaaugucaauacaacuaauuaauaaagcaguaaacgcucuuauuaacgaucaacuuguaaugaaaaaccaucuaagagacauaauggguauuccauauuguaacuacucccguuacugguacuuaaaccacaccacaacaggaagaacaucauuaccuaaauguuggcuaguaucaaacggaucauaccuaaacgaaacacauuucuccgaugacauugaacaacaagcagacaacaugauaacagaaaugcuacaaaaagaauacauggaaagacaaggaaaaacaccacuaggccucguagaccucuucgucuucuccacuucauucuauuuaauaucaauauucuuacaccuaguaaaaauaccaacucacagacauauagucggaaaaaguugcccaaaaccacaccgccuaaaccacaugggcauuuguucauguggacucuacaaacaaccaggcguaccaguuaaauggaaacgaugaggacuaguaauaaggaaacuguaugaaugucugugggcaggaagugaagagauccuucuguaaagguuuuuggaauuaugucugcugaauaauaaacuuuuuugaaauaauaaaucugguagaaaaaugagaucuaaaaaaaaaaaaaaaaaaaaaaaaaaaaaaaaaaaaaaaaaaaaaaaaaaaaaaaaaaaaaaaaugcaucccccccccccccccccccccccccccccccaaaggcucuuuucagagccaccagaauu

SEQ ID NO: 3017 - RNA, 1816 nt, Artificial Sequence
  mRNA product Design b-4 comprising derived and/or modified sequence from LASV(G733-SLE-2010;Clade IV)__AIT17154__GPC (opt6)
gggagagucccgcagucggcguccagcggcucugcuuguucgugugugugucguugcaggccuuauucaagcuuaccaugggacaaaucguaaccuucuuccaagaagucccacacguaauagaagaaguaaugaauaucguacuaauagcauuaucaauacuugcaguacucaaaggacuauauaacuucgcuacaugcggaauaguaggacuaguaucauucuuauuauuaugcggacgaucaugcaccacaucauuauacaaaggagucuaugaauuacaaacacuagaauuaaacauggaaacccuaaacaugacaaugccacucucaugcacaaaaaauaacucacaucacuacauaaugguuggaaacgagacaggacuagagcuaacacuaacaaacacaucaauaauaaaccacaaauucuguaauuuaagcgacgcacacaaaaaaaaucuauacgaccacgcauuaauguccauaaucucaaccuuccacuuaucaauaccaaauuuuaaucaauacgaagcaaugucaugcgauuucaacggaggaaaaauaucaguucaauauaaccuuagucacuccuacgcaggagaugccgccaaccacugcggcacaauagcaaacgguguccuacaaacuuucaugagaauggcauggggaggaagcuacauagcauuagauagcgggagagaucgaugggacuguauaaugacuaguuaucaauauuuaauaauacaaaacaccacaugggaagaccacugccaauucucaagaccaagcccaaucgguuaccucggacucuuaucacaaagaacccgagacauauacauaucaagaagacuacuaggcacauucacauggacccuaucugacagcgaaggaaaagauacuccaggagguuacugccuuacuagauggaugcuaauagaagcagaauuaaaauguuucggaaacaccgcaguagcaaaauguaacgaaaaacaugacgaagaauucugcgacaugcuccgacuauuugauuucaacaaacaagcaauacaaagacuaaaagcagaagcacaaaugucaauacaauuaauaaauaaagcaguaaacgcccuaauaaacgaccagcuaauaaugaaaaaccacuuacgagauaucaugggaaucccauacuguaacuacucaaaauacugguacuuaaaccauacaacaacuggaaaaacaucacuaccaaaaugcugguuaguaaguaacggaucuuaccucaacgaaacacauuuuucagaugacauagaacaacaagccgauaauaugauaacagaaaugcuacaaaaagaauacauggaaagacaagguaaaacuccacuaggacuagucgaccuauucguauucaguacaucauuuuacuuaauaucaaucuuccuacaccuaguaaaaauaccuacccacagacacguaguaggaaaaucaugcccaaaaccacaucgacuaaaucacaugggaauaugcucauguggacuauacggccaaccaggaguaccaguaaaauggaaaagauaaggacuaguaauaaggaaacuguaugaaugucugugggcaggaagugaagagauccuucuguaaagguuuuuggaauuaugucugcugaauaauaaacuuuuuugaaauaauaaaucugguagaaaaaugagaucuaaaaaaaaaaaaaaaaaaaaaaaaaaaaaaaaaaaaaaaaaaaaaaaaaaaaaaaaaaaaaaaaugcaucccccccccccccccccccccccccccccccaaaggcucuuuucagagccaccagaauu

SEQ ID NO: 3018 - RNA, 1816 nt, Artificial Sequence
  mRNA product Design b-4 comprising derived and/or modified sequence from MOPV/LASV reassortant(IGS-1;Clade IV)__AFY05576__GPC (opt6)
gggagagucccgcagucggcguccagcggcucugcuuguucgugugugugucguugcaggccuuauucaagcuuaccaugggacaaauaguaacauucuuccaagaagucccacacguaauagaagaaguaaugaauauaguacucauagcauuaucaguccuugcaguacuaaaaggccuauauaauuucgcuacauguggccuaguuggccuaguaacauuccuauuauuauguggacgauccugcacuacaucauuauacaaaggaguauacgaauuacaaacacucgaauuaaacauggaaacacucaacaugacaaugccacuauccugcacuaaaaacaacagccaccauuauaucaugguaggaaaugaaacaggacuagaauuaacacucacaaauacaucaauaauaaaccauaaauucuguaaucuaucugacgcacacaagaaaaacuuauacgaccacgcauuaaugucuauaauuucaacauuccaucuaucuauaccaaacuucaaucaauacgaagcaaugagcugugacuucaacggaggaaaaauaucaguacaauacaaccucucacacucauacgccggagaugcagcaaaccauuguggcacaguagcuaacggaguacuacaaacauuuaugcgcauggcuuggggaggaucauauauagcccucgauucaggucgaggcaacugggacugcauaaugacaucauaccaauaccuaauaauacaaaauacaacaugggaagaucauugccaauucucaagaccauccccuauaggcuacuuaggacuacucucucaacgaacaagggacauauacaucagcagaagauuauuaggaaccuuuacuuggacuuuaagcgacucagaaggcgaagauacacccggaggauacugucuaacaagauggaugcuaauagaagcagaauuaaaaugcuuugguaacacagcaguagccaaaugcaacgaaaaacacgaugaagaauuuugcgacauguuaagacuauucgauuucaacaaacaagcaauccaaagacucaaagcagaagcacaaauguccauacaacuaaucaauaaagcaguaaacgcacuaauuaacgaccaacuaauaaugaaaaaccacuuaagagacauaaugggaauaccuuauugcaacuacucuaaauacugguaccuaaaccacacaacaacaggccguacaucauuaccaaaaugcuggcuaguaucgaacggaucauacuuaaaugaaacacauuucucagaugauaucgaacaacaagcagacaauaugauaacagaaaugcuacaaaaagaauacauggaaagacaaggaaaaacaccacuaggucuaguagaccuauucguauucucaacuagcuucuaucucaucucaauauuccuacaccuaguaaaaauaccaacacauagacauauaguaggaaaaucaugcccaaaaccccacagacuaaaccacaugggaauaugcucauguggacucuacaaacaaccaggaguaccaguaaaauggaaacgcuaaggacuaguaauaaggaaacuguaugaaugucugugggcaggaagugaagagauccuucuguaaagguuuuuggaauuaugucugcugaauaauaaacuuuuuugaaauaauaaaucugguagaaaaaugagaucuaaaaaaaaaaaaaaaaaaaaaaaaaaaaaaaaaaaaaaaaaaaaaaaaaaaaaaaaaaaaaaaaugcaucccccccccccccccccccccccccccccccaaaggcucuuuucagagccaccagaauu

SEQ ID NO: 3019 - RNA, 1816 nt, Artificial Sequence
  mRNA product Design b-4 comprising derived and/or modified sequence from LASV(LM765-SLE-2012;Clade IV)__AIT17814__GPC (opt6)
gggagagucccgcagucggcguccagcggcucugcuuguucgugugugugucguugcaggccuuauucaagcuuaccauggggcaaauugucacauucuuucaagaaguaccacacguuauagaagagguaaugaacauaguacuaauagcacuaucaauacuagccguauuaaaaggacuauacaacuucgccacaugcggacuaguaggccuaguaacauuccuacuacuguguggacgaagcugcacuaccucccuauacaaaggaguauaugaacuccaaacauuagaacuaaauauggaaacacuuaacaugacuaugccccuauccugcacaaaaaacaacucacaucauuacauuaugguuggaaaugaaacaggauuagaacuaaccuuaaccaacacuucaauaauagaccacaaauucugcaacuuaucagacgcacaucgaaaaaauuuauaugaccaugcacuaaugucaauuauaucaacauuucaccuaagcauaccaaacuucaaccaauaugaagcaaugucaugcgacuucaacggaggaaaaauaucaguacaauacaauuuaucacauagcuaugcaaaagacgcagcagaucauugcggaacaguagcaaacggaguacuacaaacauucaugcgaauggccuggggaggaucauacauagcacuagacuccggaagaggaagaugggauuguauaaugacuucauaccaauauuuaauaauacaaaauacuacuugggaagaucacugccaauucucuagaccaucacccauuggauacuuaggacuacuaucacaaagaacaagggacauauacauaucaagacgacuacucgguacauucacauggacauuaucagauagugaaggaaaagauacuccaggcggauauugcuuaaccagauggaugcuaauugaagcagaacuaaaauguuuuggaaacacagcuguagcaaaaugcaacgaaaaacaugaugaagaauucugugauaugcuaagauuauucgauuuuaauaaacaagcaauucaaagacuaaaagcagaagcacaaaugucaauucaacuaauaaacaaagcaguaaaugcauuaauaaacgaucaacuaauaaugaaaaaucaccuaagagacauaaugggaauaccauacugcaacuacucuaaauacugguaccuaaaucacacaacaacaggcaaaacaucacuaccaaaaugcugguuaguaucaaacggaucauaccuaaacgaaacacacuucagcgaugacauagaacaacaagcagauaauaugauaacugaaauguuacaaaaagaauacauggaaagacaaggaaaaacaccauuaggcuuagucgacuuauucguauucucaacaucauuuuacuuaaucuccauauuccuacaccuaguaaaaauacccacacauagacacauagucggaaaaccaugcccaaaaccacacagacuaaaccacaugggaauauguucauguggacuauauaaacaaccaggaguaccaguaaaauggaaacgauaaggacuaguaauaaggaaacuguaugaaugucugugggcaggaagugaagagauccuucuguaaagguuuuuggaauuaugucugcugaauaauaaacuuuuuugaaauaauaaaucugguagaaaaaugagaucuaaaaaaaaaaaaaaaaaaaaaaaaaaaaaaaaaaaaaaaaaaaaaaaaaaaaaaaaaaaaaaaaugcaucccccccccccccccccccccccccccccccaaaggcucuuuucagagccaccagaauu

SEQ ID NO: 3020 - RNA, 1816 nt, Artificial Sequence
  mRNA product Design b-4 comprising derived and/or modified sequence from LASV(LM776-SLE-2012;Clade IV)__AIT17824__GPC (opt6)
gggagagucccgcagucggcguccagcggcucugcuuguucgugugugugucguugcaggccuuauucaagcuuaccaugggacaaaucguaacauuuuuccaagaagucccccacguaauagaagaaguaaugaacauuguacuuaucgcauuaucaauacucgcaguccuaaaaggacuauacaacuuugcaacaugcggacuaguaggcuuagucacauuccuauuacuaugcggaagaucaugcacaacaagcguauacaaaggaguauaugaacuccaaacacuagaacucaauauggaaacucuaaacaugacaaugccauuaucaugcacaaaaaacaacucacaccauuacauaaugguaggaaacgaaacaggacuagaauuaacacuaacaaacacuucaauaaucaaccacaaauucugcaaccuuucagacgcacauaaaaaaaaccuauacgaccacgcacuaaugucuauaauaucaaccuuccaucuaucaauaccgaacuuuaaccaauacgaggcaaugucaugugauuucaauggcggaaaaauaucaguacaauacaaccuaucacacucauacgccggugaugcagccaaccacugcggaacaguugccaaugguguacuacaaacauucaugagaauggcauggggcggaucauacauagcccuagacucagggcacggaaaaugggacuguauaaugacaucuuaccaauaccucauaauacaaaauacaacaugggaagaccacugccaauuuucacgaccaucaccaauaggauaucuaggacuauuaucacaaagaacuagagacauauauauaucaagaagauuauuaggaacauuuacuuggacacuaucagacucagaaggaaaagacacaccagguggauauugcuuaaccagauggauguuaauagaagcagaacuaaaaugcuuuggaaacacagcaguugcgaaauguaaugaaaaacacgacgaagaauucugcgauaugcuaagauuauucgacuuuaacaaacaagcaauacaaagacuaaaagcugaagcacaaaugagcauacaacugauaaacaaagcaguaaacgcccucauuaacgaccaauuaauaaugaaaaaccacuuaagagacauaaugggaauaccauacugcaacuacucaaaauacugguauuuaaaccacacaacaaccggaaaaacaucccuaccaaaaugcuggcuaguauccaauggaucauaccuaaaugaaacacacuuuucagacgacauugaacaacaagcagacaauaugauaacagaaauguuacaaaaagaauacauggaacgacaaggcaaaacuccccuaggacucguagaccuuuucgucuucucaaccaguuucuaucuaauaucaauauuccuccaccuagucaaaauacccacacauagacacauaguugguaaaucaugccccaaaccccauagacucaaccacaugggaauaugcucuugcggacuauacaaacaaccaggagucccaguacgauggaaaagauaaggacuaguaauaaggaaacuguaugaaugucugugggcaggaagugaagagauccuucuguaaagguuuuuggaauuaugucugcugaauaauaaacuuuuuugaaauaauaaaucugguagaaaaaugagaucuaaaaaaaaaaaaaaaaaaaaaaaaaaaaaaaaaaaaaaaaaaaaaaaaaaaaaaaaaaaaaaaaugcaucccccccccccccccccccccccccccccccaaaggcucuuuucagagccaccagaauu

SEQ ID NO: 3021 - RNA, 1816 nt, Artificial Sequence
  mRNA product Design b-4 comprising derived and/or modified sequence from LASV(Mad39;Clade IV)__ANH09722__GPC (opt6)
gggagagucccgcagucggcguccagcggcucugcuuguucgugugugugucguugcaggccuuauucaagcuuaccaugggacaaaucguaacauucuuccaagaaguaccacacguaauagaagaaguaaugaacauaguacuuauagcucuaucuauauuagcaguucuaaaaggauuauacaauguagccacaugcggacugaucggacuaguaacauuccuacuccuauguggaagaucauguaccacaacucuauauaaaggcguauaugaacuacaagcauuagaacuuaacauggaaacucuaaacaugacaaugccccuaucaugcacaaaaaauaacucccaccacuacauaagaguaggaaaugaaacuggacucgaacuaacacuaacaaacacauccuuaaucaaccacaaauucuguaaccuaagcgacgcacauaaaaaaaaucuauacgaccacgcauuaauguccauaaucucaaccuuccacuuauccauccccaauuuuaaccaauacgaagcaaugucaugcgauuucaaugacgguaaaauauccguccaauauaauuuaucccauacauacgccggagauaccgcaaaccacugcggaacuguugcaaacggagucuuacaaacauucaugagaauggccuggggaggaucauacauagcacuagacuccggaagaggaggaugggacugcaucaugacuucauaucaauaccuaauuauacaaaacacuacaugggaagaccacugucaauuuucaagaccaucaccaauaggauaccuaggucuacuuucacaaagaaccagagacaucuauaucuccagaagacuccucgguacauucacauggacacuuucagacucagaaggaaaagacacacccggaggauauugucuaacaagauggaugcucauagaagccgaacucaaaugcuucggaaauacagcaguagcuaaaugcaacgaaaaacaugaugaagaauuuugcgauaugcuuagauuauucgauuucaauaaacaagccauacaaagacuaaaagcagaagcccaaaugucaauacaacuaauaaacaaagccguaaacgcacuaauaaacgaucaauuaauaaugaaaaaccaccuaagagacauaaugggaauaccauacugcaauuauucaaaauauugguaccuaaaucacacaguaacaggaaaaaccucauuaccuaaaugcuggcuagucucuaacggaucauacuuaaacgaaacccacuucucagaugacauagaacaacaagccgacaacaugaucacggaaaugcuucaaaaagaauacauggagagacaaggcaaaacaccacuaggacuaguugaccuauucguuuuuucaaccuccuucuacuuaauaucaaucuuccuacaccuagucaaaauacccacacauagacauguaguaggaaaaccauguccaaaaccacaucgauuaaaucacaugggaauuugcucaugcggcuuuuacaaacaacccggagucccaguacgauggaaacgauaaggacuaguaauaaggaaacuguaugaaugucugugggcaggaagugaagagauccuucuguaaagguuuuuggaauuaugucugcugaauaauaaacuuuuuugaaauaauaaaucugguagaaaaaugagaucuaaaaaaaaaaaaaaaaaaaaaaaaaaaaaaaaaaaaaaaaaaaaaaaaaaaaaaaaaaaaaaaaugcaucccccccccccccccccccccccccccccccaaaggcucuuuucagagccaccagaauu

SEQ ID NO: 3022 - RNA, 1816 nt, Artificial Sequence
  mRNA product Design b-4 comprising derived and/or modified sequence from LASV(Z0947-SLE-2011;Clade IV)__AIT17840__GPC (opt6)
gggagagucccgcagucggcguccagcggcucugcuuguucgugugugugucguugcaggccuuauucaagcuuaccaugggacaaauagucaccuucuuccaagaagucccacauguaauagaagaaguaaugaauauaguccuuauagcacuaucaauccuugccguacuaaaaggacuauacaacuucgccacaugcggucuagucggccuaguaacauucuuacuauuaugcggacgaucuuguacuaucagccucuacaaaggaguuuacgaauuacaaacacuagaacuaaauauggaaacauuaaacaugacuaugccccugucauguaccaaaaauaacucacaucacuauauuaugguuggcaaugaaacaggacucgaacucacacuaacaaacacaucaauaaucaaccauaaauucuguaacuuauccgaugcacacaagaaaaaccuauaugaccaugcacuaauguccauaauaucaacauuucaccuaucaauucccaauuucaaccaauacgaagcaaugucaugcgacuuuaauggagguaaaauaucaguacaauauaaccuaucacacucuuaugcaggagaugcagcaaaccauugcggaacaguagcaaacggaguauuacaaacauucaugcguauggccuggggaggaucuuauauagcauuagacucaggaagagauagaugggauuguauaaugacaucauaccaauacuuaauaauacaaaauacaaccugggaagaccacugccaauucucaagacccuccccaauaggauaucucggauuacuuucacaacgcacaagagauauauacauaucaagaagauuacuaggaacuuucacauggacccuauccgauucugaaggaaaagauacaccagguggauacugccuaacccgauggaugcuaauagaagcagaacuaaaauguuucggaaacacagcuguagcaaaaugcaacgaaaaacacgacgaagaguucugcgacaugcuaagauuauucgauuucaacaaacaagcaauccaaagauuaaaagcagaagcacaaauguccauccaacuaauuaacaaagcagucaacgcauuaauaaacgaccaacuaauaaugaaaaaccaccuucgagacaucauggguauuccauacugcaauuacucaaaauacugguacuuaaaucacacuaccacaggaaaaacaucauuacccaaaugcuggcuaguaucuaacggauccuaucuaaaugaaacacacuucucagacgacauagaacaacaagcugauaacaugauaacagaaauguuacaaaaagaauacauggaacgccaaggcaaaacaccacucggauuaguagaucuauucguauucucaacaucauucuaucuaauaucaauauuucuccaccuaguuaaaauccccacacauagacauauaguaggaaaacccugcccaaaaccacaccgacuaaaccacauggguaucugcucaugcggauuauacaaacaaccuggaguaccuguaaaauggaaaagauaaggacuaguaauaaggaaacuguaugaaugucugugggcaggaagugaagagauccuucuguaaagguuuuuggaauuaugucugcugaauaauaaacuuuuuugaaauaauaaaucugguagaaaaaugagaucuaaaaaaaaaaaaaaaaaaaaaaaaaaaaaaaaaaaaaaaaaaaaaaaaaaaaaaaaaaaaaaaaugcaucccccccccccccccccccccccccccccccaaaggcucuuuucagagccaccagaauu

SEQ ID NO: 3023 - RNA, 1816 nt, Artificial Sequence
  mRNA product Design b-4 comprising derived and/or modified sequence from LASV(Josiah;Clade IV)__NP_694870__GPC (opt11)
gggagagucccgcagucggcguccagcggcucugcuuguucgugugugugucguugcaggccuuauucaagcuuaccaugggccaaauagucaccuucuuccaagaagucccccacguaaucgaagaaguaaugaacaucguccucaucgcacucucaguccucgccguccucaaaggccucuacaacuuugccacaugcggccuagucggacucgucaccuuccuccuccuuugcggccgcuccugcacuaccagccuuuacaaaggcgucuacgaacuccaaacccuugaacucaacauggagacccucaacaugaccaugcccuuauccugcaccaaaaacaacucacaccacuacauaauggucggcaacgaaaccggcuuagaacuaacccucaccaacaccuccauaaucaaccacaaauucugcaaccucagcgacgcccacaagaaaaaccuauacgaccacgcccucaugucaaucauauccaccuuccaccucucuauacccaacuucaaccaauacgaagcaauguccugcgacuucaacggcgguaaaauauccguucaauacaaccugucucacuccuacgccggcgacgccgccaaccacuguggcaccgucgcuaacggcguacuacaaacauucaugcgaauggccuggggcggcagcuacaucgcccucgacucagggagaggaaacugggacugcaucaugaccucuuaccaauaccucaucauacaaaacaccaccugggaagaccacugccaauucagccgaccaucccccaucggcuaccuaggccuacuaucacaacguacccgcgacaucuauauaagccgccgccuacucggcaccuucaccuggacacucuccgacuccgaagguaaagacacccccggaggcuacugccuaacccgcuggaugcuaaucgaagccgaacuuaaaugcuucggcaacaccgcggucgccaaaugcaacgaaaagcacgacgaagaguucugcgacaugcucaggcucuuugacuucaacaaacaagccauccaacgccucaaagcagaagcccaaauguccauccaacucauaaacaaagccgucaaugcccucauuaacgaccaacucauuaugaaaaaccaccuacgagacaucauggguauccccuacugcaacuacagcaaauacugguaccucaaccauacaacuaccggccgcacuagccugcccaagugcuggcucguauccaauggcuccuaccucaacgaaacccacuucuccgacgacauugaacaacaagccgacaacaugaucaccgaaaugcuucaaaaggaauacauggaacggcaaggaaaaacuccccucggccucgucgaccucuucgucuucagcacauccuucuaccucauauccaucuuccuccaccuagucaaaauccccacacacagacacauagucggaaaauccugccccaaaccccacagacucaaccacaugggcaucuguuccugcggucucuacaaacaaccuggcguacccgucaaauggaagcgcuaaggacuaguaauaaggaaacuguaugaaugucugugggcaggaagugaagagauccuucuguaaagguuuuuggaauuaugucugcugaauaauaaacuuuuuugaaauaauaaaucugguagaaaaaugagaucuaaaaaaaaaaaaaaaaaaaaaaaaaaaaaaaaaaaaaaaaaaaaaaaaaaaaaaaaaaaaaaaaugcaucccccccccccccccccccccccccccccccaaaggcucuuuucagagccaccagaauu

SEQ ID NO: 3024 - RNA, 1813 nt, Artificial Sequence
  mRNA product Design b-4 comprising derived and/or modified sequence from LASV(LP;Clade I)__AAF86701__GPC (opt11)
gggagagucccgcagucggcguccagcggcucugcuuguucgugugugugucguugcaggccuuauucaagcuuaccaugggccaaaucaucaccuucuuccaagaagucccacacgucauagaagaagugaugaacaucguccucauagcccuaucacuccuugccauccucaaaggccucuacaacaucgcaaccugcggcaucaucggccucgucgccuuccucuuucucugcggcaagagcuguucccuaacccuuaaaggagguuacgaacuccaaacacuagagcuaaacauggaaacacuuaacaugaccaugccccuaagcugcaccaaaaacuccucacaccacuacauccgcgucggaaacgaaaccggccucgaacucacucucaccaacacguccaucaucaaccacaaauucugcaaccuaucugacgcccauaagaaaaauuuauacgaccacgcccuaaugagcaucaucucgaccuuccaccuuuccauccccaacuucaaccaauacgaagccauguccugcgacuucaauggcggaaaaauauccguccaauacaaccucucacacagcuacgccggggacgccgccgaacacugcggcaccgucgccaacggcguccuacaaaccuucaugcgcauggccuggggaggccgcuauauagcccucgauuccgguaaaggcaacugggacugcauaaugaccuccuaccaauaccuuaucauacaaaacaccacaugggaagaccacugccaauucucccgcccgagccccauuggauaccucggccuacucucucaacgcacuagagacaucuacaucucccgccgucuccucggcaccuucaccuggacccucuccgacucagaaggcaacgaaacacccggaggcuacugccuuacccgauggaugcucaucgaagcagaacuaaaaugcuucggcaacacugccgucgccaaauguaacgaaaaacacgacgaagaguucugcgacaugcuccgccucuucgacuucaacaaacaagccauccgucgccucaaagcugaagcacaaauguccauacagcucaucaacaaagccgucaacgcacuaaucaacgaccaacucaucaugaaaaaccaccuccgagacaucaugggcauaccauacugcaacuacuccaaauacugguaccugaaccacaccuccucuggccgaaccucccuaccaaagugcuggcucauaucaaacggcuccuaccuuaacgaaacccaauucucagacgacaucgaacaacaagcagacaacaugaucaccgaaaugcugcaaaaagaguacauagaacgccagggcaaaacaccccuuggccuugucgacauauucaucuucucaaccagcuucuaccucaucagcaucuuccuccaucucauaaaaauccccacccaucgucacaucgucggaaaaccaugcccaaaaccccaucgucucaaccacaugggcgucugcuccugcggucucuacaagcaccccggcguacccaccaaauggaagcgcuaaggacuaguaauaaggaaacuguaugaaugucugugggcaggaagugaagagauccuucuguaaagguuuuuggaauuaugucugcugaauaauaaacuuuuuugaaauaauaaaucugguagaaaaaugagaucuaaaaaaaaaaaaaaaaaaaaaaaaaaaaaaaaaaaaaaaaaaaaaaaaaaaaaaaaaaaaaaaaugcaucccccccccccccccccccccccccccccccaaaggcucuuuucagagccaccagaauu

SEQ ID NO: 3025 - RNA, 1813 nt, Artificial Sequence
  mRNA product Design b-4 comprising derived and/or modified sequence from LASV(803213;Clade II)__AAF86703__GPC (opt11)
gggagagucccgcagucggcguccagcggcucugcuuguucgugugugugucguugcaggccuuauucaagcuuaccaugggccaaaucauaacauucuuccaagaagucccccacgucaucgaagaagucaugaacaucguacucaucgcucucucacuccuagccauccucaaagguaucuacaauguagcgaccugcggccucuucggccucaucucauuccuucuccucugcggccgcuccugcuccgucaccuacaaaggcgucuacgagcuccagacccuagaacuaaacauggccaaccucaauaugaccaugccccucuccugcacuaaaaacaacagccaucacuacaucauggucggaaacgagaccggacucgaacucacacuuacuaacaccuccaucaucaaccacaaauucugcaaccucuccgacgcccacaagaaaaaucucuaugaccacgcccucauguccauuaucucaacguuccaccucuccaucccuaacuucaaccaauacgaagccaugucaugcgacuucaacggcggcaaaauaagcguccaauacaaccuaucccacuccuucgccguagacgccgccaaccacugcggcaccaucgccaacggcguucuccaaacauucaugcgcauggccugggguggcuccuacauugcccucgacucaggcaaaggcaacugggauugcaucaugacauccuaccaauaccucauuauccaaaacacaacuugggaagaccacugccaauucagccgcccaucccccauaggcuaccucggccuccucucccaacgcacacgcgacaucuacaucucccgccgccuacuaggaaccuucaccuggacccucagcgacucggaaggcaacgaagccccaggcggcuacugccucacuagauggaugcucaucgaagccgaacucaaaugcuucggcaacaccgccguggccaaauguaacgaaaaacacgacgaagaguucugcgacaugcuccgccucuucgacuucaacaagcaagccaucaaacgccucaaaaccgaagcgcaaaugucaauccagcucauaaacaaggcagucaacgcccucaucaaugaucaacuuaucaugaaaaaccaccuccgcgacauaaugggcauccccuacuguaacuacucucgcuacugguaccucaaccacacugugacaggcaaaaccucacuaccccgcuguuggcucguauccaacggcuccuaccucaacgaaacccacuucagcgacgacaucgaacaacaggccgacaauaugaucaccgaaaugcuacaaaaggaauacauggaccgacaaggcaaaacaccccuuggccucgucgaccuauucgucuucuccaccucauucuaccucaucuccaucuuccuccaccucgucaaaaucccaacccaccgccacaucgucggcaagcccugccccaaaccccaccgccucaaccauaugggcaucugcucaugcggccucuacaaacaccccggaguaccaguaaaauggaaacgcuaaggacuaguaauaaggaaacuguaugaaugucugugggcaggaagugaagagauccuucuguaaagguuuuuggaauuaugucugcugaauaauaaacuuuuuugaaauaauaaaucugguagaaaaaugagaucuaaaaaaaaaaaaaaaaaaaaaaaaaaaaaaaaaaaaaaaaaaaaaaaaaaaaaaaaaaaaaaaaugcaucccccccccccccccccccccccccccccccaaaggcucuuuucagagccaccagaauu

SEQ ID NO: 3026 - RNA, 1813 nt, Artificial Sequence
  mRNA product Design b-4 comprising derived and/or modified sequence from LASV(GA391;Clade III)__CAA36645__GPC (opt11)
gggagagucccgcagucggcguccagcggcucugcuuguucgugugugugucguugcaggccuuauucaagcuuaccaugggucaaaucgucaccuucuuccaagaaguaccccacgucaucgaagaagucaugaacauaguccucaucgcccucuccauccucgcgauccucaaaggacuauauaacgucgcaaccugcggccucaucggccucgucaccuuccuccuccucagcggacguuccugcagccucaucuacaaaggcaccuacgaacuccagacucucgaacuuaacauggaaacacucaacaugaccaugccccucuccugcaccaagaacaacucccaccacuacauccgcguaggcaacgaaaccggccuagagcuaacccuaacaaacacaucaauccucaaccacaaauucugcaaccucuccgacgcccacaaacgcaaccuauacgaccacucccucauguccaucaucuccaccuuccaccucucaauccccaacuucaaccaauacgaagccauguccugcgacuuuaacggaggcaagaucaccguacaauacaaccucucccacuccuucgccgucgacgccgccggccacugcggcacccucgccaacggaguacuacaaaccuucaugcgcauggcauggggcggcucauacaucgcgcucgacuccggccgcggcaacugggacuguaucaugacauccuaucaauaccuuauaauccagaacaccaccugggacgaccacugccaauuuucccgccccucacccaucggauaucuaggccuccucucccaacgcacccgagacaucuacaucucccgacgacuccucggcacauucacauggacccucuccgacucagaaggcaacgaaacccccggcggauauugccuaacacgcuggaugcucaucgaagcugaacuuaagugcuuuggcaacaccgcaguagcuaaaugcaacgaaaaacacgacgaagaguucugcgacaugcuccgacucuucgacuucaacaaacaagcaauccgccgguuaaaaacugaagcacaaauguccauccaacucaucaacaaagcaguaaacgcucucaucaacgaucaacucauaaugaaaaaccaccuccgagacauaaugggcauacccuacugcaauuacucaagauacugguaccucaaccacaccucaaccgguaaaaccucccuaccccgcugcuggcuaaucucaaauggcucauaccucaacgaaacuaaauucuccgacgacaucgaacaacaagcagacaacaugauuaccgaaaugcugcaaaaagaauacaucgaccgacaaggcaagacccccuuaggccuugucgaccucuucgucuucuccaccucauucuaccucaucucaaucuuccuccaccucgucaaaaucccaacccaccgccacaucgucggcaaacccugccccaaaccccaccggcucaaucacaugggcaucugcagcugcggacucuacaaacaacccggcgucccaguccgcuggaaacgcuaaggacuaguaauaaggaaacuguaugaaugucugugggcaggaagugaagagauccuucuguaaagguuuuuggaauuaugucugcugaauaauaaacuuuuuugaaauaauaaaucugguagaaaaaugagaucuaaaaaaaaaaaaaaaaaaaaaaaaaaaaaaaaaaaaaaaaaaaaaaaaaaaaaaaaaaaaaaaaugcaucccccccccccccccccccccccccccccccaaaggcucuuuucagagccaccagaauu

SEQ ID NO: 3027 - RNA, 1816 nt, Artificial Sequence
  mRNA product Design b-4 comprising derived and/or modified sequence from LASV(AV;Clade V)__CCA30314__GPC (opt11)
gggagagucccgcagucggcguccagcggcucugcuuguucgugugugugucguugcaggccuuauucaagcuuaccaugggacagaucguaacauucuuccaagaagucccccacguaaucgaagaagucaugaacaucguacuuaucgcccucuccauccucgccguccucaaaggccuauacaacaucgccacaugcggccuaaucggacuuauaaccuuccuccuccuuugcggccguucaugcucaagcaaccuuuacaaaggagucuacgaacuacaaagucucgaccucaacauggaaacacucaacaugaccaugccccucagcugcaccaaaaacaacucccaccacuacauccgcgucggcaacgacacaggacucgaacucacucucacaaacaccaguauccucaaccacaaguucugcaaccucuccgacgcccacaagaaagaccucuacgaccacgcacugauguccauaauuuccacuuuccaccuuuccauucccaacuucaaccaauacgaagccaugucaugcgacuuuaacggcggaaaaaucagcguacaauacaaccucucucacuccuaugccaucgacgcugcaaaccacugcggcaccgucgcaaacggcauccuccaaaccuucaugagaauggccuggggcggcucuuacaucgcccuagauucaggccgcggcaacugggacuguaucaugacauccuaccaauaccucaucauacaaaacaccaccugggaaaaccacugccaauuuucccgccccagcccaaucgguuaccucggccuccucucucaacggacccgcgacaucuacaucucccggcgacuauuagggacguucaccuggacccucucagacagcgaaggcaacgccacccccggcggauacugccuaacucgcuggaugcuuauagaagccgaacuuaaaugcuucggcaacacugcaguugccaaaugcaacgaaaaacacgacgaggaguucugcgacaugcuccgccucuucgacuucaacaagcaagccaucagccgccuuaaauccgaagcccaaauguccauucagcucaucaacaaagcuguaaacgcccucauaaacgaccaacucaucaugaaaaaucaccuccgcgacauaaugggcauacccuacugcaacuacuccaaauacugguaccuaaaucacaccaucaccggcaaaaccucucuccccaaaugcuggcucgucuccaacggcucauaccucaacgaaacccacuucucggacgacaucgaacaacaagccgacaacaugaucaccgaaaugcuccaaaaagaauacauggaacgccaaggcaaaacaccacuaggccuagucgaccuauucgucuucucgacuuccuucuaccuaauauccaucuuccuucgacucguaaaaauccccacacacagacacauugucggcaagcccugccccaaaccccaccgccuaaaccacaugggcaucugcucaugcggccucuacaaacaacccggcgucccaguccgcuggaaacgcuaaggacuaguaauaaggaaacuguaugaaugucugugggcaggaagugaagagauccuucuguaaagguuuuuggaauuaugucugcugaauaauaaacuuuuuugaaauaauaaaucugguagaaaaaugagaucuaaaaaaaaaaaaaaaaaaaaaaaaaaaaaaaaaaaaaaaaaaaaaaaaaaaaaaaaaaaaaaaaugcaucccccccccccccccccccccccccccccccaaaggcucuuuucagagccaccagaauu

SEQ ID NO: 3028 - RNA, 1813 nt, Artificial Sequence
  mRNA product Design b-4 comprising derived and/or modified sequence from LASV(Togo/2016/7082;Clade VI)__AMR44577__GPC (opt11)
gggagagucccgcagucggcguccagcggcucugcuuguucgugugugugucguugcaggccuuauucaagcuuaccaugggacaaaucaucaccuuuuuccaagaagucccccacguuaucgaagaagucaugaacauaguccucaucgcacuuucacuccucgccauacucaaaggcguauacaacgucgcaaccugcggaauaaucggccuggucaccuuccuguuccuaugcggacgauccugcucccuaaucuacaagggguccuacgaacuacaaacccuagaacucaacauggaaacacuuaacaugacaaugccacucucaugcaccaaaaacucaucccaccacuacaucagaguuggcaacgaaacaggccucgagcuaacccucaccaauacaucaaucaucaaccacaaauucugcaaccucuccgacgcccacaaacgaaaccucuaugaccacgcacucauguccauccuuagcaccuuccaccuuagcauccccaacuucaaccaauacgaggccaugagcugcgacuucaacggaggaaaaaucuccguccaauacaaccuaucccacgccuacgccgucgacgcagccgaacacugcgguaccgucgcgaacggcguccuccaaaccuucaugcgcauggccuggggcggcagcuacaucgcccucgacagcggccgcgggaacugggacugcaucaugaccucauaucaauaccuaauuauccaaaacaccaccugggaggaucacugccaauucucccgcccauccccaaucggcuaccuuggccuccucucccaacgcacccgugacaucuacaucucccgcagacuacucgguaccuucacauggacccucuccgacuccgaaggcaacgaaaccccaggcggcuacugccugacacgcuggaugcucaucgaagccgagcucaaaugcuucggcaacaccgccgucgccaagugcaaugaaaaacacgacgaagaguucugcgacaugcuucgccucuucgacuuuaacaaacaggccauccaacgccuaaaaagugaagcccaaaugagcauccaguuaaucaacaaagccgucaaugccuuaaucaacgaccaacucaucaugaaaaaccaucuccgcgacaugaugggcauaccuuacugcaacuauuccaaauacugguaccuaaaccacacuuccucgggccgaacaagccucccaaaauguuggcucgucuccaacggaucauaccucaacgaaacccacuucuccgacgacaucgaacaacaagccgacaauaugauuaccgaaauguuacaaaaggaauacaucgaccgccaaggcaaaacaccccuaggccucgucgaccuuuucguauucucgacgucauucuaccuaaucaguaucuuccuccaccucaucaaaauccccacccaccgucacaucgucggcaaaccgugccccaaaccccaccgccugaaccacaugggaaucugcucuuguggccuauacaaacaacccggaguacccaccagguggaaacgguaaggacuaguaauaaggaaacuguaugaaugucugugggcaggaagugaagagauccuucuguaaagguuuuuggaauuaugucugcugaauaauaaacuuuuuugaaauaauaaaucugguagaaaaaugagaucuaaaaaaaaaaaaaaaaaaaaaaaaaaaaaaaaaaaaaaaaaaaaaaaaaaaaaaaaaaaaaaaaugcaucccccccccccccccccccccccccccccccaaaggcucuuuucagagccaccagaauu

SEQ ID NO: 3029 - RNA, 1813 nt, Artificial Sequence
  mRNA product Design b-4 comprising derived and/or modified sequence from LASV(KAK-428;Clade n.d. (VII))__ANH09740__GPC (opt11)
gggagagucccgcagucggcguccagcggcucugcuuguucgugugugugucguugcaggccuuauucaagcuuaccaugggccaaaucgucaccuucuuccaagaagucccccacgucaucgaagaagucaugaacauaguccuaauagcccucucccuccuagccauccucaagggacuauauaacuucgccacaugcggcgucaucggccuuauaacuuuccuccuacucugcggccgcuccugcucugccaccuacaaaggccaauacgagcuucaaacucuugaacucaacauggaaucacuaaacaugaccaugccccuauccugcaccaaaaauaacucacaccacuacauccgcgccgggaacaacacaggccuagaacucacgcucaccaacaccuccaucaucucacauaaauucugcaaccuauccgacgcccacaagaaaaaccucuaugaccacacacucauguccaucauaacaaccuuccaccucuccaucccuaacuucaaccaguacgaagccaugagcugcgacuucaacggcggcaaaauauccauccaauacaaucugucccacuccuacgccggcgacgcagcccagcacugcggcaccgucgccaacggcguccuccagaccuucaugcguauggcauggggaggcuccuaccucgccuuagacagcggacgacguggaugggacugcauaaucuccuccuaccaauacuuaauaauccaaaacaccaccugggacgaucacugccaauucucacgccccucccccaucggcuaccucggauucgucucacagaaaacccgagacaucuacaucuccagacgccuacucggaacguucaccuggacacucagcgacuccgagggccacgacaugcccggcggauacugccucacccgcuggaugcucaucgaagccgaccugaaaugcuucggcaacacagccgucgccaaaugcaacgaaaaacacgacgaagaguucugcgacauguggcgacucuucgacuucaacaaacaagcaauccaaagacucaaagccgaagcccaaaugaacauccaacuaaucaacaaggccgucaacgcccugauaaacgaccaacucaugaugaaaaaccaccucagagacaucaugggcaucccauacugcaacuacuccaaauucugguaccucaacaacaccacaaccggccgcaccucccuaccgcgcugcuggcuaaucucaaaugguuccuaccucaacgaaacccauuuuagcgacgacaucgaacaacaagccgacaacaugaucaccgaaaugcugcaaaaggaauacauggaccgccaaggaaaaacaccccucggccucguagaccucuucgucuucuccaccagcuucuaccuaaucacaaucuuccuccaucuggucaaaauaccgacucacagacacaucgucggaaaacccugccccaaaccccaccgacucaaccacauggguaucugcuccugcggccucuacaaacaacccggagucccaguucgauggaaacgcuaaggacuaguaauaaggaaacuguaugaaugucugugggcaggaagugaagagauccuucuguaaagguuuuuggaauuaugucugcugaauaauaaacuuuuuugaaauaauaaaucugguagaaaaaugagaucuaaaaaaaaaaaaaaaaaaaaaaaaaaaaaaaaaaaaaaaaaaaaaaaaaaaaaaaaaaaaaaaaugcaucccccccccccccccccccccccccccccccaaaggcucuuuucagagccaccagaauu

SEQ ID NO: 3030 - RNA, 1813 nt, Artificial Sequence
  mRNA product Design b-4 comprising derived and/or modified sequence from LASV(Pinneo-NIG-1969;Clade I)__AIT17836__GPC (opt11)
gggagagucccgcagucggcguccagcggcucugcuuguucgugugugugucguugcaggccuuauucaagcuuaccaugggccaaaucauaacuuucuuucaagaagucccacacgucaucgaagaagucaugaacauaguccucaucgcccuaucccuccuagcaauccuaaaaggccuauacaauaucgcaaccuguggcaucaucggccuugucgccuuccucuuccucugcggcaaauccuguucccuuacccuaaagggcggcuacgagcuccaaacccucgaacucaacauggaaacccucaacaugacuaugccccucuccugcaccaagaacuccucccaccacuacauccgcguuggcaaugaaaccggacucgaacugacccuaaccaacaccucaaucaucaaccacaaauuuugcaaccuuuccgacgcacacaagaaaaaccucuacgaccacgcccucaugagcaucaucucaaccuuccaccucucaauccccaacuucaaucaauacgaagccauguccugcgacuucaacggcggaaaaaucagcguccaguacaaccugucacacagcuacgccggcgacgccgccgaacacugcggaacagucgcuaacggagucuuacaaacauucaugcgcauggcauggggcggccgguacaucgcccucgacuccggcaaaggcaacugggacugcaucaugaccuccuaccaauaccucauaauccaaaacaccaccugggaagaccacugccaauucucccgcccuucccccaucggcuaccuaggccuccuaagccaacgaacccgagacaucuacaucucaagacgccuccucggcacuuucaccuggacccucuccgacucagagggaaacgaaacccccggaggcuacugccuuacccgcuggauguuaaucgaagccgaacucaaaugcuucggcaacaccgccguagccaaaugcaacgaaaaacacgacgaagaguucugcgacaugcuacgccucuucgacuucaacaaacaagccauacgccgacucaaagcagaagcccaaauguccauccaauuaaucaacaaggccgucaacgcccuaauaaacgaccagcuaauaaugaaaaaccaccuccgcgacaucauggguauccccuacugcaacuacuccaaauacugguaccuaaaccacaccucauccggccgaacaucccuccccaaaugcuggcucaucuccaacggcuccuaccucaacgaaacacaauucuccgacgacaucgaacaacaagccgacaacaugaucacugagaugcuacaaaaagaauacaucgaacgacaaggcaaaacaccccuaggacucgucgauaucuucauauucucaaccucuuucuaccucaucucuaucuuccuucaccucaucaaaauccccacucaccggcacauagucggcaaacccugccccaaaccacaccgccuaaaccacaugggugucugcuccugcggccucuacaaacaccccggcguccccacaaaauggaaacgauaaggacuaguaauaaggaaacuguaugaaugucugugggcaggaagugaagagauccuucuguaaagguuuuuggaauuaugucugcugaauaauaaacuuuuuugaaauaauaaaucugguagaaaaaugagaucuaaaaaaaaaaaaaaaaaaaaaaaaaaaaaaaaaaaaaaaaaaaaaaaaaaaaaaaaaaaaaaaaugcaucccccccccccccccccccccccccccccccaaaggcucuuuucagagccaccagaauu

SEQ ID NO: 3031 - RNA, 1813 nt, Artificial Sequence
  mRNA product Design b-4 comprising derived and/or modified sequence from LASV(ISTH0009-NIG-2011;Clade II)__AIT17404__GPC (opt11)
gggagagucccgcagucggcguccagcggcucugcuuguucgugugugugucguugcaggccuuauucaagcuuaccaugggccaaaucaucaccuuuuuccaagaagucccccacgucaucgaagaagucaugaacaucguccuaaucgcacucucccuacucgccauccucaaaggaaucuacaacguugcuacaugcggacucuucggccucgucuccuuccuccuccucugcggccgcucaugcuccaccaccuacaaaggcgucuacgaacuccaaacacucgaacucgacauggccucccuaaacaugaccaugccccucuccugcaccaaaaacaacucccaccacuacaucaugguaggcaacgaaaccggccuagaacucacccucacaaacacaucaaucaucaaccacaaauucugcaaucucuccgacgcacacaagaaaaaccucuacgaccacgcccucaugucuaucaucuccacauuccaccucucaauccccaacuucaaccaauacgaagcaauguccugcgacuucaacggaggcaaaaucucggugcaauacaaccucucgcacgccuacgcuguagacgccgccaaccacugcggcacuaucgccaacggcguccuacagaccuucaugcgcauggccuggggcggcuccuacaucgcccucgacucgggcaaaggcuccugggacugcaucaugacguccuaccaauaccucaucauccaaaacacaaccugggaagaccacugccaauucucccgacccagccccaucggguaccucggccuucuaucacaacggacccgagauauauacaucucccgcagacuacucggcacuuucaccuggacacucucagacuccgaaggcaacgaaacccccggcggcuacugccucacacguuggaugcuuauagaagccgaacucaaaugcuucggcaacaccgccgucgccaaaugcaacgaaaaacacgacgaagaauuuugcgacaugcucagacucuucgacuucaacaaacaagccauaagacgcuuaaaaacagaagcacaaaugucuauacaacucaucaacaaagccgucaaugcacuaaucaacgaccagcuaaucaugaaaaaccaccuccgcgacaucaugggcauccccuacugcaacuacuccaaauacugguacuugaaccacaccgucaccggcaaaaccucccucccgcgcugcuggcuagucagcaacggcagcuaccucaacgaaacccacuucucugacgacauagaacaacaagccgacaacaugaucaccgaacuccugcaaaaagaauacauggaccgccaaggaaagacuccccucggccucguggaccuauucgucuucucaaccucauucuaccuuaucagcaucuuccuccaccuuaucaaaauaccuacacaccgccacaucacaggcaaaccaugccccaagccccaccgauuaaaccauaugggcauaugcuccugcggccucuacaaacaccccggaguaccagucaaauggaaacgaugaggacuaguaauaaggaaacuguaugaaugucugugggcaggaagugaagagauccuucuguaaagguuuuuggaauuaugucugcugaauaauaaacuuuuuugaaauaauaaaucugguagaaaaaugagaucuaaaaaaaaaaaaaaaaaaaaaaaaaaaaaaaaaaaaaaaaaaaaaaaaaaaaaaaaaaaaaaaaugcaucccccccccccccccccccccccccccccccaaaggcucuuuucagagccaccagaauu

SEQ ID NO: 3032 - RNA, 1813 nt, Artificial Sequence
  mRNA product Design b-4 comprising derived and/or modified sequence from LASV(ISTH2010-NIG-2012;Clade II)__AIT17482__GPC (opt11)
gggagagucccgcagucggcguccagcggcucugcuuguucgugugugugucguugcaggccuuauucaagcuuaccaugggccaaaucaucaccuucuuccaagaagucccacacgucauagaagaaguaaugaacaucguccuaauugcucucucacuacucgcgauccucaaagguaucuacaacgucgcaaccugcggacuguuuggacucguaucauuccuccuccugugcggccgcagcugcucaaccacauacaaaggcguauacgaacuacaaacccucgaacucgacauggccagccucaacaugacaaugccccucagcugcaccaaaaauaacagccaccacuacaucauggucggcaacgaaaccggccuugaacucacccucacaaacaccucaaucauaaaccacaaauucugcaaccucagcgacgcccacaagaaaaaccuauacgaccaugcacuaauguccaucauaagcaccuuccaccucuccauacccaacuucaaccaguacgaggccaugucaugcgauuucaacggaggcaaaaucuccguccaauacaaccuaagccacgccuacgcagucgacgccgccaaccacugcggcaccauagcaaacggcguccuucaaaccuucaugcgaauggccuggggcggcucauacaucgcccuagacucaggcaaaggcuccugggacugcauaaugacaucauaccaauaucucaucauccaaaacauaacaugggaagaccacugccaauucucccguccaucgccaaucggauaccucggccuccuaucacaacgaacucgcgacaucuacauaucccgccgucuccuaggaacauucaccuggacacucagcgacuccgaaggaaacgaaacccccggcggcuacugccucacgcgcuggaugcugaucgaagcagaacucaaaugcuucggcaacacugccgucgccaaaugcaacgaaaaacacgacgaagaguucugcgacaugcuacgacucuucgacuucaacaaacaagccauccgucgccucaaaaccgaagcccaaaugucgauccaacucaucaacaaggcaguaaacgcccuaaucaacgaccaacucauaaugaagaaccaccuacgcgauaucaugggcauacccuacugcaacuacuccaaguacugguaccucaaccacaccgucacaggcaaaaccucccucccccgaugcuggcuagucuccaacggcucuuaucuaaacgaaacccacuucuccgacgacauagaacaacaagccgauaacaugauuaccgaacuccuacaaaaagaauacaucgaccgccaaggcaagaccccacucggacucgucgaccuauucgucuucucaaccucguucuaccucauuucuauauuccuccaccuaguaaaaauccccacacaccgccaugucgucggcaaacccugccccaaaccccaccgccuaaaccacaugggaauaugcagcugcggccucuacaaacaccccggcguacccgugaaauggaaacgauagggacuaguaauaaggaaacuguaugaaugucugugggcaggaagugaagagauccuucuguaaagguuuuuggaauuaugucugcugaauaauaaacuuuuuugaaauaauaaaucugguagaaaaaugagaucuaaaaaaaaaaaaaaaaaaaaaaaaaaaaaaaaaaaaaaaaaaaaaaaaaaaaaaaaaaaaaaaaugcaucccccccccccccccccccccccccccccccaaaggcucuuuucagagccaccagaauu

SEQ ID NO: 3033 - RNA, 1813 nt, Artificial Sequence
  mRNA product Design b-4 comprising derived and/or modified sequence from LASV(Lassa virus/H.sapiens-wt/NGA/2015/ISTH_0543;Clade II)__AVO03639__GPC (opt11)
gggagagucccgcagucggcguccagcggcucugcuuguucgugugugugucguugcaggccuuauucaagcuuaccaugggccagauuaucacauucuuccaagaagucccccacgucaucgaagaagucaugaacauaguacuaaucgcccugucacuccucgcaauccuaaaagguaucuacaacguugcuaccugcggacucuucggccucguuucauuccuccuccucuguggccgauccugcuccacaacuuauaaaggcgucuacgaacuccaaacacucgaacuugacauggccaaccucaacaugaccaugccacucucaugcaccaaaaacaacucccaccacuacauuauggucggcaacgaaaccggccucgaacuaacucucaccaacacaucaauaaucaaccacaaauucugcaaccuaagcgacgcccacaagaaaaaccuauacgaccacgcccuaauguccaucauaagcaccuuccaccucuccauuccaaacuuuaaccaauacgaagcaauguccugcgacuucaacggaggcaaaaucucaguccaauauaaccucucccacaccuacgccgucgacgcggccaaccacugugguaccaucgccaacggaguccuccaaaccuucaugcgcauggcuuggggcggaagcuacaucgcccuagacuccggcaaaggaucaugggacugcaucaugaccuccuaucaguaucucguaauacaaaacacaacuugggaagaccacugucaauucucccgcccaucgcccaucggcuaccucggccuucuaucccaacgaacaagagacaucuacaucucucgccgacuucuuggcaccuucacauggacccucucagacucagaaggcaacgaaaccccugguggcuacugccucacccgcuggauguugaucgaagccgaacuaaaaugcuucggcaacacagccguugccaaaugcaacgagaaacacgacgaagaguucugcgacaugcuccgccuauucgacuucaacaaacaagccauccgccgccucaaaaccgaagcccagauguccauccagcucaucaacaaagccguaaacgcucuaauaaacgaccaacucaucaugaaaaaccaccuacgcgacaucaugggcauccccuacugcaacuacuccaaauacugguaccuaaaccacaccgucaccgguaaaaccucucuaccacgcugcuggcucgucuccaacggaucauaccucaacgaaacccacuucucagaugacaucgaacaacaagccgacaacaugauaaccgaacuccuacagaaagaauacaucgaucgacagggcaaaacaccccucggccucgucgaccucuucguuuucucaaccuccuucuaccuaaucuccauauuccuccaccucgucaaaauccccacccaucgacacaucaccggcaaaccaugcccaaaaccccaccgacucaaccacaugggcaucugcuccugcgguuuauacaaacacccuggcguccccgucaaauggaaacgguaaggacuaguaauaaggaaacuguaugaaugucugugggcaggaagugaagagauccuucuguaaagguuuuuggaauuaugucugcugaauaauaaacuuuuuugaaauaauaaaucugguagaaaaaugagaucuaaaaaaaaaaaaaaaaaaaaaaaaaaaaaaaaaaaaaaaaaaaaaaaaaaaaaaaaaaaaaaaaugcaucccccccccccccccccccccccccccccccaaaggcucuuuucagagccaccagaauu

SEQ ID NO: 3034 - RNA, 1813 nt, Artificial Sequence
  mRNA product Design b-4 comprising derived and/or modified sequence from LASV(Lassa virus/H.sapiens-wt/NGA/2016/ISTH_0009;Clade II)__AVO03571__GPC (opt11)
gggagagucccgcagucggcguccagcggcucugcuuguucgugugugugucguugcaggccuuauucaagcuuaccaugggccaaaucaucaccuucuuccaagaagucccccacgucauugaagaaguaaugaacauaguccucaucgcccucucacuacuagcuauccuaaagggaaucuacaacgucgccaccuguggccuccucggccucguaucguuccuccuucuuuguggacgauccugcuccaccaccuacaaagguguauacgaacuccaaacccucgaguuagacauggccagccuaaacaugaccaugccccucuccugcaccaaaaauaauucccaccacuacaucauggucggcaacgaaaccggccucgaacucacacucacuaacacauccaucaucaaccacaaauucugcaacuuaucagaugcccacaagaaaaaccucuacgaccacgcacuaaugucaaucaucucaaccuuccaccucagcauccccaacuucaaccaguacgaggcaaugucuugcgacuucaacggcggacgcaucuccguccaauacaaccucucccacagcuaugccgucgacgccgccaaccacugcggcacgaucgccaacggcguccuacaaaccuucaugcgaauggccuggggcgguuccuauaucgcccucgacuccggcaaaggaagcugggacugcaucaugaccucauaccaauaccucauaauccaaaacaccacaugggaagaucacugccaauucucccguccaucccccaucggcuaccucggccuccucucacaacgcacacgcgacaucuacaucucaagacgccuacucggcaccuucacuuggacccucucagacuccgaaggcaacgaaacccccggaggcuacugccuuacccgcuggaugcuaaucgaagccgaacucaaaugcuucggcaacaccgccguagcaaaaugcaacgaaaaacacgacgaagaguucugcgacaugcuccgacuuuucgacuucaacaaacaggccauccgccgccucaaaaccgaagcacaaauguccauccaacucaucaacaaagcaguaaacgcccuuauaaacgaucaacuaaucaugaaaaaccaccuccgcgacaucaugggcauccccuacugcaacuacuccaaauacugguaccuaaaccacaccguaaccggaaaaaccagccuccccagaugcuggcuagucagcaacggaucauaccuuaacgaaacccacuucuccgaugacaucgaacaacaagccgacaacaugaucaccgaacuucuacagaaagaauacaucgaccgccaaggcaaaacgccccucggccuugucgaccucuucgucuucuccaccuccuucuaccucaucagcauauuccuacaccuugucaaaaucccaacccaccgucacaucaccggcaaacccugcccaaaaccccaccgacuaaaccacaugggcaucugcuccugcggccucuacaaccacccaggcguccccgucaaauggaaacguuagggacuaguaauaaggaaacuguaugaaugucugugggcaggaagugaagagauccuucuguaaagguuuuuggaauuaugucugcugaauaauaaacuuuuuugaaauaauaaaucugguagaaaaaugagaucuaaaaaaaaaaaaaaaaaaaaaaaaaaaaaaaaaaaaaaaaaaaaaaaaaaaaaaaaaaaaaaaaugcaucccccccccccccccccccccccccccccccaaaggcucuuuucagagccaccagaauu

SEQ ID NO: 3035 - RNA, 1813 nt, Artificial Sequence
  mRNA product Design b-4 comprising derived and/or modified sequence from LASV(Lassa virus/H.sapiens-wt/NGA/2016/ISTH_0017;Clade II)__AVO03567__GPC (opt11)
gggagagucccgcagucggcguccagcggcucugcuuguucgugugugugucguugcaggccuuauucaagcuuaccaugggccaaauaaucacauuuuuccaagaagucccccacgucaucgaagaagucaugaauaucguccuuaucgcccucagccuccuugcaauccugaaaggcaucuacaacgucgccacaugcggccucuucggccuagucuccuucuuacuccuaugcggacgcuccugcucgacaaccuacaaaggcgucuacgaacuccaaacacuggaacucgacauggccucccuuaacaugaccaugccccuauccugcaccaaaaacaacagccaccauuacauaaugguaggaaacgaaaccggccucgaacuaacacucaccaacaccuccauaauaaaucacaaauucugcaaccucucagacgcccacaagaaaaaccuuuacgaccaugcacucauguccaucauaucaaccuuccaccucuccauacccaauuucaaccaauacgaagccaugucaugcgacuucaauggcggcaaaaucuccguccaguacaaccuuucccacacuuacgccaucgacgccgccaaccacugcggcaccauagccaacggcguacuccaaacauucaugcgcauggcgugggguggcuccuacaucgcacucgacucaggcaaaggaucaugggacugcauaaugaccucauaccaauaccucaucauccaaaacacaaccugggaagaccacugccaauucagccggccaucucccaucggcuaccucggccuacuaagccaacgcacgcgcgacaucuacaucucccgccgccuucuaggcaccuucaccuggacccucucagacuccgaagggaacgaaacgcccggcggauacugccucacccgcuggaugcucaucgaagccgaacucaaaugcuucggcaacacagcagucgccaaaugcaacgaaaaacacgacgaagaguucugcgacaugcuccgccuauucgacuucaacaaacaagcaauacgccgacuuaaaaccgaagcacaaaugucaauccaacuaaucaacaaagcagucaacgcucuaauuaacgaccaacuuaucaugaaaaaccaccuccgagacaucaugggcaucccauacugcaacuacucaaaauacugguaccucaaucacaccgucacgggcaaaaccucccucccacgcugcuggcuagucuccaacggcucauaccucaacgaaacgcacuuuucagaugacaucgaacaacaagcugacaauaugaucaccgaacuccuacaaaaagaauacauggaccgccaaggaaaaacaccccucggacucgucgaucucuucguauucuccaccucauucuaccuaaucuccauauuccuccaccuaguacgaauccccacccaccgccacgucauaggcaaacccugccccaaaccccaccgccuaaaccacaugggcauaugcuccugcggccucuacaaacacccuggcguccccgucaaauggaagcgcugaggacuaguaauaaggaaacuguaugaaugucugugggcaggaagugaagagauccuucuguaaagguuuuuggaauuaugucugcugaauaauaaacuuuuuugaaauaauaaaucugguagaaaaaugagaucuaaaaaaaaaaaaaaaaaaaaaaaaaaaaaaaaaaaaaaaaaaaaaaaaaaaaaaaaaaaaaaaaugcaucccccccccccccccccccccccccccccccaaaggcucuuuucagagccaccagaauu

SEQ ID NO: 3036 - RNA, 1813 nt, Artificial Sequence
  mRNA product Design b-4 comprising derived and/or modified sequence from LASV(Lassa virus/H.sapiens-wt/NGA/2018/ISTH_0959;Clade II)__AVV65099__GPC (opt11)
gggagagucccgcagucggcguccagcggcucugcuuguucgugugugugucguugcaggccuuauucaagcuuaccaugggacaaaucaucaccuucuuccaagaagucccacacguuauagaagaagucaugaacaucguacucaucgcacuuucacuacuugccauccucaaaggaaucuauaacgugguaaccugcggccuauucggccucgucuccuuccuccuccucugcggccgcuccugcuccaccaccuacaaaggagucuacgaacuccaaacccucgagcuugacauggccucacuaaauaugacaaugccacuuucaugcacuaagaacaacucacaccacuacauaauggucggcaacgaaaccggccucgaacugacccucacaaacaccucuaucauaaaccauaaauucugcaaucucuccgacgcacacaagaagaaccucuacgaccacgcucucaugucaauaauauccaccuuccaccucuccauacccaacuucaaccaauacgaagcaauguccugcgacuucaacggcggaaaaaucuccguccaauacaaccuaucccacgccuaugccaucgacgccgccaaucacugcggaacaaucgccaauggaguccuccaaacauucaugcgcauggccuggggcggauccuacaucgcacucgacucaggcaaaggcucaugggacugcauaaugacauccuaccaauaccucaucauccaaaacaccaccugggaagaccacugccaauucucccgccccucgccaaucggcuaccucggacuccucucccagcgcacucgcgacaucuacaucucacgccgccugcuaggcacauucaccuggacccuauccgacuccgaagguaacgaaacccccggcggguauugccuaacucgcuggaugcuaauagaagccgaacuaaaaugcuucgguaacaccgccgucgccaaaugcaacgaaaaacacgacgaagaguucugcgacaugcuccgacucuucgacuucaacaaacaagccauccgccgacuaaagacagaagcacaaaugucaauccagcugaucaacaaagccgugaacgcccuaaucaacgaccaacucaucaugaaaaaccaccuccgagacaucaugggcaucccguacugcaacuacuccaaauacugguaccuuaaccacaccgucacuggaaaaaccucacucccccguugcuggcucguuuccaacggaagcuaucuaaacgaaacccacuucuccgacgacaucgaacaacaagcagacaauaugaucacugaacuccuccaaaaagaauacauagaccgccaaggcaaaaccccacucggccuagucgaccuauucgucuucucuaccuccuucuaucucaucucuaucuuccuccaccuaguuaaaauccccacacaucgacacgucaucggaaaaccaugcccaaaaccccaucgccugaaccauaugggcaucugcucauguggccuauacaaacaccccggcguccccguaaaauggaaacgcuaaggacuaguaauaaggaaacuguaugaaugucugugggcaggaagugaagagauccuucuguaaagguuuuuggaauuaugucugcugaauaauaaacuuuuuugaaauaauaaaucugguagaaaaaugagaucuaaaaaaaaaaaaaaaaaaaaaaaaaaaaaaaaaaaaaaaaaaaaaaaaaaaaaaaaaaaaaaaaugcaucccccccccccccccccccccccccccccccaaaggcucuuuucagagccaccagaauu

SEQ ID NO: 3037 - RNA, 1813 nt, Artificial Sequence
  mRNA product Design b-4 comprising derived and/or modified sequence from LASV(LASV003-NIG-2008;Clade II)__AIT17580__GPC (opt11)
gggagagucccgcagucggcguccagcggcucugcuuguucgugugugugucguugcaggccuuauucaagcuuaccaugggacaaaucauaaccuuuuuccaagaagucccgcacguaaucgaagaagucaugaacauuguccucaucgcccucucacuccuugccauuuuaaaaggcaucuacaacgucgcaaccugcggacuauucggacucgucucuuuccuccuccuaugcggccgcuccugcuccaccaccuacaaaggagucuacgagcuucaaacccucgaacucgacauggccucacucaacaugacaaugccccucagcugcacuaaaaacaacucacaccacuacauaaugguuggaaacgaaaccggccucgaacucacccuaacaaacaccuccauuaucaaccauaaauucugcaaccucuccgacgcccacaaaaagaaccucuacgaccacgcccugaugucuaucaucuccacauuccaccucucaauccccaacuucaaccaauacgaggccauguccugcgacuucaaugguggcaaaaucuccguacaauacaaccucucccacaccuacgcagucgacgccgcaaaccacugcggcaccaucgccaacggaguacuucaaaccuucaugcgaauggccuggggcggcuccuacaucgcccucgacuccggaaaaggcagcugggacugcaucaugaccucauaccaauaccuaaucauccaaaacaccaccugggaagaccacugccaauucagccgcccaucccccaucggcuaccucggccuccucucccaacgcacacgcgacaucuacaucucccgccgccuacucggcaccuucacuuggacccuaucugacagcgaauccaacgaaacuccaggaggcuacugccuaacucgcuggaugcucaucgaagcagaacucaaaugcuucggcaacacugccguagcaaaaugcaacgaaaaacacgacgaagaguucugcgacaugcuccgccuauucgacuucaacaagcaggccauccgccgccucaaagccgaagcucaaauguccauccaacuaaucaacaaagccgucaacgcccucaucaacgaccaacucaucaugaaaaaccaccuccgcgacaucaugggcauccccuacugcaacuacucuaaauacugguaccucaaccacaccguaaccggccgcacaucccucccacgcugcuggcucgucagcaacggauccuaccuaaacgaaacccacuucucagacgacauugaacaacaagcagacaacaugaucaccgaacuccuccaaaaagaauacauggaccgccaagguaaaaccccacucggccuaguggaccuauucgucuucuccaccucauucuaccugauauccaucuuccuccaccucgucaaaauccccacacaccgccacgucaucggcaaacccugccccaaaccccaccgccuaaaccacaugggaauaugcucuugcggccucuacaaacacccaggaguccccguaaaauggaaacgauaaggacuaguaauaaggaaacuguaugaaugucugugggcaggaagugaagagauccuucuguaaagguuuuuggaauuaugucugcugaauaauaaacuuuuuugaaauaauaaaucugguagaaaaaugagaucuaaaaaaaaaaaaaaaaaaaaaaaaaaaaaaaaaaaaaaaaaaaaaaaaaaaaaaaaaaaaaaaaugcaucccccccccccccccccccccccccccccccaaaggcucuuuucagagccaccagaauu

SEQ ID NO: 3038 - RNA, 1813 nt, Artificial Sequence
  mRNA product Design b-4 comprising derived and/or modified sequence from LASV(LASV035-NIG-2009;Clade II)__AIT17588__GPC (opt11)
gggagagucccgcagucggcguccagcggcucugcuuguucgugugugugucguugcaggccuuauucaagcuuaccaugggccaaaucaucaccuucuuccaggaagucccccacgucaucgaagaaguaaugaacauaguccuaaucgcccuaucccuccucgccauucuaaaaggcaucuacaacgucgcaaccugcggacucuucggacucgucuccuuccuucucuuaugcggccgaucaugcuccaccacuuauaaagggguuuacgaacuccaaacccucgaacucgacauggccucccucaacaugaccaugccccuauccugcaccaaaaacaauucacaccacuacaucaugguaggcaacgaaacaggccucgaacucacccucacaaacaccuccaucauaaaccacaaauucugcaaccugucagacgcacacaagaaaaaccuauaugaccacgcacucauguccaucaucuccaccuuccaccucagcaucccaaacuucaaccaauacgaagccaugucaugcgacuucaacggcggcaaaaucuccguacaauacaaccucucccacgccuacgccgucgacgcagcaaaccacugcggaaccaucgccaauggcguccuacaaacauucaugcguauggccuggggcgguuccuacauagcacucgacuccggaaaaggauccugggacugcaucaugaccuccuaccaauaucucaucauccaaaacaccaccugggaagaccacugccaauucucacgcccuucucccauaggcuaccucggccuacuaucgcaacgaacacgcgacaucuacauuucccgacgacuacucggcaccuucacauggacccuuucagauucugaaggcaacgaaaccccaggcggauacugccuaacccgcuggaugcuaaucgaagccgaacuuaaaugcuucggcaauacagccguagccaaaugcaacgaaaaacacgacgaagaguucugcgacaugcuccgccucuucgacuucaacaaacaagcaauccgccgccucaaagccgaagcccaaauguccauccaacucaucaacaaagccgucaacgcccucaucaacgaccaacuuauaaugaaaaaucaccuccgcgacaucaugggaauaccauacuguaacuacuccaaauacugguaccucaaccacacagucaccggcaaaacaucacucccucgcugcugguuagucuccaauggauccuaccucaacgaaacccacuucuccgacgacaucgaacaacaagcagacaacaugaucaccgaacuccugcaaaaagaauacaucgaccgccaaggcaaaacaccacucggccuugucgaccuauucguauucucaaccuccuucuaccugaucuccaucuuccuccaccucguaaaaauaccaacccaccgccacgucauagggaaacccugccccaaaccccaccgccugaaccacaugggaauaugcucaugcggccucuacaaacacccgggcguacccgucaaguggaaacgcuaaggacuaguaauaaggaaacuguaugaaugucugugggcaggaagugaagagauccuucuguaaagguuuuuggaauuaugucugcugaauaauaaacuuuuuugaaauaauaaaucugguagaaaaaugagaucuaaaaaaaaaaaaaaaaaaaaaaaaaaaaaaaaaaaaaaaaaaaaaaaaaaaaaaaaaaaaaaaaugcaucccccccccccccccccccccccccccccccaaaggcucuuuucagagccaccagaauu

SEQ ID NO: 3039 - RNA, 1813 nt, Artificial Sequence
  mRNA product Design b-4 comprising derived and/or modified sequence from LASV(LASV1000-NIG-2009;Clade II)__AIT17782__GPC (opt11)
gggagagucccgcagucggcguccagcggcucugcuuguucgugugugugucguugcaggccuuauucaagcuuaccaugggacaaaucaucaccuucuuccaagaggucccccacgucauagaagaagucaugaacaucguccucaucgcacucucccuccucgccauccugaaaggcauauacaacgucgcgaccugcggccucuucggccucgucucuuuccuccuccucugcggcagaucgugcuccaccaccuacaaaggcgucuacgaacugcaaacccucgagcucgacauggccucccucaacaugacuaugccccuguccuguaccaaaaacaacucccaccauuauaucauggucggcaaugaaaccggacucgaacucacccucacuaacaccucaauaaucaaccacaaauucugcaaccucucagacgcccacaaaaagaaccucuacgaccacgcacuaauguccauaauaucaaccuuccaccucucaauccccaacuucaaccaauacgaggcgauguccugcgacuuuaacggcgggaaaaucuccguccaauacaaccuuucucacaccuacgccgucgacgcagccaaccacugcggcacaaucgccaacggcguccuccaaacauucaugcgaauggccuggggcggcuccuacauugcccucgacuccggcaaaggcuccugggacugcaucaugaccuccuaccaguaccucauaauucaaaacacaacuugggaagaccacugccaauuuucccgcccguccccaauuggauaccucggccuccuuagccaaaggacccgcgacaucuauauuucccgacgccuccucggcacauucaccuggacacuauccgacuccgaaggcaacgaaacccccggcggauacugccuaacccgcuggaugcucaucgaagccgaacucaaaugcuucggaaacaccgccgucgcuaaaugcaacgaaaaacacgacgaggaguucugcgacaugcuccgccuauucgacuucaacaagcaagcuaucaaacggcucaaaaccgaagcgcaaauguccauccaacucaucaacaaagcaguaaacgcccucaucaacgaccaacuaaucaugaagaaccaccuacgcgacaucaugggaauccccuacugcaacuacuccaaauauugguaccuaaaccacaccgucacaggcaaaaccucccuaccccgaugcuggcuaguuagcaacggcucauaccuaaaugaaacccacuucucagacgacaucgaacaacaggcggacaacaugaucaccgaacuccuccaaaaggaauacaucgacaggcaaggaaaaacgccccugggccuagucgaccuauucgucuucuccaccucauucuaccuaauaagcaucuuccuccaccucgucaaaauccccacccaccgacacgucgucggaaaacccugcccaaaaccccaccgacucaaccacauggguaucugcuccugcggccuauacaaacaucccggcguccccguaaaauggaaacgcuaaggacuaguaauaaggaaacuguaugaaugucugugggcaggaagugaagagauccuucuguaaagguuuuuggaauuaugucugcugaauaauaaacuuuuuugaaauaauaaaucugguagaaaaaugagaucuaaaaaaaaaaaaaaaaaaaaaaaaaaaaaaaaaaaaaaaaaaaaaaaaaaaaaaaaaaaaaaaaugcaucccccccccccccccccccccccccccccccaaaggcucuuuucagagccaccagaauu

SEQ ID NO: 3040 - RNA, 1813 nt, Artificial Sequence
  mRNA product Design b-4 comprising derived and/or modified sequence from LASV(LASV221-NIG-2010;Clade II)__AIT17624__GPC (opt11)
gggagagucccgcagucggcguccagcggcucugcuuguucgugugugugucguugcaggccuuauucaagcuuaccaugggacaaaucaucaccuucuuccaggaaguaccacacguaauagaagaagucaugaacaucguucuaaucgcccucucacuacucgcaauacucaaaggcauauacaacgucgcaaccugcggccucuucggccucgucuccuuccuacuccuuugcggccgcuccugcuccacaaccuacaaaggcgucuacgaacuccaaacucucgaacuagacauggcuucccucaacaugaccaugccccuuucuugcaccaaaaacaacucccaccacuacaucauggucggcaacgaaaccggccuagaacucacccuaacaaacaccuccaucaucaaccacaaauucugcaaccucucagaugcccacaaaaagaaccucuacgaucacgccuuaaugaguaucaucuccaccuuccaccuaucaauacccaacuucaaccaguacgaagcaauguccugcgacuucaacggcggaaaaaucucgguccaauacaaccucucccacaccuacgccaucgacgccgcaaaccacugcggcaccaucgccaacggcguucuccaaacauucaugcgcauggccuggggcggcuccuacaucgcccucgacuccggaaaaggaagcugggacugcaucaugaccagcuaccaguaccuaaucauacaaaacaccaccugggaagaucacugccaauuuucucgccccucccccaucggcuaccucggccuacucucccaacgcacucgcgacaucuacaucagcagacgccuccuuggcaccuucaccuggacccuauccgacuccgaagguaacgaaacucccggcggcuacugccucacacgcuggaugcuuaucgaagccgaacucaaaugcuucggaaacacagccguagccaaaugcaacgaaaaacacgacgaagaauuuugcgacaugcuccgccuauucgacuucaacaagcaagccauccgccgcuuaaaaaccgaagcccaaaugucaauccaacucaucaacaaagccgucaacgcccucauaaacgaccaacucaucaugaaaaaccaccuccgugacaucaugggcauccccuacugcaacuacuccaaauacugguaccucaaccacacugucacgggaaaaacaagccuuccccgaugcuggcuagucuccaauggcucuuaccucaacgaaacacacuucucugacgacaucgaacaacaagccgacaacaugaucaccgaaaugcuacaaaaggaauacauggaccgacagggcaaaacaccccucggccucgucgaccucuucguguucucaaccuccuucuaccugaucuccaucuuccuucaccucguaaaaauccccacccacagacacguaaucggaaagccaugcccaaaaccccaccgccuaaaccacaugggaauuugcucaugcggccucuacaaacaccccggcgucccagucaaauggaaacgcuaaggacuaguaauaaggaaacuguaugaaugucugugggcaggaagugaagagauccuucuguaaagguuuuuggaauuaugucugcugaauaauaaacuuuuuugaaauaauaaaucugguagaaaaaugagaucuaaaaaaaaaaaaaaaaaaaaaaaaaaaaaaaaaaaaaaaaaaaaaaaaaaaaaaaaaaaaaaaaugcaucccccccccccccccccccccccccccccccaaaggcucuuuucagagccaccagaauu

SEQ ID NO: 3041 - RNA, 1813 nt, Artificial Sequence
  mRNA product Design b-4 comprising derived and/or modified sequence from LASV(LASV237-NIG-2010;Clade II)__AIT17638__GPC (opt11)
gggagagucccgcagucggcguccagcggcucugcuuguucgugugugugucguugcaggccuuauucaagcuuaccaugggccagaucaucaccuucuuccaagaaguaccccacgucaucgaagaagucaugaacauaguccugaucgcacucucacuccuagccauacucaagggaaucuauaacguagccacaugcggacuauucggucucguaucauuccuacuacucugcggccguuccugcucgaccaccuauaaaggcgucuacgaacuccagacacucgaacucgacauggcaucccucaacaugaccaugccccuaucuugcaccaaaaacaacucccaccacuacaucauggucggaaacgaaaccggacucgaacucacacucaccaacaccucuauaaucaaccacaaauucugcaaccuaucagacgcucacaaaaaagaccucuacgaccacgcacucaugucaaucaucucaaccuuccaccucuccaucccaaacuucaaccaguacgaagccaugucuugcgacuucaauggaggaaaaaucucgguucaguacaaucucagccacaccuacgccgucgacgccgccaaccauugcggaaccaucgcaaacggcguccuacaaaccuucaugcgcauggccuggggcggcuccuacaucgcccucgacuccggcaaaggcuccugggacugcaucaugacuagcuaccaauaucuuaucauacaaaacacaaccugggaagaccacugccaauucucucgacccucaccaaucggcuaccucggacuacucucccagcggacacgcgacaucuacaucagccgccgacuccuaggcacauucaccuggacccuaagcgacagcgaaggcaacgaaacacccggaggcuacugccucacccgcuggaugcucaucgaagccgaacucaaaugcuucggaaacacagcagucgcaaaaugcaacgaaaaacacgacgaagaauucugcgacaugcuccgccucuucgacuucaacaaacaagccauucgcagacucaaaacggaagcccagaugucaauacaacuaauaaacaaagccgucaacgcccuaaucaacgaccaacucaucaugaaaaaccaccuccgcgacaucaugggcauccccuacugcaacuacagcaaauacugguaccucaaccacacagucaccggcaaaaccucacucccacgcuguuggcucgucuccaacgggucauaccucaacgaaacccacuucuccgacgacauugaacaacaagccgacaacaugauaaccgaacuccuccaaaaagaauacauggacagacaaggcaaaacuccccuaggccuagucgaccucuucgucuucagcaccucguucuaccucaucucaauauuccuccaccuaaucaaaauccccacccaccgacacauaaccggcaaacccugucccaaaccacaccgccucaaccacaugggaauaugcucauguggccucuacaaacaccccggcguccccgucaaguggaaacguuaaggacuaguaauaaggaaacuguaugaaugucugugggcaggaagugaagagauccuucuguaaagguuuuuggaauuaugucugcugaauaauaaacuuuuuugaaauaauaaaucugguagaaaaaugagaucuaaaaaaaaaaaaaaaaaaaaaaaaaaaaaaaaaaaaaaaaaaaaaaaaaaaaaaaaaaaaaaaaugcaucccccccccccccccccccccccccccccccaaaggcucuuuucagagccaccagaauu

SEQ ID NO: 3042 - RNA, 1813 nt, Artificial Sequence
  mRNA product Design b-4 comprising derived and/or modified sequence from LASV(LASV253-NIG-2011;Clade II)__AIT17670__GPC (opt11)
gggagagucccgcagucggcguccagcggcucugcuuguucgugugugugucguugcaggccuuauucaagcuuaccaugggacaaaucaucacauucuuucaagaagucccccacgucaucgaagaaguaaugaacauaguccucaucgcacucagccuccucgcaauacucaaagguaucuacaacguggccacuugcggucucuuuggccuagucucauuccuucuucucugcgggcguucaugcuccaccacauacaaaggcgucuacgaacuccaaacccuagaacucgacauggccucccucaacaugaccaugccccucuccugcaccaaaaauaacucccaccacuacaucauggucggcaacgaaaccggccucgaacuaacccucaccaacaccuccaucaucaaccacaaauucugcaaccucuccgacgcacacaagaaaaaccuauacgaccacgcacuaaugucaaucaucucaaccuuccaccucuccauccccaacuucaaccaguacgaagccauguccugcgacuucaauggcggcaaaaucuccguccaauacaaccucucccacaccuacgccgucgacgccgccaaccacugcggcacgauagccaauggaguccuacaaaccuucaugcgcauggccuggggcggcucauauauagcccuagacuccggcaaaggcuccugggacugcaucaugacauccuaccaauaccucaucauucaaaacaccaccugggaagaccauugccaauucucccgacccagccccaucggauaccuaggacuccuaagccagcgcacccgcgacaucuacaucucccgacgccuccuaggaaccuucaccuggacacuauccgacuccgaaggaaacgaaaccccaggcggauacugucucacccgcuggaugcucauagaagccgaacucaaaugcuucggaaauaccgccgucgccaaauguaacgaaaaacaugacgaagaauuuugcgacaugcuccgccucuucgacuucaacaaacaagccauacgccgccucaaggccgaagcccagaugucaauccaacucaucaacaaagccgucaacgcccuaauaaacgaucaacuuaucaugaagaaccaccuacgagacaucaugggaauacccuacugcaacuacuccaaauauugguaucuaaaccauacagucacaggccgcaccucacuaccccgcugcuggcucguauccaacgguucauaccucaacgaaacccacuucagcgacgacaucgaacaacaagcagacaacaugaucaccgaacuucuccaaaaagaauacauagaccgacaaggcaaaacaccccucggccucgucgaccucuucgucuuuuccaccuccuucuaccucaucucaaucuuccugcaccuggucaagaucccaacccaccgacacaucaucggcaaacccugccccaaaccccaccgccucaaccacaugggcaucugcuccugcggccucuacaagcaccccggcguccccguaaaauggaaacgcuaaggacuaguaauaaggaaacuguaugaaugucugugggcaggaagugaagagauccuucuguaaagguuuuuggaauuaugucugcugaauaauaaacuuuuuugaaauaauaaaucugguagaaaaaugagaucuaaaaaaaaaaaaaaaaaaaaaaaaaaaaaaaaaaaaaaaaaaaaaaaaaaaaaaaaaaaaaaaaugcaucccccccccccccccccccccccccccccccaaaggcucuuuucagagccaccagaauu

SEQ ID NO: 3043 - RNA, 1813 nt, Artificial Sequence
  mRNA product Design b-4 comprising derived and/or modified sequence from LASV(LASV254-NIG-2011;Clade II)__AIT17674__GPC (opt11)
gggagagucccgcagucggcguccagcggcucugcuuguucgugugugugucguugcaggccuuauucaagcuuaccaugggccaaauaaucaccuucuuucaagaagucccccauguaaucgaggaagucaugaacaucguacuaaucgcucucucccugcuagccauccuaaaaggcauauacaacgucgccacaugcggacucuucggacucguaucauuccuacuccuuugcggccgcuccugcucaaccaccuacaaaggcgucuacgaacuacaaacccuugagcucgacaugacaaaccucaacaugaccaugccccuaagcugcacuaaaaacaacucccaccacuacaucauggucggcaacgaaaccggacuggaacuuacccucacaaacacauccaucaucaaccacaaauucugcaaccuauccgacgcacacaagaaaaaucuuuacaaccaugcccucauguccaucaucuccacauuccaccuauccauccccaacuucaaccaauacgaggccaugucaugugacuucaacggcggcaaaaucuccguucaauacaaccuuucccacucauacgccguagacgccgccaaccacugcggcaccaucgcuaauggaguccuccaaacauucaugagaauggccuggggcggcuccuacaucgcccuagacuccggcaaaggcaacugggauugcaucaugaccucauaccaauaccucaucauccagaacacaaccugggaggaccacugccaauucucacgccccucucccaucggauaccucggccuacuaagccaacgcacccgggacaucuacaucucacgacgccuacuaggcaccuucaccuggacccucuccgacuccgaaggaaacgaaacacccggcggcuacugccuaacacgcuggaugcucaucgaagcagaacuaaaaugcuuugggaacaccgcaguagccaaauguaacgagaaacacgacgaagaguucugcgacaugcuacgccuguucgauuucaacaaacaggccauccgacgacucaaaaccgaagcacaagccaacauacaacucaucaacaaggccguuaacgcacuuaucaacgaccaacucaucaugaaaaaccaccuucgcgacaucaugggcauccccuacugcaacuacuccaaauacugguaccuaaaccacaccgucacaggaaaaaccucccucccccgcuguuggcuugucuccaacggcucauaucucaacgaaacccacuucuccgacgacaucgaacaacaagccgacaacaugaucacagaacuacuccagaaggaauacauggaccgacaaggcaaaaccccacucggacucgucgaccuauucgucuucucaaccuccuucuaccucauuagcaucuuccuacaucucguaaaaauccccacccaccgccacgucaucggcaaacccugccccaaaccccaucgccucaaccacaugggaaucugcagcugcggccucuacaaacaccccggcguucccgucaaauggaaacgcugaggacuaguaauaaggaaacuguaugaaugucugugggcaggaagugaagagauccuucuguaaagguuuuuggaauuaugucugcugaauaauaaacuuuuuugaaauaauaaaucugguagaaaaaugagaucuaaaaaaaaaaaaaaaaaaaaaaaaaaaaaaaaaaaaaaaaaaaaaaaaaaaaaaaaaaaaaaaaugcaucccccccccccccccccccccccccccccccaaaggcucuuuucagagccaccagaauu

SEQ ID NO: 3044 - RNA, 1813 nt, Artificial Sequence
  mRNA product Design b-4 comprising derived and/or modified sequence from LASV(Nig08-A19;Clade III)__ADU56618__GPC (opt11)
gggagagucccgcagucggcguccagcggcucugcuuguucgugugugugucguugcaggccuuauucaagcuuaccaugggccaaaucgugaccuucuuccaagaaguaccucacgucaucgaagaaguaaugaacauaguccucaucgcccucaguauccucgccauccuaaaaggccuauacaacaucgcuaccugcggccucaucggccucguuaccuuccuccuccugagcgggcgcucaugcuccaugaccuacaaaggcgucuacgaacuccaaacccucgaacuaaacaugaacacacuaaacaugaccaugccccucucgugcaccaagaacaacucccaccacuacauaauggucggaaacgaaacaggccuagaacugacccuuaccaacacaucccuccuccaccacaaauucuguaaccucucagacgcccacaagaaaaaccucuacgaccauacacugaugucaaucauauccaccuuccaccucagcauacccaacuucaaccaauacgaagccaugucaugcgacuucaacggcggcaaaauaaccguccaauacaaccucucacacucauacgccauagacgccgccaaccacugugggaccguagcuaacggaguccuccaaacauucaugcgcauggccuggggaggcucauacauagcccuagacucuggccgcggaaaaugggacugcauaaugacaucauaccaauaccucaucauccaaaacaccaccugggaagaccacugccaauucucacgacccucacccaucggcuaccucggacuccuaucccagcgcaccagagacaucuacauaucccgccgacuccuaggcacauucaccuggacacuaucagacuccgaaggcaacgaaacccccggcggguacugccuaacccgcuggaugcuaaucgaagcagaacucaaaugcuucggcaacaccgccguggccaaaugcaacgaaaaacacgacgaagaguucugcgacaugcuccgacucuucgacuucaacaaacaagcaauccgccgacucaaagccgaagcccaaaugucaauacaacuaaucaacaaagccgucaacgcacuaaucaacgaccaacucaucaugaaaaaccaccuccgugacaucaugggaauccccuacugcaacuauucaaaauauugguaccuaaaccacaccuccaccggacgcaccuccuuaccccgcugcuggcuagucucaaaugguucauaccucaacgaaacccacuucuccgaugacaucgaacaacaagccgacaacaugaucaccgaaaugcugcaaaaagaauaccuugaccgacaaggcaaaacaccccucggacucgucgaccucuucgucuuuucaaccuccuuuuaccucaucucgaucuuucuacaccucgucaaaauccccacccacagacacaucgucggcaagcccugccccaaaccccaccggcuuaaucacaugggaaucugcuccugcggccuuuacaagcaaccaggaguccccguaagauggaaacgauaaggacuaguaauaaggaaacuguaugaaugucugugggcaggaagugaagagauccuucuguaaagguuuuuggaauuaugucugcugaauaauaaacuuuuuugaaauaauaaaucugguagaaaaaugagaucuaaaaaaaaaaaaaaaaaaaaaaaaaaaaaaaaaaaaaaaaaaaaaaaaaaaaaaaaaaaaaaaaugcaucccccccccccccccccccccccccccccccaaaggcucuuuucagagccaccagaauu

SEQ ID NO: 3045 - RNA, 1816 nt, Artificial Sequence
  mRNA product Design b-4 comprising derived and/or modified sequence from LASV(G1180-SLE-2010;Clade IV)__AIT17168__GPC (opt11)
gggagagucccgcagucggcguccagcggcucugcuuguucgugugugugucguugcaggccuuauucaagcuuaccaugggccaaaucguaaccuucuuccaagaagucccccacgucauagaggaggucaugaacaucguccucauagcccucuccauccucgcaguucucaaaggacucuacaacuucgcaaccugcggccuagucggacuccucaccuuucuucuccucugcggccgcuccugcaccgccucccgcuacaaaggugucuacgaacuccaaacacucgaacucaacauggaaacacuaaacaugaccaugccccuauccugcaccaaaaacaauucccaccacuacaucauggugggcaacgaaaccggccucgagcucacgcuaacaaacaccuccaucaucaaccauaaauucugcaaccucuccgacgcucacaagaaaaaccucuacgaccaugcccucaugucaaucaucuccaccuuccaucuauccauccccaacuucaaccaauaugaagccauguccugcgacuucaacggaggcaaaaucuccguacaauacaaccucucccacuccuacgccggagacgccgccaaucacugcggcaccgucgccaacggcguccugcaaacauucaugcguauggccuggggcggcucauacaucgcccucgacuccggccacggcuccugggacugcauaaugacaagcuaccaauaccucaucauacaaaacacaaccugggaagaccacugccaauucagccgaccaucaccaaucgguuaccucggccugcuaucccaacgaacacgcgacaucuacauaucccgacgacugcucggaaccuucaccuggacccugagcgacucugaaggcaaagacacacccggcggcuacugccuaacccgcuggaugcuaaucgaagccgaacucaaaugcuucggaaacacagccguagccaaaugcaacgaaaaacacgacgaagaguucugcgacaugcuccgccuauucgacuucaacaaacaagccauucaacgacuaaaagccgaagcacaaauguccauacaacuaauaaacaaagccgucaacgcccuuaucaacgaccaacucaucaugaaaaaccaccuaagagacauaaugggcauccccuacugcaacuacagcaaauacugguaccucaaccacacgacaacaggaaaaaccucuuuacccaagugcuggcuaguaagcaacgguucauaccucaacgaaacccacuucuccgacgacaucgaacaacaagccgacaacaugaucaccgagaugcuacaaaaagaauacauggaacgacaaggcaaaacaccccucggacucgucgaccucuucgucuucuccaccuccuucuaccuaaucucaaucuuccuacaccuagucaaaauacccacccaccgccacaucgucggaaaauccugcccaaaaccccaucgacucaaccacaugggcaucugcuccuguggccuauacaaacagcccggagucccagucaaguggaaacgauaaggacuaguaauaaggaaacuguaugaaugucugugggcaggaagugaagagauccuucuguaaagguuuuuggaauuaugucugcugaauaauaaacuuuuuugaaauaauaaaucugguagaaaaaugagaucuaaaaaaaaaaaaaaaaaaaaaaaaaaaaaaaaaaaaaaaaaaaaaaaaaaaaaaaaaaaaaaaaugcaucccccccccccccccccccccccccccccccaaaggcucuuuucagagccaccagaauu

SEQ ID NO: 3046 - RNA, 1816 nt, Artificial Sequence
  mRNA product Design b-4 comprising derived and/or modified sequence from LASV(G1442-SLE-2011;Clade IV)__AIT17180__GPC (opt11)
gggagagucccgcagucggcguccagcggcucugcuuguucgugugugugucguugcaggccuuauucaagcuuaccaugggccaaauugucaccuucuuccaagagguaccccacgucaucgaagagguaaugaacaucguccucaucgcccuauccauccucgcuguccuuaaaggccucuacaacguagcaacuugcggccuaauaggucuggucaccuuccuccuccucugcggccgcucuugcacaaccacccucuacaaaggagucuacgagcuccaaacgcuagaacuaaacauggaaacccucaacaugaccaugccacuauccugcaccaaaaauaacucacaccacuacauccgcguaggaaacgaaacuggacucgagcugacacucaccaacaccagcaucauuaaccacaaauucugcaaccucuccgacgcccacaagaaaaaccucuacgaccacgccuuaauguccaucaucuccaccuuccacuuauccauaccaaacuucaaccaguacgaagcaaugucaugcgacuucaacggcggcaaaauauccguccaauacaaccuaucccacuccuacgccggcgacgccgccaaccacugcgguaccgucgccaacggcgugcuccaaacauucaugcggauggcauggggcggcucguacaucgcacucgacuccggacgaggcaacugggacugcaucaugaccuccuaccaauaccuaauaauacaaaacaccaccugggacgaccacugccaauucucacgcccauccccaaucggcuaccuaggacuacucucccaacgcacccgcgacguauacauaucccgccgccuccuggggaccuucaccuggacacucagcgacuccgaaggcaaagauacccccggcggauacugccucacccgcuggaugcucaucgaagccgaacuaaaauguuucggcaacaccgccgucgcaaaauguaacgaaaaacacgacgaagaguucugcgacaugcuccgccuauucgacuucaacaaacaagccauccaacgccuuaaagcagaagcccagauguccauccaacucaucaacaaagcaguaaacgcccuaaucaacgaccaacucaucaugaaaaaccaccuccgugacaucaugggcauaccuuacuguaauuacuccaaguacugguaccucaacaacacagccaccggcaaaaccucccucccaaaaugcuggcucaucuccaacggcucuuaccucaacgaaacccacuucuccgacgacaucgaacaagaagccgacaacaugauaaccgaaaugcuacaaaaagaguacauggaaagacaaggcaaaacaccccuaggccuagucgaccucuucgucuucucuaccucauucuaccucauauccaucuuccuccacuuagucaaaaucccgacccaucgccauauagucggcaaauccugccccaaaccacaccgccuuaaccacaugggcauaugcagcugcggacucuacaaacagcccggcguccccguccgauggaaacgauaaggacuaguaauaaggaaacuguaugaaugucugugggcaggaagugaagagauccuucuguaaagguuuuuggaauuaugucugcugaauaauaaacuuuuuugaaauaauaaaucugguagaaaaaugagaucuaaaaaaaaaaaaaaaaaaaaaaaaaaaaaaaaaaaaaaaaaaaaaaaaaaaaaaaaaaaaaaaaugcaucccccccccccccccccccccccccccccccaaaggcucuuuucagagccaccagaauu

SEQ ID NO: 3047 - RNA, 1816 nt, Artificial Sequence
  mRNA product Design b-4 comprising derived and/or modified sequence from LASV(G3010-SLE-2013;Clade IV)__AIT17344__GPC (opt11)
gggagagucccgcagucggcguccagcggcucugcuuguucgugugugugucguugcaggccuuauucaagcuuaccaugggccaaaucguaaccuuuuuccaagaagucccccauguaaucgaagaagucaugaauaucguccugaucgcccuaucaauccucgccguccucaagggccucuacaacuucgcaaccugcggccucguagggcuaguaaccuuccuccuccucugcggccgcucaugcaccaccucacucuacaaaggcgucuacgaacuacaaacccuagagcuuaacauggaaacccucaacaugaccaugccccuaagcugcaccaaaaacaacucacaccacuacaucauggucggcaacgaaaccggccucgaacucacacucaccaacacaucuaucaucaaccacaaauucugcaaccucuccgacgcacacaaaaagaaccucuacaaccacgcacuaauguccauaaucucaaccuuucaccucuccauccccaacuucaaccaauacgaagcaauguccugugacuuuaacggcggaaagaucucaguacaauacaaccucucccacagcuacgccggcgacgccgccucacacugcggcacgguagccaacggcguccugcaaacguucaugcgcauggccuggggcgguagcuacaucgcccucgacuccggcuacggaaaaugggacugcaucaugaccuccuaccaauaccucaucauccaaaacaccaccugggaagaccacugccaauucucccgccccucccccaucggcuaccucgggcuccuuucccaaagaacccgcgacaucuacaucucccgccgacuccuaggcaccuucacauggacccuaucugacuccgaaggaaaggacaccccagggggauacugccucacccgcuggaugcucauagaagcagaacucaaauguuucggcaacaccgccgucgcaaaaugcaacgaaaaacacgacgaagaguucugcgacaugcucagacucuucgacuucaacaaacaagccauacaacgccucaaaacagaagcccaaauguccauacagcucauuaacaaagccgucaacgcacucaucaacgaucaacuaaucaugaaaaaccaccuccgcgacauuaugggcauccccuacugcaacuacuccaaauacugguaccucaaccacaccacaacgggcaaaacuucacucccaaagugcuggcuuguauccaacggcuccuaccucaacgaaacccacuucagcgacgacaucgaacaacaggccgacaacaugaucacagagaugcugcagaaagaguacauggaacgccaaggcaaaacaccccucggccuggucgaccuuuucguauucagcaccuccuucuauuuaaucuccaucuuccuccaccucgucaaaaucccaacccacagacacaucgucggaaaaucaugccccaaaccccaccgacucaaccacaugggcaucugcuccugcggccucuacaagcaaccgggaguccccguacgauggaaaagaugaggacuaguaauaaggaaacuguaugaaugucugugggcaggaagugaagagauccuucuguaaagguuuuuggaauuaugucugcugaauaauaaacuuuuuugaaauaauaaaucugguagaaaaaugagaucuaaaaaaaaaaaaaaaaaaaaaaaaaaaaaaaaaaaaaaaaaaaaaaaaaaaaaaaaaaaaaaaaugcaucccccccccccccccccccccccccccccccaaaggcucuuuucagagccaccagaauu

SEQ ID NO: 3048 - RNA, 1816 nt, Artificial Sequence
  mRNA product Design b-4 comprising derived and/or modified sequence from LASV(G502-SLE-2009;Clade IV)__AIT17126__GPC (opt11)
gggagagucccgcagucggcguccagcggcucugcuuguucgugugugugucguugcaggccuuauucaagcuuaccaugggacaaaucguuacguucuuccaagaaguaccacacgucaucgaagaaguaaugaacauaguacucaucgcccuauccauccucgccguacuaaaaggccucuacaacuucgcaaccugcggacucgucggccuacucaccuuccugcuccuaugcggucgcuccugcacaacgggacucuauaaaggcgucuacgaacuccaaacacucgaacuuaacauggaaacccuaaacaugaccaugccacucucaugcaccaaaaacaacucccaccacuacaucaugguaggcaacgaaacaggacucgaacugacccucacaaacacguccaucauaaaucacaaauucugcaaccucucagacgcccacaagaaaaaccuauaugaccacgcacuaaugagcaucauaagcacauuccaccucucaauacccaacuucaaccaauacgaagccaugucgugcgacuucaacggcggaaaaauuuccguccaauacaaccuuucccacucauacgccggcgaugcagccgaccacugcggcaccgucgccaacggaguacuccaaaccuucaugcgcauggccuggggcggcagcuacaucgcucucgacagcggacgaggucguugggacugcaucaugacaucuuaccaauaccucaucauccaaaacacaacuugggaagaccacugccaguucucccgcccuucacccaucggauaccucggccuccucucacaacgcacucgagacaucuacaucucccgacgccuacucggaaccuucaccuggacccucucagacuccgaaggaaaagacacccccggcggauacugccucacacgcuggaugcuaaucgaagcagaacucaaaugcuucggcaacacagccguagcaaaaugcaacgaaaaacacgacgaagaguucugcgauauguuacgacucuucgacuuuaacaaacaagccauccaacgacuuaaagccgaagcucaaauguccauacaacuaaucaacaaagccguaaacgcccuaaucaacgaccaacucguaaugaaaaaccaccuccgagacauaaugggaauaccauacugcaacuacucccgcuacugguaccuuaaccauaccaccaccggccgcaccagccuacccaaaugcuggcucguaagcaacggcucauaccucaacgaaacucacuucuccgaugacaucgaacaacaagccgauaacaugauuaccgaaaugcuacaaaaagaauacauggaacgccaaggcaaaacaccucuaggccuagucgaccuauucgucuucucaaccucuuucuaccucaucuccauauuccuccaccuaguaaaaauccccacccaccgccacauagucggcaaguccugccccaaaccccaccgccucaaccacauggguauuugcuccugcgggcuuuacaaacaaccaggcgucccaguaaaauggaaacgcuaaggacuaguaauaaggaaacuguaugaaugucugugggcaggaagugaagagauccuucuguaaagguuuuuggaauuaugucugcugaauaauaaacuuuuuugaaauaauaaaucugguagaaaaaugagaucuaaaaaaaaaaaaaaaaaaaaaaaaaaaaaaaaaaaaaaaaaaaaaaaaaaaaaaaaaaaaaaaaugcaucccccccccccccccccccccccccccccccaaaggcucuuuucagagccaccagaauu

SEQ ID NO: 3049 - RNA, 1816 nt, Artificial Sequence
  mRNA product Design b-4 comprising derived and/or modified sequence from LASV(G733-SLE-2010;Clade IV)__AIT17154__GPC (opt11)
gggagagucccgcagucggcguccagcggcucugcuuguucgugugugugucguugcaggccuuauucaagcuuaccaugggccaaaucgucaccuucuuccaggaagucccccacgucaucgaagaagucaugaacauaguccucauagcccugucaauccucgccguccucaaaggacucuacaacuucgccacuugcggaauagucggccuagucuccuuucuacuucucugcggacgcucaugcacaaccagccuguacaaaggcguauacgaacuccaaacacuugaacugaacauggaaacccucaacaugaccaugccccucuccugcaccaaaaacaacucccaccacuacauaauggucggcaacgaaacaggccuagaacucacccucacaaacaccuccaucaucaaucacaaauucugcaaccuaucagacgcccauaagaaaaaccucuacgaccaugcccucaugagcaucaucucaacauuccaccucuccauccccaacuucaaccaauacgaagccauguccugcgauuucaacgguggcaaaaucagcguacaguacaaccuaucucacucauacgccggcgacgccgccaaccacugcggcaccauagccaacggcguacugcaaacauucaugcgcauggccuggggcggcuccuacaucgcgcucgauucaggccgcgaccgcugggacugcauaaugaccucauaccaguaccuaaucauccaaaacacaaccugggaagaccacugccaauucucccgacccucucccauaggcuaccucggccuucucucccaacgaacccgagacaucuacaucagccgccgacuucucggcaccuucaccuggacccucagcgacuccgaaggcaaagacaccccuggcggcuacugccucacacgguggaugcuaaucgaggccgaacuaaaaugcuucggaaacaccgcaguugccaaaugcaacgaaaaacacgacgaagaguucugugauaugcuccgccucuucgacuucaacaaacaagcuauacaacgccucaaagccgaagcacaaauguccauccaacuaaucaacaaagccgucaaugcccugaucaacgaccaacugaucaugaaaaaccaccuccgggacauaaugggcauccccuacugcaacuacucgaaguacugguaucuuaaccacaccaccaccggaaaaacaagccuccccaaaugcuggcucguauccaacggauccuaccucaacgaaacccacuucucagacgacaucgaacaacaagcggacaacaugauaacugaaaugcuccaaaaagaauacauggaacgccaaggaaagaccccacuaggcuuaguugaccuauucguauucuccaccuccuucuaucucaucuccaucuuccuacaccucgucaaaauccccacccaccgacacguagucggcaaaucaugccccaaaccccaccgccugaaccacaugggcauaugcagcugcggucuuuacggucaacccggaguacccgucaaauggaaacgcuaaggacuaguaauaaggaaacuguaugaaugucugugggcaggaagugaagagauccuucuguaaagguuuuuggaauuaugucugcugaauaauaaacuuuuuugaaauaauaaaucugguagaaaaaugagaucuaaaaaaaaaaaaaaaaaaaaaaaaaaaaaaaaaaaaaaaaaaaaaaaaaaaaaaaaaaaaaaaaugcaucccccccccccccccccccccccccccccccaaaggcucuuuucagagccaccagaauu

SEQ ID NO: 3050 - RNA, 1816 nt, Artificial Sequence
  mRNA product Design b-4 comprising derived and/or modified sequence from MOPV/LASV reassortant(IGS-1;Clade IV)__AFY05576__GPC (opt11)
gggagagucccgcagucggcguccagcggcucugcuuguucgugugugugucguugcaggccuuauucaagcuuaccaugggccaaaucgucaccuucuuccaagagguaccccacgucaucgaagaagucaugaacaucguacucaucgcccuuuccguccucgcaguacuaaaaggacuauacaacuucgccacuugcggccuagucggacucgucaccuuccugcuccuauguggccgcagcugcaccacuucccuuuacaagggcgucuacgaacuccaaacccucgaacucaacauggaaacccucaacaugaccaugccccucuccuguaccaaaaacaacucucaccacuacauaauggucggcaacgaaacuggccucgaacucacacucaccaacacguccaucaucaaccacaaauucugcaaccucagcgacgcccacaaaaagaaccucuacgaucacgcccucauguccauaaucagcaccuuccaccucuccauccccaacuuuaaccaauacgaagcaauguccugcgauuucaacgguggcaaaaucuccguccaauacaaccuaucccacuccuacgccggagacgccgcgaaccacugcggcacagucgccaacggaguccuccaaacauucaugcgaauggccuggggagguagcuacauagcccucgauucaggcagaggcaacugggacugcaucaugaccucauaccaauaccucaucauccaaaacacaacaugggaagaccacugccaauucagccgacccagccccaucgguuaccuaggccuccucucccaacgcacacgagacaucuacaucucacgacgucuacucgguaccuucaccuggacacucuccgacuccgaaggugaagacacccccggcggcuacugccucacccgcuggaugcucaucgaagccgagcucaaaugcuucggaaacaccgccguagcaaaaugcaacgagaaacacgacgaagaguucugcgacaugcuucgccucuucgacuucaacaaacaagccauacaacgccuaaaagccgaagcccaaaugucaauccaacucaucaacaaagcuguaaacgcacuaaucaacgaccaacucaucaugaaaaaucaucuucgcgacaucauggguauccccuacugcaacuacuccaaauacugguaccucaaccacacaaccaccggacgaaccucccucccuaaaugcuggcucguaucaaacggcuccuaccuuaacgaaacccacuucucagacgacauagaacaacaagccgacaacaugaucacagaaaugcuucaaaaagaauacauggaacgccaaggaaaaacuccccuaggucucgucgaccucuucgucuucuccaccagcuucuaccuaaucucgauauuccuacaccuagucaaaauacccacccaccgccacaucguaggcaaaagcugccccaaaccccaccgccucaaccacaugggcauaugcuccugcggccuauacaagcagcccggugucccugucaaauggaaacgcugaggacuaguaauaaggaaacuguaugaaugucugugggcaggaagugaagagauccuucuguaaagguuuuuggaauuaugucugcugaauaauaaacuuuuuugaaauaauaaaucugguagaaaaaugagaucuaaaaaaaaaaaaaaaaaaaaaaaaaaaaaaaaaaaaaaaaaaaaaaaaaaaaaaaaaaaaaaaaugcaucccccccccccccccccccccccccccccccaaaggcucuuuucagagccaccagaauu

SEQ ID NO: 3051 - RNA, 1816 nt, Artificial Sequence
  mRNA product Design b-4 comprising derived and/or modified sequence from LASV(LM765-SLE-2012;Clade IV)__AIT17814__GPC (opt11)
gggagagucccgcagucggcguccagcggcucugcuuguucgugugugugucguugcaggccuuauucaagcuuaccaugggccaaaucgucaccuucuuccaagaaguaccacacgucaucgaagaagucaugaacaucguacucauagcccuaagcauccucgccguacucaaaggacucuacaacuucgcaacuugcggccucgucggccucguaacauuccuucugcucugcggucgaagcugcaccaccucccuauacaaaggcgucuacgaacuccaaacacuagaacucaacauggaaacccucaacaugaccaugccccuaucaugcaccaaaaacaacucccaccacuacaucauggucgguaacgaaacaggccuagaacucacucuaacaaacaccuccaucaucgaucacaaauucugcaaccucucagacgcgcaccggaaaaaccucuacgaccacgcacucauguccaucauauccacguuccaccuuucaauccccaacuucaaccaauacgaagcuaugucaugcgacuucaacggcgguaagauaucaguccaguacaaccucucccacuccuacgccaaggacgccgcagaccacugcggcaccgucgccaacggcguccuccaaaccuucaugcgaauggccuggggcggcuccuauaucgcccucgacucaggccgaggccgcugggacugcaucaugaccagcuaccaauaccucaucauccaaaacacaaccugggaagaccacugccaauucucacgaccaucuccuaucggcuaccuaggcuuacucucccaacgcacccgagacaucuacauaagccgccgccuacuugguacauucaccuggacacuauccgacuccgaaggaaaagacaccccugguggauauugccuaacacgcuggaugcucaucgaagcagagcucaaaugcuucggcaacaccgccguagcaaaaugcaacgaaaaacacgacgaagaguucugcgacaugcuccgccucuucgacuucaacaaacaagccauccaacgccuaaaagccgaagcccaaauguccauacaacucaucaacaaagcagucaacgcccucaucaacgaccagcucaucaugaaaaaccaccuuagagacauaaugggcaucccauacugcaacuacucaaaauauugguaucucaaccacacaaccaccggaaaaaccagccuccccaaaugcuggcucgucaguaauggaucauaccucaacgaaacccacuucuccgacgacauugaacaacaagcagacaauaugaucacugaaaugcuucaaaaagaauacauggaacgacaaggcaaaacuccucucggccucgucgaccucuucgucuucagcaccagcuucuaccucaucucgaucuuccuacaccuugucaaaauccccacacaucgccacaucgucggaaaacccugccccaaaccccaccgccucaaccacaugggaaucugcucaugcggccucuauaaacaacccggcguccccgucaaauggaaacgcuaaggacuaguaauaaggaaacuguaugaaugucugugggcaggaagugaagagauccuucuguaaagguuuuuggaauuaugucugcugaauaauaaacuuuuuugaaauaauaaaucugguagaaaaaugagaucuaaaaaaaaaaaaaaaaaaaaaaaaaaaaaaaaaaaaaaaaaaaaaaaaaaaaaaaaaaaaaaaaugcaucccccccccccccccccccccccccccccccaaaggcucuuuucagagccaccagaauu

SEQ ID NO: 3052 - RNA, 1816 nt, Artificial Sequence
  mRNA product Design b-4 comprising derived and/or modified sequence from LASV(LM776-SLE-2012;Clade IV)__AIT17824__GPC (opt11)
gggagagucccgcagucggcguccagcggcucugcuuguucgugugugugucguugcaggccuuauucaagcuuaccauggggcaaaucgucaccuucuuccaagaaguuccccacgucaucgaagaagucaugaacaucguacuaaucgcccucuccauccucgcaguacuaaaaggacucuacaacuucgccacaugcggccucgucggccucgucacauuccuacuccuaugcggccgcucaugcaccaccuccgucuacaaaggcgucuacgaacuccaaacccucgaacucaacauggaaacccucaacaugaccaugccucucuccugcaccaaaaacaacucccaucacuacaucauggucggcaacgagaccggacuagaacucacacucacaaacaccuccaucaucaaccacaaauucugcaaccuaucugacgcacacaagaaaaaccucuacgaccacgcccucaugucaauuaucuccaccuuccaccuauccauacccaacuucaaccaauacgaagccaugucaugcgacuucaacggcggcaaaaucuccguccaauacaaccucagccacucauacgcuggcgacgccgcuaaccacugcgguaccgucgccaacggcguccugcaaacauucaugcgcauggccuggggcggauccuacaucgcccucgacuccggacacgggaaaugggacugcaucaugacuuccuaccaauaccucauaauacaaaacaccaccugggaagaccacugccaguucucccgaccauccccaaucggauaccucggacuccuaucucaacgcacccgagacaucuacaucagccgacgccuccuuggcaccuucaccuggacccucucagacuccgagggcaaagacaccccgggcggcuacugccucacccgcuggaugcuaauagaagccgaacucaaaugcuucggcaacaccgccguagccaaauguaacgaaaaacacgacgaagaguucugcgauaugcuucgccucuucgacuucaacaaacaagcaauccaacgacucaaagcagaagcacagaugagcauucaacuuaucaauaaagccguaaacgcccugaucaacgaccaacucaucaugaaaaaccaccuucgcgacauaaugggcauccccuacugcaacuacuccaaauacugguacuugaaccacaccaccaccgguaaaacuagccuaccuaaaugcuggcuugucucuaacggauccuaccucaacgaaacacacuucagcgacgacaucgaacaacaagccgauaacaugaucacagaaaugcuccagaaagaguacauggagcgccaaggaaaaaccccgcucggccuagucgaccucuucguauucuccaccagcuucuaucucaucuccauauuccuccaccucgucaaaaucccuacccaccgccacauaguagguaaaucaugcccaaaaccccaccgacucaaccacaugggcaucugcuccugcggccucuacaaacaaccaggcguacccguucgauggaaacgaugaggacuaguaauaaggaaacuguaugaaugucugugggcaggaagugaagagauccuucuguaaagguuuuuggaauuaugucugcugaauaauaaacuuuuuugaaauaauaaaucugguagaaaaaugagaucuaaaaaaaaaaaaaaaaaaaaaaaaaaaaaaaaaaaaaaaaaaaaaaaaaaaaaaaaaaaaaaaaugcaucccccccccccccccccccccccccccccccaaaggcucuuuucagagccaccagaauu

SEQ ID NO: 3053 - RNA, 1816 nt, Artificial Sequence
  mRNA product Design b-4 comprising derived and/or modified sequence from LASV(Mad39;Clade IV)__ANH09722__GPC (opt11)
gggagagucccgcagucggcguccagcggcucugcuuguucgugugugugucguugcaggccuuauucaagcuuaccaugggccaaaucguaacuuucuuccaagaagucccccacguaauugaagaagugaugaacaucguccucaucgcccucuccauccuagccguacugaagggccucuacaacguagcaacgugcggccucaucggccucgucaccuuccuacugcucugcggaagaucaugcaccaccacccucuacaagggagucuacgaacuccaagcccucgaacucaauauggaaacccuaaacaugaccaugccacuauccugcaccaaaaacaacagccaccacuacauucgcgucgguaacgaaacaggccucgaacuaacccuuaccaacaccucccucaucaaccacaaauuuugcaaucugucugacgcacacaagaaaaaccucuacgaccacgcacucaugucaaucaucuccacauuccaccuauccauaccaaacuucaaccaguacgaggcaauguccugcgacuuuaacgauggcaaaaucucaguccaauauaaccucucccacaccuacgccggagacacagccaaccacugcggaaccgucgcaaauggcguacuccaaacuuucaugcgaauggccuggggcggauccuacauagcccuagacuccggacgcggagguugggacuguaucaugaccuccuaucaauaccuaaucauacagaacaccaccugggaagaccacugccaauucucacgacccucuccgaucggcuaccucggccuccuaucacaacgaacccgggacauauacaucucacgccgacuauuaggcacguucaccuggacacucucagacucagaaggaaaagauacccccggaggcuacugccugacccgauggaugcucaucgaagcagaacucaaaugcuucggaaacaccgccguugccaaaugcaacgaaaaacacgacgaagaguucugcgacaugcuccgacuauuugacuucaacaaacaagccauccagcgccucaaagccgaagcccagaugucaauccaacuaauaaacaaagcagucaacgcccucaucaacgaccaacucaucaugaaaaaccaccuacgcgacauaaugggcaucccauacugcaacuacuccaaauacugguaccuaaaccacaccguaaccgguaaaacaucacuuccuaaaugcuggcucgucuccaacggaagcuaccuaaacgaaacacacuucucagacgacaucgaacaacaagcagacaacaugauuacagaaaugcuccaaaaagaauacauggaacgacaaggcaagacaccacucggccucgucgaccucuucgucuucagcaccucauucuaccucaucuccaucuuccuucaccucgugaagauacccacccaccgucacgucguagguaaacccugcccaaaaccccaccgacucaaccacaugggaauaugcuccugcggcuucuacaaacaacccggcguucccguccgauggaaacgcuaaggacuaguaauaaggaaacuguaugaaugucugugggcaggaagugaagagauccuucuguaaagguuuuuggaauuaugucugcugaauaauaaacuuuuuugaaauaauaaaucugguagaaaaaugagaucuaaaaaaaaaaaaaaaaaaaaaaaaaaaaaaaaaaaaaaaaaaaaaaaaaaaaaaaaaaaaaaaaugcaucccccccccccccccccccccccccccccccaaaggcucuuuucagagccaccagaauu

SEQ ID NO: 3054 - RNA, 1816 nt, Artificial Sequence
  mRNA product Design b-4 comprising derived and/or modified sequence from LASV(Z0947-SLE-2011;Clade IV)__AIT17840__GPC (opt11)
gggagagucccgcagucggcguccagcggcucugcuuguucgugugugugucguugcaggccuuauucaagcuuaccaugggccaaauugucaccuucuuccaggaagucccucacgucaucgaagaagucaugaacaucguacugaucgcacucucgauccucgcuguccugaaaggccuauacaacuucgcaaccugcggacucgucggacucguaacauuucuccuccucuguggccgaucuugcacaaucucccuauacaaaggcgucuacgaacuucaaacccuagaacuaaauauggaaacccucaacaugacaaugccccucuccugcacuaaaaacaacucacaccacuacauaaugguagguaacgaaaccggccucgaacucacccucaccaacaccuccaucaucaaccacaaauucugcaaccuuuccgacgcccacaagaaaaaccuauacgaccacgcccucaugucaauaaucuccacauuccaccucuccauccccaauuucaaccaauacgaagccaugucaugcgacuucaacgguggaaaaauauccguacaauacaaccucucccacuccuacgccggcgacgcugccaaccacugcggcacagucgccaacggcguccuccaaaccuucaugagaauggcguggggcggcuccuacauagcccucgacagcggccgugaccgcugggacugcaucaugacuuccuaccaguaccucaucauccaaaauacgacaugggaagaccacugccaauucucccgcccgucccccaucggcuaccuuggccuccuaucacaaagaacacgcgacaucuacaucucccgccgccuccuggguaccuucacauggacccucuccgacagcgaaggcaaagacacccccggcggcuacugccucacccgauggaugcucaucgaagcagaacucaaaugcuucggcaauaccgccgucgccaaaugcaacgaaaaacacgacgaagaauuuugcgacaugcucagacucuucgacuucaacaaacaagcgauccaacggcuaaaagccgaagcccaaaugucuauccaacuaauaaacaaagccgucaacgcacuaauaaacgaccaacuaaucaugaaaaaccaucuacgugacaucaugggcaucccauacugcaacuacuccaaauauugguaccuaaaccacacaacaaccggaaaaaccucacuuccuaaaugcuggcucgucuccaauggcuccuaccucaacgaaacucacuucucugacgacaucgaacaacaagccgacaacaugauuacagaaaugcuccaaaaagaauauauggaacgccaaggaaaaaccccacucggccuaguagacuuauucgucuucuccaccagcuucuaccucaucucaaucuuccuccaccucgucaaaauccccacacaccgccacaucgucggcaaacccugccccaaaccccaccgccugaaccacaugggcaucugcagcugcggccucuacaaacaacccgguguuccaguaaaguggaaacgauagggacuaguaauaaggaaacuguaugaaugucugugggcaggaagugaagagauccuucuguaaagguuuuuggaauuaugucugcugaauaauaaacuuuuuugaaauaauaaaucugguagaaaaaugagaucuaaaaaaaaaaaaaaaaaaaaaaaaaaaaaaaaaaaaaaaaaaaaaaaaaaaaaaaaaaaaaaaaugcaucccccccccccccccccccccccccccccccaaaggcucuuuucagagccaccagaauu

SEQ ID NO: 3055 - RNA, 1858 nt, Artificial Sequence
  mRNA product Design i-2 comprising derived and/or modified sequence from LASV(Josiah;Clade IV)__NP_694870__GPC (wt)
ggggcgcugccuacggagguggcagccaucuccuucucggcaucaagcuuaccaugggacaaauagugacauucuuccaggaagugccucauguaauagaagaggugaugaacauuguucucauugcacugucuguacuagcagugcugaaaggucuguacaauuuugcaacguguggccuuguugguuuggucacuuuccuccuguugugugguaggucuugcacaaccagucuuuauaaagggguuuaugagcuucagacucuggaacuaaacauggagacacucaauaugaccaugccucucuccugcacaaagaacaacagucaucauuauauaauggugggcaaugagacaggacuagaacugaccuugaccaacacgagcauuauuaaucacaaauuuugcaaucugucugaugcccacaaaaagaaccucuaugaccacgcucuuaugagcauaaucucaacuuuccacuuguccauccccaacuucaaucaguaugaggcaaugagcugcgauuuuaaugggggaaagauuagugugcaguacaaccugagucacagcuaugcuggggaugcagccaaccauugugguacuguugcaaaugguguguuacagacuuuuaugaggauggcuuggggugggagcuacauugcucuugacucaggccguggcaacugggacuguauuaugacuaguuaucaauaucugauaauccaaaauacaaccugggaagaucacugccaauucucgagaccaucucccaucgguuaucucgggcuccucucacaaaggacuagagauauuuauauuaguagaagauugcuaggcacauucacauggacacugucagauucugaagguaaagacacaccagggggauauugucugaccagguggaugcuaauugaggcugaacuaaaaugcuucgggaacacagcuguggcaaaauguaaugagaagcaugaugaggaauuuugugacaugcugaggcuguuugacuucaacaaacaagccauucaaagguugaaagcugaagcacaaaugagcauucaguugaucaacaaagcaguaaaugcuuugauaaaugaccaacuuauaaugaagaaccaucuacgggacaucaugggaauuccauacuguaauuacagcaaguauugguaccucaaccacacaacuacugggagaacaucacugcccaaauguuggcuuguaucaaaugguucauacuugaacgagacccacuuuucugaugauauugaacaacaagcugacaauaugaucacugagauguuacagaaggaguauauggagaggcaggggaagacaccauugggucuaguugaccucuuuguguucaguacaaguuucuaucuuauuagcaucuuccuucaccuagucaaaauaccaacucauaggcauauuguaggcaagucgugucccaaaccucacagauugaaucauaugggcauuuguuccuguggacucuacaaacagccuggugugccugugaaauggaagagaugaggacuagugcaucacauuuaaaagcaucucagccuaccaugagaauaagagaaagaaaaugaagaucaauagcuuauucaucucuuuuucuuuuucguugguguaaagccaacacccugucuaaaaaacauaaauuucuuuaaucauuuugccucuuuucucugugcuucaauuaauaaaaaauggaaagaaccuagaucuaaaaaaaaaaaaaaaaaaaaaaaaaaaaaaaaaaaaaaaaaaaaaaaaaaaaaaaaaaaaaaaaugcaucccccccccccccccccccccccccccccccaaaggcucuuuucagagccaccagaauu

SEQ ID NO: 3056 - RNA, 1855 nt, Artificial Sequence
  mRNA product Design i-2 comprising derived and/or modified sequence from LASV(LP;Clade I)__AAF86701__GPC (wt)
ggggcgcugccuacggagguggcagccaucuccuucucggcaucaagcuuaccauggggcagauuauuacauucuuucaagaagugccacauguaauagaggaagucaugaacauugugcuaauugcgcuuucucuauuggcaaucuugaagggcuuguauaacaucgcuacaugugggauuauuggauugguugccuuuuuauucuuguguggcaagucuuguucccuaacccuuaaagggggauaugagcugcaaaccuuagaauuaaauauggagacccuaaacaugaccaugcccuuaucaugcaccaagaacagcagucaucauuacauaagagugggcaaugagacuggauuagaauugacuuuaacuaacaccagcauuauaaaucacaaauuuugcaacuuauccgaugcucacaaaaagaaucuuuaugaucaugcucucaugagcaucaucucaacauuccaucuauccauuccaaacuucaaucaguaugaagccaugaguugugauuucaauggagggaaaaucagugugcaauacaaccucucucauuccuaugcuggggaugcggccgaacacugugggacaguugccaacggaguguugcaaacauuuaugagaauggccugggguggaagauacauugcauuagacucaggaaagggaaacugggacuguauaaugaccagcuaccaguaccugauaauucaaaauacaacaugggaggaccacugccaauucucaagaccgucuccuaucggguaccuuggccuuuugucacaaaggacaagagauauauauauaaguaggaggcucuuggggaccuucaccuggacauugucagauucugagggcaaugaaacaccaggugguuauuguuuaaccagguggaugcuaauugaagcagaacucaaguguuuugggaauacagcuguggcaaaaugcaaugagaagcaugaugaggaguuuugugacaugcugagauuguuugauuucaacaagcaagcaauccguagguugaaggcugaggcccagaugaguauucaauuaauaaauaaagccgugaaugccuuaaucaaugaucaauuaaucaugaagaaccauuuaagagacaucaugggcauucccuacugcaauuacagcaaguauugguaccuuaaucauacuaguagcgggagaacaucacuaccaaaguguuggcuuauauccaaugggucauaucuaaaugaaacccaguucucugaugacauagaacagcaagccgacaauaugaucacagagaugcuucagaaagaauacauugaaagacaagggaaaacgcccuugggacuaguggacauuuucaucuuuagcacaagcuuuuaucugaucagcauuuucuugcauuuaauuaaaaucccuacacaucgacacaucguugggaaacccugucccaaaccccauagacuaaaucacaugggaguauguuccuguggacuguacaaacacccugguguuccaacaaaguggaagagauagggacuagugcaucacauuuaaaagcaucucagccuaccaugagaauaagagaaagaaaaugaagaucaauagcuuauucaucucuuuuucuuuuucguugguguaaagccaacacccugucuaaaaaacauaaauuucuuuaaucauuuugccucuuuucucugugcuucaauuaauaaaaaauggaaagaaccuagaucuaaaaaaaaaaaaaaaaaaaaaaaaaaaaaaaaaaaaaaaaaaaaaaaaaaaaaaaaaaaaaaaaugcaucccccccccccccccccccccccccccccccaaaggcucuuuucagagccaccagaauu

SEQ ID NO: 3057 - RNA, 1855 nt, Artificial Sequence
  mRNA product Design i-2 comprising derived and/or modified sequence from LASV(803213;Clade II)__AAF86703__GPC (wt)
ggggcgcugccuacggagguggcagccaucuccuucucggcaucaagcuuaccauggggcaaaucauaacauucuuccaagaggugccucaugucauagaggaggucaugaacauuguccuaauugcccucagucuccuggcgauacuaaaggggauuuacaauguugcuaccuguggucucuuuggguugaucuccuuucuucucuuauguggcagaucauguucaguaaccuauaaagguguuuaugagcuacaaacucuagaacugaacauggcaaaccuuaauaugacgaugcccuugucuuguacgaagaacaacagccaucauuacaucaugguuggaaaugaaacaggccuagagcugaccuuaacaaacacaagcaucauuaaccacaaguuuugcaaccuuucugaugcacauaaaaagaaucucuaugaccaugcucugaugagcaucaucucaacuuuccacuuaucuauuccaaacuuuaaucaguaugaagcaaugaguugugacuucaauggagggaaaauaaguguucaguacaaccucagucacuccuuugcuguggaugcagccaaccacugugggaccauugccaaugguguucugcagaccuuuaugaggauggcuugggguggcaguuacauagcacuugauuccggaaaagggaacugggauuguauaaugacuuccuaucaauacuugauaauucaaaacaccacuugggaagaucacugccaguuuucucgcccaucuccuauugguuacuuaggacuauugucacagagaacuagagauaucuauaucagucgaagacuucucggaacuuucacuuggacccuuucugauucugaagguaaugaagcaccugguggguauugucuaacuagauggauguuaauugaagcagaacugaaaugcuuugggaacacagcaguugcaaagugcaacgaaaaacaugaugaagaauuuugugacauguugagauuguuugauuucaacaaacaagcuauaaagaggcugaaaacagaagcacagaugaguauucagcugauaaacaaggcagugaaugcauuaaucaaugaccaacugauuaugaagaaccaucuaagggacaucaugggaauuccuuauugcaacuacaguagauauugguaucuaaaucacacugugacagggaagacaucacugccaagauguuggcuugugucaaaugguuccuaccuaaacgaaacacauuuuucugaugacauugaacaacaagcagacaacaugauaacagaaauguugcagaaagaguacauggacaggcaggggaaaacaccuuuaggguuaguggaccuuuuugucuuuagcacuagcuuuuaccucauaagcaucuuucuccaucuggucaagaucccaacucacaggcacaucguggggaaaccuugcccuaagccacacagacucaaccacaugggcaucugcucauguggucuguauaaacaucccgguguuccaguaaaauggaagagauaaggacuagugcaucacauuuaaaagcaucucagccuaccaugagaauaagagaaagaaaaugaagaucaauagcuuauucaucucuuuuucuuuuucguugguguaaagccaacacccugucuaaaaaacauaaauuucuuuaaucauuuugccucuuuucucugugcuucaauuaauaaaaaauggaaagaaccuagaucuaaaaaaaaaaaaaaaaaaaaaaaaaaaaaaaaaaaaaaaaaaaaaaaaaaaaaaaaaaaaaaaaugcaucccccccccccccccccccccccccccccccaaaggcucuuuucagagccaccagaauu

SEQ ID NO: 3058 - RNA, 1855 nt, Artificial Sequence
  mRNA product Design i-2 comprising derived and/or modified sequence from LASV(GA391;Clade III)__CAA36645__GPC (wt)
ggggcgcugccuacggagguggcagccaucuccuucucggcaucaagcuuaccaugggacagauugugacauucuuccaagaaguuccucauguuauugaggaagugaugaauauuguccuuauugcacuauccauccuagcaauucugaagggacuauacaauguugccacguguggcuugauagggcuugucacauuccuucuacuuucaggaaggucaugcucacugaucuacaaagggacuuacgagcugcaaacccuugaguugaauauggagacucuuaauaugaccaugccgcuauccugcacaaagaacaacagucaucauuauauaaggguggggaaugagacaggacuugagcucaccuugaccaacaccagcauucuuaaucacaaauucuguaaccucucugaugcccacaaaaggaaucuuuaugaucacagccucaugaguaucaucucuaccuuucaucuguccauucccaacuucaaucaauaugaggcaaugagcugcgauuucaauggggggaaaaucacugugcaauacaaccugagucauagcuucgcaguggaugcagcaggucacugcggcacacuugcaaauggugucuuacaaacauuuaugagaauggcuuggggagggaguuauauugcucuugauucuggacgcgguaacugggacuguauaaugaccaguuaccaauaucuaaucauucagaauacaaccugggaugaccacugccaauuuuccagaccaucaccuauuggcuaccuugggcuucucucacaaagaacuagagacauauacauuagcagaagguuguuggggacauucaccuggacacuaucagacucagagggaaaugaaacaccagggggauacugccuuacuagauggauguugauugaggccgaauuaaagugcuuuggaaacacugcaguagccaagugcaaugagaaacaugaugaagaauuuugugacaugcuaagguuguucgauuucaacaaacaggccauaaggaggcucaaaacagaggcccaaaugagcauacagcugaucaacaaggcugucaaugcuuuaauaaaugaucagcucaucaugaagaaccacuugagagacaucaugggcauaccauauuguaacuacagcagauauugguaccuuaaccacacaucaacaggaaagaccucacuaccaagguguuggcuuaucucaaauggaucauaucucaaugagaccaaguuuucagaugacaucgaacaacaagcugacaacaugauaacagagaugcuacaaaaggaauacauagauagacagggcaaaacuccacugggguuaguugaccuauuuguuuuuagcacaaguuucuaucugauaagcaucuuucuccaccuggucaaaauaccaacccauagacacauuguagguaaaccuugcccaaaaccccacaggcugaaccacaugggcaucugcuccuguggucuauacaaacagccaggugugccugucagauggaagaggugaggacuagugcaucacauuuaaaagcaucucagccuaccaugagaauaagagaaagaaaaugaagaucaauagcuuauucaucucuuuuucuuuuucguugguguaaagccaacacccugucuaaaaaacauaaauuucuuuaaucauuuugccucuuuucucugugcuucaauuaauaaaaaauggaaagaaccuagaucuaaaaaaaaaaaaaaaaaaaaaaaaaaaaaaaaaaaaaaaaaaaaaaaaaaaaaaaaaaaaaaaaugcaucccccccccccccccccccccccccccccccaaaggcucuuuucagagccaccagaauu

SEQ ID NO: 3059 - RNA, 1858 nt, Artificial Sequence
  mRNA product Design i-2 comprising derived and/or modified sequence from LASV(AV;Clade V)__CCA30314__GPC (wt)
ggggcgcugccuacggagguggcagccaucuccuucucggcaucaagcuuaccauggggcaaauagugacauucuuucaagaggugccucaugugauagaagaggugaugaacauuguucuuauagcauugucuauauuggcaguguugaaaggucucuacaacauugccacaugcggccucaucggcuugaucacuuuccucuuauuauguggaaggucuugcucauccaaccucuacaagggggucuaugaacuucaaucucuggaccugaacauggagacacucaacaugaccaugccccucuccugcacaaagaacaauagucaucacuacauaaggguuggcaaugacacagggcuggaacugaccuugaccaacacgagcauacucaaucacaaauucugcaaccuaucagaugcucacaagaaagaccuauaugaucacgcacucaugagcauaaucucaacuuuccaccugucuauacccaauuucaaccaauacgaagcaaugaguugugacuucaaugggggcaaaaucagugugcaguacaaucuaagccauucuuaugcuauagaugcagcuaaucauugcggcacagucgcgaauggcaucuugcagacuuucaugagaauggcauggggugggagcuauauugcucuugacucaggccguggaaacugggacuguauuaugacuagcuaucaauaucugauuauucagaacacaaccugggaaaaucacugucaguucucaagaccaucuccuauugguuaucuuggucuccucucacagaggacuagagacauuuacauuagcaggagguugcugggcacauucacguggacacugucagacucugaggguaaugcuacaccaggagguuauugucugaccagguggauguuaauugaagcugaguugaaaugcuuuggaaacacagcaguagcaaaguguaaugaaaagcaugaugaagaauuuugcgacaugcucagacuuuuugauuuuaauaagcaggcuauaaguagauugaaaucugaagcacaaaugagcauccaacugaucaacaaagcagugaaugcuuugaucaacgaucaauuaauuaugaagaaccacuugcgagacaucauggggauuccauauuguaauuacagcaaguauugguaccucaaucauacaauaacuggcaaaaccucauuaccuaaauguuggcuuguaucuaaugguucauacuugaaugaaacccauuuuucugacgacaucgagcaacaagcugacaauaugaucacagagaugcuacaaaaggaauacauggagaggcaagggaaaacgccuuuggguuuaguugaucuguuuguguuuagcacaaguuuuuaucuaauuaguaucuuccuccgacuagucaagauuccaacccauagacacauugugggcaaaccauguccuaagccccacagguugaaccacaugggcauuuguucuugcggcuuauacaagcagccuggcguccccgugagauggaagagauagggacuagugcaucacauuuaaaagcaucucagccuaccaugagaauaagagaaagaaaaugaagaucaauagcuuauucaucucuuuuucuuuuucguugguguaaagccaacacccugucuaaaaaacauaaauuucuuuaaucauuuugccucuuuucucugugcuucaauuaauaaaaaauggaaagaaccuagaucuaaaaaaaaaaaaaaaaaaaaaaaaaaaaaaaaaaaaaaaaaaaaaaaaaaaaaaaaaaaaaaaaugcaucccccccccccccccccccccccccccccccaaaggcucuuuucagagccaccagaauu

SEQ ID NO: 3060 - RNA, 1855 nt, Artificial Sequence
  mRNA product Design i-2 comprising derived and/or modified sequence from LASV(Togo/2016/7082;Clade VI)__AMR44577__GPC (wt)
ggggcgcugccuacggagguggcagccaucuccuucucggcaucaagcuuaccauggggcaaauaauaaccuucuuccaggagguuccucauguuauagaggaggugaugaacauuguucugauagcacucucacuccuagcuauccugaaaggggucuacaauguggcaacaugugggauaauugggcuugugaccuuccucuuucucuguggaagaucuuguucacugaucuacaaaggcaguuaugagcugcaaacauuggaguuaaauauggagacccuaaacaugaccaugccucugucaugcacuaaaaauaguagccaccauuauauucgaguugggaacgagacuggcuuagagcugacauugaccaacaccagcauuauaaaucacaaauucuguaaccugucagaugcucacaaacguaaucuguaugaccacgcacucaugagcauccuuuccacauuccaucuguccaucccaaacuucaaccaguaugaggcgaugaguugugacuucaauggaggcaaaaucagugugcaauauaaucucagccaugcuuaugcaguugaugcugccgaacacugcggaacaguugcaaauggugugcuacaaacauucaugaggauggcuuggggaggaaguuacauugcacuugacucugggagaggcaauugggacuguauuaugacaagcuaccaauacuuaaucauucagaauacaacaugggaagaucacugccaauuuucaagaccuucuccuauugguuaucucggcuuauugucacaaagaacaagagacauuuauaucaguaggaggcugcuggguacauucaccuggacacuuucugacucagagggaaaugagacaccaggcggauacuguuuaacaagauggaugcugauagaggcugagcuaaaauguuuuggaaacacagcuguugcaaaguguaaugagaagcaugaugaggaauucugcgacauguuaagguuguuugacuucaacaaacaggcaauucagaggcucaaaucagaggcacaaaugagcauccaguuaauaaauaaagcagugaaugcauugauaaaugaucagcucauuaugaagaaccacuuaagggauaugauggguauaccguauugcaacuacaguaaguauugguaucucaaucacaccucaucagggagaacaucguugccuaaaugcuggcuuguuuccaauggaaguuaucugaaugagacccacuucucagaugauauugaacaacaggcagacaacaugauaacugaaauguuacaaaaggaauauaucgauaggcaggguaaaacaccuuuaggacuuguugaccuuuuuguuuucagcacgaguuuuuaccuuauaaguauauucuuacacuugauaaagauaccuacucauaggcacauaguuggaaagccaugccccaagccacaccgccucaaccacauggggaucugcucuuguggacuauacaagcagccuggugucccaaccagauggaagagauaaggacuagugcaucacauuuaaaagcaucucagccuaccaugagaauaagagaaagaaaaugaagaucaauagcuuauucaucucuuuuucuuuuucguugguguaaagccaacacccugucuaaaaaacauaaauuucuuuaaucauuuugccucuuuucucugugcuucaauuaauaaaaaauggaaagaaccuagaucuaaaaaaaaaaaaaaaaaaaaaaaaaaaaaaaaaaaaaaaaaaaaaaaaaaaaaaaaaaaaaaaaugcaucccccccccccccccccccccccccccccccaaaggcucuuuucagagccaccagaauu

SEQ ID NO: 3061 - RNA, 1855 nt, Artificial Sequence
  mRNA product Design i-2 comprising derived and/or modified sequence from LASV(KAK-428;Clade n.d. (VII))__ANH09740__GPC (wt)
ggggcgcugccuacggagguggcagccaucuccuucucggcaucaagcuuaccaugggucaaauagugaccuucuuccaggaaguaccucauguuauagaggaagugaugaacauaguucugauagcacuuucucucuuagccauccugaagggccucuacaauuuugccaccuguggaguaauuggacugauaacauuccuuuuacuuuguggaagauccuguucagcgaccuacaaaggccaauaugaacuccaaacuuuagaacuaaauauggagucccuaaacaugaccaugccacugucuugcacaaaaaacaacagucaucauuauaucagagcuggcaacaacacaggccuggaguugacccucaccaacaccagcauuauaucucauaaauucugcaaccuuucugaugcucacaagaagaaccuuuaugaccacacucuuaugaguauaauaacuaccuuucauuuguccaucccaaauuucaaccaguaugaggcaaugaguugugacuuuaacggugggaaaaucagcauacaguacaaccucagucacuccuacgcuggugaugcugcgcaacacuguggaacaguugcaaauggggugcugcaaaccuuuaugagaauggcuuggggagguaguuaucuggcccuugauucaggaagaagagguugggacugcauaauuuccaguuaccaauacuugaucauccaaaacacaacuugggaugaccauugccaguuuucaaggccauccccgaucggguaucuuggguuuguaucgcagaagaccagggacaucuauauaaguagaagacuccuuggaacuuuuacauggacacuuucagacuccgagggacaugacaugccaggugguuacugcuugaccagauggaugcucauugaagcugauuuaaaguguuuuggaaacacagcugucgcuaaguguaaugagaaacaugacgaggaguucugugacauguggagguuguuugacuuuaauaagcaagccauucaaaggcucaaagcagaggcccagaugaacauccagcucauaaauaaagcugucaaugcucucauaaaugaccaauugaugaugaaaaaccauuuaagggauaucaugggcauucccuauugcaauuacaguaaauucugguaucucaauaacaccacgacugggagaaccucacugccaagaugcuggcugauuucaaauggguccuacuuaaaugagacucacuucucagaugauauugaacagcaagcugacaauaugauaacugagauguugcagaaagaauacauggacagacaaggaaaaacaccgcuaggacugguugaucucuuuguauucaguacaagcuuuuaccucauuaccauuuucuuacaucuugugaaaauaccaacccacagacacauaguuggcaagccgugcccuaaaccacacagacugaaucacaugggcaucugcuccugugggcucuacaaacagccuggugugccaguacgauggaagagaugaggacuagugcaucacauuuaaaagcaucucagccuaccaugagaauaagagaaagaaaaugaagaucaauagcuuauucaucucuuuuucuuuuucguugguguaaagccaacacccugucuaaaaaacauaaauuucuuuaaucauuuugccucuuuucucugugcuucaauuaauaaaaaauggaaagaaccuagaucuaaaaaaaaaaaaaaaaaaaaaaaaaaaaaaaaaaaaaaaaaaaaaaaaaaaaaaaaaaaaaaaaugcaucccccccccccccccccccccccccccccccaaaggcucuuuucagagccaccagaauu

SEQ ID NO: 3062 - RNA, 1855 nt, Artificial Sequence; identical to SEQ ID NO: 3056
  mRNA product Design i-2 comprising derived and/or modified sequence from LASV(Pinneo-NIG-1969;Clade I)__AIT17836__GPC (wt)

SEQ ID NO: 3063 - RNA, 1855 nt, Artificial Sequence
  mRNA product Design i-2 comprising derived and/or modified sequence from LASV(ISTH0009-NIG-2011;Clade II)__AIT17404__GPC (wt)
ggggcgcugccuacggagguggcagccaucuccuucucggcaucaagcuuaccaugggacaaaucauaacauuuuuccaggaaguaccucaugucauagaggaagugaugaacauuguccugauugcucucagccuucuggcaauacugaaggggaucuacaauguugccaccuguggccuauuuggacugguguccuuucuccucuuaugugggagaucaugcucaacaacuuauaaggguguuuaugagcuacaaacucuagagcuggacauggcaagccuuaauaugacaaugccccuaucuugcacaaagaacaacagucaccauuacaucauggucggaaaugagacuggcuuggagcugacuuuaacaaauacaaguauuaucaaccacaaguuuuguaaccuuucugaugcacauaaaaagaaucucuaugaccaugcuuuaaugaguaucaucucaaccuuccacuuaucuauuccuaauuuuaaucaguaugaagcaaugaguugugacuucaauggggggaagauaaguguucaguacaaccuuagccacgcuuaugcuguagaugcagccaaucacugugggacuaucgccaauggcguucuucagacuuuuaugaggauggcuugggguggcaguuacauagcacuugauuccggaaaggggaguugggauuguauaaugacuuccuaccaauauuugauaauccagaacaccacuugggaagaucacugccaguuuucucgcccauccccuaucgguuaucuggggcuacugucacaaaggaccagagacauuuacaucagucgaagacuucuugggacuuuuacuuggacucucucugauucugaagguaaugaaacaccggguggguacugucuaacaagauggaugcugauugaggccgaguugaagugcuuugggaacacagcaguugcgaaaugcaaugagaaacaugaugaagaguuuugugacauguuaagacuguuugauuucaacaaacaagcuauaaggaggcuaaagacagaagcacagaugaguauccaacugauaaacaaagcagugaaugcauugaucaaugaccagcuuauuaugaagaaucacuugagagauaucaugggaauuccuuacugcaauuacagcaaguacugguaucuaaaucacacuguaacagggaagacaucguugccaaggugcuggcuugugucaaaugguuccuaccugaaugagacacauuuuucugaugacauugaacaacaggcagacaacaugauaacagaacuguugcaaaaggaguacauggacaggcaagggaaaacacccuuaggguuaguagaucuuuuugucuucagcaccagcuuuuaucucauuagcaucuuccuccaccugaucaaaaucccaacccacagacauaucacagggaaacccugcccuaaaccacacagacuuaaccacaugggcauaugcucauguggucuauacaaacauccugguguaccagucaaguggaaaagauagggacuagugcaucacauuuaaaagcaucucagccuaccaugagaauaagagaaagaaaaugaagaucaauagcuuauucaucucuuuuucuuuuucguugguguaaagccaacacccugucuaaaaaacauaaauuucuuuaaucauuuugccucuuuucucugugcuucaauuaauaaaaaauggaaagaaccuagaucuaaaaaaaaaaaaaaaaaaaaaaaaaaaaaaaaaaaaaaaaaaaaaaaaaaaaaaaaaaaaaaaaugcaucccccccccccccccccccccccccccccccaaaggcucuuuucagagccaccagaauu

SEQ ID NO: 3064 - RNA, 1855 nt, Artificial Sequence
  mRNA product Design i-2 comprising derived and/or modified sequence from LASV(ISTH2010-NIG-2012;Clade II)__AIT17482__GPC (wt)
ggggcgcugccuacggagguggcagccaucuccuucucggcaucaagcuuaccaugggacaaaucauaacauuuuuccaggaaguaccucaugucauagaggaagugaugaacauuguccugauugcucucagccuucuggcaauauugaaggggaucuacaauguugcuaccuguggccucuuuggauugguguccuuccuccucuuauguggaaggucauguucaacaacuuacaaggguguuuaugagcuacaaacucuggagcuagacauggcaagccuuaauaugacaaugcccuuaucuugcacgaagaacaacagccaccauuacaucauggucggaaaugaaacuggcuuggagcuaacuuuaacaaauacaaguaucaucaaccacaaauuuuguaaccucucugaugcacauaagaagaaucuuuaugaucaugcuuuaaugaguaucauuucaaccuuccacuuauccauuccuaacuuuaaucaguaugaagcaaugagcugugacuucaaugggggaaagauaaguguucaguacaaccuuagccacgcuuaugcuguagaugcagccaaccacugugggaccaucgccaauggcguucuucagacuuuuaugaggauggcuugggguggcagcuauauagcacuugauuccggaaaggggaguugggauuguauaaugacuuccuaccaauauuugauaauccaaaacaucacuugggaagaucacugccaguuuucucgcccauccccuaucgguuaccuagggcuacugucacaaaggaccagggacauuuacaucagucgaagacuucuugggacuuuuacuuggacucucucugauucugaagguaaugaaacaccggguggguauugccuaacaagauggaugcugauugaagccgaguugaaaugcuuugggaacacagcaguugcgaaaugcaaugagaaacaugaugaagaguuuugugacauguuaagauuguuugacuuuaacaaacaggcuauaaggaggcuaaagacagaagcacagaugaguauccaacugauaaacaaagcagugaacgcacugaucaaugaccagcugauuaugaagaaucauuugagagauaucauggggauuccuuacugcaauuacagcaaguacugguaucuaaaucauacuguaacagggaagacaucguugccaaggugcuggcuugugucaaaugguuccuaccugaaugagacacauuuuucugaugacauugaacaacaggcagacaacaugauaacagaacugcugcaaaaggaguacauagacaggcaagggaaaacaccuuuaggguuaguagaucuuuuugucuucagcaccagcuuuuaucucauuagcaucuuccuccaccugguuaaaaucccaacccacagacaugucguaggaaaacccugcccuaaaccacacagacucaaccacaugggcauauguucauguggucuauacaaacauccuggugugccagucaaguggaaaagauagggacuagugcaucacauuuaaaagcaucucagccuaccaugagaauaagagaaagaaaaugaagaucaauagcuuauucaucucuuuuucuuuuucguugguguaaagccaacacccugucuaaaaaacauaaauuucuuuaaucauuuugccucuuuucucugugcuucaauuaauaaaaaauggaaagaaccuagaucuaaaaaaaaaaaaaaaaaaaaaaaaaaaaaaaaaaaaaaaaaaaaaaaaaaaaaaaaaaaaaaaaugcaucccccccccccccccccccccccccccccccaaaggcucuuuucagagccaccagaauu

SEQ ID NO: 3065 - RNA, 1855 nt, Artificial Sequence
  mRNA product Design i-2 comprising derived and/or modified sequence from LASV(Lassa virus/H.sapiens-wt/NGA/2015/ISTH_0543;Clade II)__AVO03639__GPC (wt)
ggggcgcugccuacggagguggcagccaucuccuucucggcaucaagcuuaccaugggacaaaucauaacauuuuuccaggaagugccucaugucauagaggaaguaaugaacauuguccugauugcucucagccuucuggcaauauugaaggggaucuacaauguagccaccuguggccuuuuuggacugguguccuuucuccucuuauguggaagaucaugcucaacaacuuauaagggugucuacgagcuacaaacucuagagcuggacauggcaaaccuuaauaugacaaugccccuaucuugcacaaagaacaacagucaccauuacaucauggucggaaaugaaacuggcuuggagcugacuuuaacaaauacaaguauuaucaaccacaaguuuugcaaccuuucugaugcacauaaaaagaaucucuaugaccaugcuuuaaugaguaucaucucaaccuuccacuuaucuauuccuaauuuuaaucaguaugaagcaaugaguugugacuucaauggagggaagauaaguguucaguacaaccuuagccacacuuaugcuguagaugcagccaaucacugugggacuaucgccaauggcguucuucagacuuuuaugaggauggcuugggguggcaguuacauagcacuugauucuggaaaggggaguugggauuguauaaugacuuccuaccaauaucugguaauccagaacaccacuugggaagaucacugccaauuuucucgcccauccccuaucgguuaucuggggcuacugucacaaaggaccagagacauuuacaucagucgaagacuucuugggacuuucacuuggacucucucugauucugaagguaaugaaacaccggguggguacugucuaacaagauggaugcugauugaggccgaguugaagugcuuugggaacacagcaguugcgaaaugcaaugagaaacaugaugaagaguuuugugacauguuaagacuguucgauuuuaacaaacaagcuauaaggaggcugaagacagaagcacagaugaguauccaacuaauaaacaaagcagugaaugcauugaucaaugaccagcuuauuaugaagaaucacuuaagagauaucaugggaauuccuuacugcaauuacagcaaguacugguaucuaaaucacacugugacagggaagacaucguugccaaggugcuggcuuguaucaaaugguuccuaccugaaugagacacauuuuucugaugauauugaacaacaggcagacaacaugauaacagaacuguugcaaaaggaauacauagacaggcaagggaaaacacccuuaggguuaguagaucuuuuugucuucagcaccagcuuuuaucucauuagcauuuuccuccaccuggucaaaaucccaacucacagacauaucacagggaaacccugcccuaaaccacacagacuuaaccacaugggcauaugcucauguggucuauacaaacauccugguguaccagucaaguggaaaagauagggacuagugcaucacauuuaaaagcaucucagccuaccaugagaauaagagaaagaaaaugaagaucaauagcuuauucaucucuuuuucuuuuucguugguguaaagccaacacccugucuaaaaaacauaaauuucuuuaaucauuuugccucuuuucucugugcuucaauuaauaaaaaauggaaagaaccuagaucuaaaaaaaaaaaaaaaaaaaaaaaaaaaaaaaaaaaaaaaaaaaaaaaaaaaaaaaaaaaaaaaaugcaucccccccccccccccccccccccccccccccaaaggcucuuuucagagccaccagaauu

SEQ ID NO: 3066 - RNA, 1855 nt, Artificial Sequence
  mRNA product Design i-2 comprising derived and/or modified sequence from LASV(Lassa virus/H.sapiens-wt/NGA/2016/ISTH_0009;Clade II)__AVO03571__GPC (wt)
ggggcgcugccuacggagguggcagccaucuccuucucggcaucaagcuuaccaugggacaaaucauaacauuuuuccaggaaguaccucaugucauagaggaagugaugaacauuguccugauugcucucagccuucuggcaauacugaaggggaucuacaauguugccaccuguggccuccuuggacugguguccuuucuccucuuauguggaaggucaugcucaacaacuuauaaggguguuuaugagcuacaaacucuagagcuggacauggcaagccuuaauaugacaaugccccugucuugcacaaagaacaacagucaccauuacaucauggucggaaaugagacuggcuuggagcugacuuuaacaaauacaaguauuaucaaccacaaguuuuguaaccuuucugaugcacauaaaaagaaucucuaugaccaugcucuaaugaguaucaucucaaccuuccacuuaucuauuccuaauuuuaaccaguaugaagcaaugaguugugacuucaauggggggaggauaaguguucaguacaaccuuagccacucuuaugcuguagaugcagccaaucacugugggacuaucgccaauggcguucuucagacuuucaugaggauggcuugggguggcaguuacauagcacuugauuccggaaaggggaguugggauuguauaaugacuuccuaccaauacuugauaauccagaacaccacuugggaagaucacugccaguuuucucgcccauccccuaucgguuauuuggggcuacugucacagaggaccagagacauuuacaucagucgaagacuucuugggacuuuuacuuggacucucucugauucugaagguaaugaaacaccggguggguacugucuaacaagauggaugcugauugaggccgaguugaagugcuuugggaacacagcaguugcgaaaugcaaugagaaacaugaugaagaguucugugacauguuaagacuguuugauuuuaauaaacaagccauaaggaggcugaagacagaagcacagaugaguauccaacugauaaacaaagcagugaaugcauugaucaaugaccagcuuauuaugaagaaccacuugagagauaucaugggaauuccuuacugcaauuacagcaaguacugguaucuaaaucacacuguaacagggaagacaucguugccaaggugcuggcuugugucaaaugguuccuaccugaaugagacacauuuuuccgaugacauugaacaacaggcagacaacaugauaacagaauuguugcagaaggaguacauagacaggcaagggaaaacacccuugggguuaguagaucuuuuugucuucagcaccagcuuuuaucucauuagcaucuuccuccaccuggucaaaauuccaacccacagacauaucacagggaaacccugccccaaaccacacagacuuaaccacaugggcauaugcucauguggucuauacaaccauccuggugugccagucaaguggaaaagauagggacuagugcaucacauuuaaaagcaucucagccuaccaugagaauaagagaaagaaaaugaagaucaauagcuuauucaucucuuuuucuuuuucguugguguaaagccaacacccugucuaaaaaacauaaauuucuuuaaucauuuugccucuuuucucugugcuucaauuaauaaaaaauggaaagaaccuagaucuaaaaaaaaaaaaaaaaaaaaaaaaaaaaaaaaaaaaaaaaaaaaaaaaaaaaaaaaaaaaaaaaugcaucccccccccccccccccccccccccccccccaaaggcucuuuucagagccaccagaauu

SEQ ID NO: 3067 - RNA, 1855 nt, Artificial Sequence
  mRNA product Design i-2 comprising derived and/or modified sequence from LASV(Lassa virus/H.sapiens-wt/NGA/2016/ISTH_0017;Clade II)__AVO03567__GPC (wt)
ggggcgcugccuacggagguggcagccaucuccuucucggcaucaagcuuaccaugggacaaaucauaacauuuuuccaggaaguaccucaugucauagaggaagugaugaacauuguccugauugcucucagccuucuggcaauacugaaagggaucuacaauguugcuaccuguggccucuuuggguugguguccuuccuccucuuaugugggagaucaugcucaacaacuuacaaggguguuuaugagcuacaaacucuagagcuagacauggcaagccuuaauaugacaaugcccuuaucuugcacgaagaacaauucccaccauuacaucauggucggaaaugagacuggcuuggagcugacuuuaacaaauacaagcauuaucaaccacaaguuuuguaaccuuucugaugcacauaaaaagaaucuuuaugaccaugccuuaaugagcaucauuucaaccuuccacuuauccauuccuaacuuuaaucaguaugaagcaaugaguugugacuucaaugggggaaaaauaaguguucaguacaaccuuagccauacuuaugcuauagaugcagcuaaccacugugggaccauugccaauggcguucuucagacuuuuaugaggauggcuugggguggcaguuacauagcacuugauuccggaaagggcagcugggacugcauuaugacuuccuaccaauauuugauaauccagaacaccacuugggaagaucacugccaguuuucucgcccaucccccaucgguuaucuggggcuacugucacaaaggaccagagacauuuacaucagucgaagacuucuugggacuuuuacauggacccucucugacucugaagguaaugaaacaccagguggguacugucuaacgagauggaugcugauugaggccgaguugaagugcuuugggaacacagcaguugcaaaaugcaaugagaaacaugaugaagaguuuugugauauguuaagauuauuugacuuuaacaaacaagcuauaaggaggcugaagacagaagcgcagaugaguauccaacugauaaacaaagcagugaacgcacugaucaaugaccagcugauuaugaagaaucauuuaagagauaucaugggaauuccuuacugcaauuacagcaaguauugguaucuaaaucacacuguaacagggaagacaucauuaccaagaugcuggcuugugucgaaugguuccuaccugaaugagacacauuuuucugaugacauugaacaacaagcagauaacaugauaacagaacuuuugcaaaaggaauauauggauaggcaagggaaaacacccuuaggguuaguagaucuuuuugucuucagcaccagcuuuuaucucauuagcaucuuccuccaccuggucagaaucccaacucacagacaugucauagggaaacccugcccuaaaccacacagacucaaccacaugggcauaugcucauguggucuguacaaacauccuggugugccagucaaauggaaaagauagggacuagugcaucacauuuaaaagcaucucagccuaccaugagaauaagagaaagaaaaugaagaucaauagcuuauucaucucuuuuucuuuuucguugguguaaagccaacacccugucuaaaaaacauaaauuucuuuaaucauuuugccucuuuucucugugcuucaauuaauaaaaaauggaaagaaccuagaucuaaaaaaaaaaaaaaaaaaaaaaaaaaaaaaaaaaaaaaaaaaaaaaaaaaaaaaaaaaaaaaaaugcaucccccccccccccccccccccccccccccccaaaggcucuuuucagagccaccagaauu

SEQ ID NO: 3068 - RNA, 1855 nt, Artificial Sequence
  mRNA product Design i-2 comprising derived and/or modified sequence from LASV(Lassa virus/H.sapiens-wt/NGA/2018/ISTH_0959;Clade II)__AVV65099__GPC (wt)
ggggcgcugccuacggagguggcagccaucuccuucucggcaucaagcuuaccaugggacaaaucauaacauuuuuccaggaaguaccucaugucauagaggaagugaugaacauuguccugauugcucucagccuuuuggcaauacugaaggggaucuacaauguuguuaccuguggccucuuuggauugguguccuuccuccucuuauguggaagaucauguucaacaacuuacaaggguguuuaugagcuacaaacucuggagcuggacauggcaagccuuaauaugacaaugcccuuaucuugcacgaagaacaacagccaccauuacaucauggucggaaaugagacuggcuuggagcugacuuuaacaaauacaaguaucaucaaccauaaauuuuguaaccucucugaugcacauaaaaagaaucuuuaugaucaugcuuuaaugaguaucauuucaaccuuccacuuauccauuccaaacuuuaaucaguaugaagcaaugagcugugacuucaaugggggaaagauaaguguucaguacaaccuuagccacgccuaugcuauagaugcagccaaccacugcgggacuauugccaauggcguucuucaaacuuuuaugaggauggcuugggguggcagcuauauagcacuugauuccggaaaggggaguugggacuguauaaugacuuccuaccaguauuugauaauccaaaacaccacuugggaagaucauugucaguuuucucgcccauccccuaucgguuaccuagggcuacugucacaaaggaccagggacauuuacaucagucgaagacuucuugggacuuuuacuuggacucucucugauucugaagguaaugaaacaccggguggguauugucuaacaagauggaugcugauugaggccgaguugaaaugcuuugggaacacagcaguugcgaaaugcaaugagaaacaugaugaagaguuuugugacauguuaagauuguuugacuuuaacaaacaagcuauaaggaggcuaaagacagaagcacagaugaguauccagcugauaaacaaagcagugaacgcacugaucaaugaccagcugauuaugaaaaaucauuugagagauaucauggggauuccuuacugcaauuacagcaaguacugguaucuaaaucauacuguaacagggaagacaucguugccaaggugcuggcuugugucaaaugguuccuaccugaaugagacacauuuuucugaugacauugaacaacaagcagacaauaugauaacagaacugcugcaaaaggaguacauagacaggcaagggaaaacaccuuuaggguuaguagaucuuuuugucuucagcaccagcuuuuaucucauuagcaucuuccuccaccugguuaaaaucccaacccacagacaugucauaggaaaacccugcccuaaaccacacagacuuaaucacaugggcauauguucauguggucuauacaaacauccuggugugccagucaaguggaaaagauagggacuagugcaucacauuuaaaagcaucucagccuaccaugagaauaagagaaagaaaaugaagaucaauagcuuauucaucucuuuuucuuuuucguugguguaaagccaacacccugucuaaaaaacauaaauuucuuuaaucauuuugccucuuuucucugugcuucaauuaauaaaaaauggaaagaaccuagaucuaaaaaaaaaaaaaaaaaaaaaaaaaaaaaaaaaaaaaaaaaaaaaaaaaaaaaaaaaaaaaaaaugcaucccccccccccccccccccccccccccccccaaaggcucuuuucagagccaccagaauu

SEQ ID NO: 3069 - RNA, 1855 nt, Artificial Sequence
  mRNA product Design i-2 comprising derived and/or modified sequence from LASV(LASV003-NIG-2008;Clade II)__AIT17580__GPC (wt)
ggggcgcugccuacggagguggcagccaucuccuucucggcaucaagcuuaccauggggcaaaucauaacauuuuuccaggaagugccucaugucauagaagaagugaugaacauuguccugauugcccucagccuuuuggcaauauugaaagggaucuacaauguugcuacuuguggccucuuuggacugguguccuuucuucucuuauguggaagaucaugcucaacaacuuacaaagguguuuaugagcuacaaacucuagagcuagacauggcaagccuuaauaugacaaugcccuuaucuugcacaaagaauaauagccaccauuacaucauggucggaaaugaaacuggcuuagagcugacuuuaacaaauacaaguaucaucaaccacaaguuuuguaaccuuucugaugcacauaaaaagaaucuuuaugaccaugcuuuaaugagcaucaucucaaccuuccacuuauccauuccuaacuuuaaucaauaugaagcaaugaguugugacuucaauggggggaagauaaguguucaguacaaccuuagccacacuuaugcuguagaugcagcuaaccacugugggacuauugccaauggcguucuucagacuuucaugaggauggcuugggguggcagcuacauagcacuugauuccggaaaagggaguugggauuguauaaugacuuccuaccaauaucugauaauccagaacaccacuugggaagaucauugccaguuuucucgcccaucccccaucgguuaucuggggcuacugucacaaaggaccagggacauuuacaucagucgaagacuccuugggacuuuuacuuggacccucucugauucugaaagcaaugaaacuccagguggguauugucuaacaagguggauguugauugaggccgagcugaagugcuuugggaacacagcaguugcgaaaugcaaugaaaaacaugaugaagaguuuugugacaugcuaagauuguuugacuuuaacaaacaagcuauaaggaggcugaaagcagaagcacagaugagcauccaacuaauaaacaaagcagugaaugcacugaucaaugaccagcugauaaugaagaaucauuuaagagauaucaugggaauuccuuacugcaauuacagcaaauauugguacuugaaucacacuguaacagggaggacaucguuaccaagaugcuggcuugugucaaaugguuccuaccugaaugagacacauuuuucugacgacauugaacaacaagcagacaauaugauaacagaacuguugcagaaggaguacauggacaggcaagggaaaacaccuuuaggguuaguagaucuuuuugucuucagcaccagcuuuuaucucaucagcaucuuccuccaccugguuaaaaucccaacccacagacaugucauagggaaacccugcccuaaaccacacagacucaaccacaugggcauaugcucauguggucuguacaaacauccuggugugccagucaaguggaaaagauagggacuagugcaucacauuuaaaagcaucucagccuaccaugagaauaagagaaagaaaaugaagaucaauagcuuauucaucucuuuuucuuuuucguugguguaaagccaacacccugucuaaaaaacauaaauuucuuuaaucauuuugccucuuuucucugugcuucaauuaauaaaaaauggaaagaaccuagaucuaaaaaaaaaaaaaaaaaaaaaaaaaaaaaaaaaaaaaaaaaaaaaaaaaaaaaaaaaaaaaaaaugcaucccccccccccccccccccccccccccccccaaaggcucuuuucagagccaccagaauu

SEQ ID NO: 3070 - RNA, 1855 nt, Artificial Sequence
  mRNA product Design i-2 comprising derived and/or modified sequence from LASV(LASV035-NIG-2009;Clade II)__AIT17588__GPC (wt)
ggggcgcugccuacggagguggcagccaucuccuucucggcaucaagcuuaccauggggcaaaucauaacauuuuuccaggaagugccucaugucauugaggaggugaugaacauugucuuaauugcucucagucuucuagcaauacugaaagggauuuacaauguugcuaccuguggccucuuuggguugguguccuuucuucucuuauguggaaggucaugcucaacaacuuacaaggguguuuaugagcuucaaacucuagagcuggauauggcaagccuuaauaugacaaugcccuuauccugcacgaagaacaacagccaccacuacaucaugguuggaaaugagacuggcuuggagcugacuuugacaaacacaaguaucaucaaccacaaguucugcaaccuuuccgaugcacauaaaaagaaucucuaugaccaugcuuuaaugagcaucaucucaacuuuccaccuauccaucccuaacuuuaaucaguaugaagcaaugaguugugacuucaauggggggaagauaaguguucaguacaaccucagccacgcuuaugcuguagaugcagcuaaccauugugggaccauugccaauggaguucuucaaacuuuuaugaggauggcuugggguggcaguuacauagcacuugauucuggaaaggggaguugggauuguauaaugacuuccuaccaauauuugauaauccaaaacaccacuugggaagaucacugccaguuuucucgcccauccccuauugguuaucuggggcuacugucacaaagaaccagggauauuuacaucagccgaagacuccuuggaacuuuuacuuggacucucucugauucugaaggcaaugaaacaccggguggauauuguuuaacaagauggaugcugauugaggccgaauuaaagugcuuugggaacacagcaguugcgaaaugcaaugagaaacaugaugaagaguuuugugacauguuaagguuguuugacuuuaacaaacaggcuauaaggaggcuaaaggcagaagcacagaugagcauccaacuaauaaacaaagcagugaacgcacugaucaaugaccagcucauuaugaagaaucauuuaagagauaucaugggaauuccuuacugcaauuacagcaaguauugguauuuaaaucacacuguaacagggaagacaucguugccaagaugcuggcuuguaucaaaugguuccuaccugaaugaaacacauuuuucugaugacauugaacaacaagcagauaacaugauaacagaauuguuacagaaagaguacauugacaggcaagggaaaacacccuuaggguugguggaucuuuuugucuucagcacuagcuucuaccuuauuagcaucuuccuccaccugguuaaaaucccaacccacagacaugucauagggaagcccugccccaagccacacagacucaaccacaugggcauaugcucauguggucuguacaaacauccugguguaccagucaaguggaaaagauagggacuagugcaucacauuuaaaagcaucucagccuaccaugagaauaagagaaagaaaaugaagaucaauagcuuauucaucucuuuuucuuuuucguugguguaaagccaacacccugucuaaaaaacauaaauuucuuuaaucauuuugccucuuuucucugugcuucaauuaauaaaaaauggaaagaaccuagaucuaaaaaaaaaaaaaaaaaaaaaaaaaaaaaaaaaaaaaaaaaaaaaaaaaaaaaaaaaaaaaaaaugcaucccccccccccccccccccccccccccccccaaaggcucuuuucagagccaccagaauu

SEQ ID NO: 3071 - RNA, 1855 nt, Artificial Sequence
  mRNA product Design i-2 comprising derived and/or modified sequence from LASV(LASV1000-NIG-2009;Clade II)__AIT17782__GPC (wt)
ggggcgcugccuacggagguggcagccaucuccuucucggcaucaagcuuaccaugggacaaaucauaacauuuuuccaggaaguuccucaugucauagaggaagugaugaacauuguccugauugcucucagccuccuggcaauacuaaaagggaucuacaauguugcuaccuguggccucuuuggauugguguccuuccuccucuuauguggaagaucaugcucaacaacuuacaaggguguuuaugagcugcaaacucuagagcuagacauggcaagccuuaauaugacaaugccucuaucuugcacgaagaauaacagccaccauuacaucauggucggaaaugagacuggcuuggagcugacuuuaacaaacacaaguauuaucaaucacaaguuuuguaaccuuucugaugcacacaaaaagaaucuuuaugaccaugcuuuaaugagcaucaucucaaccuuccauuuaucuauucccaacuucaaucaguaugaagcaaugaguugugacuucaaugggggaaagauaaguguucaguacaaccuuagccacacuuaugcuguagaugcagccaaccacugugggacuaucgccaauggcguccuucagaccuuuaugaggauggcuugggguggcaguuacauagcacuugauuccggaaaggggaguugggacuguauaaugacuuccuaucaauaucugauaauccaaaacaccacuugggaagaucacugccaguuuucucgcccaucuccuaucgguuaucuggggcuacugucacaaaggaccagagacauuuacaucagucgaagacuucuugggacuuucacuuggacucucucugauucugaagguaaugaaacaccggguggguacugucuaacaagguggaugcugauugaggccgaguugaagugcuuugggaacacagcaguugcgaaaugcaaugagaaacaugaugaagaguuuugugacauguuaagauuguuugacuuuaacaaacaagcuauaaagaggcugaagacagaagcacagaugaguauucaacugauaaacaaagcagugaacgcacugaucaaugaccagcugauuaugaagaaucauuugagagacaucaugggaauuccuuacuguaauuacagcaaguauugguaucuaaaucacaccguaacagggaagacaucguugccaaggugcuggcuugugucaaaugguuccuaccugaaugagacacacuuuucugaugacauugaacaacaagcagauaacaugauaacagaacuauugcaaaaggaguacauagacaggcaagggaaaacacccuuaggguuaguagaccuuuuugucuuuagcaccagcuuuuaucucauuagcaucuuccuccaccuggucaaaaucccaacccauagacaugucguagggaaacccugcccuaaaccacacagacucaaccacaugggcauaugcucauguggucuauacaaacauccugguguaccagucaaauggaaaagauagggacuagugcaucacauuuaaaagcaucucagccuaccaugagaauaagagaaagaaaaugaagaucaauagcuuauucaucucuuuuucuuuuucguugguguaaagccaacacccugucuaaaaaacauaaauuucuuuaaucauuuugccucuuuucucugugcuucaauuaauaaaaaauggaaagaaccuagaucuaaaaaaaaaaaaaaaaaaaaaaaaaaaaaaaaaaaaaaaaaaaaaaaaaaaaaaaaaaaaaaaaugcaucccccccccccccccccccccccccccccccaaaggcucuuuucagagccaccagaauu

SEQ ID NO: 3072 - RNA, 1855 nt, Artificial Sequence
  mRNA product Design i-2 comprising derived and/or modified sequence from LASV(LASV221-NIG-2010;Clade II)__AIT17624__GPC (wt)
ggggcgcugccuacggagguggcagccaucuccuucucggcaucaagcuuaccaugggacaaaucauaacauuuuuccaggaaguaccucaugucauagaggaagugaugaacauuguccugauugcucucagccuucuggcaauacugaaagggaucuacaauguugcuaccuguggccucuuuggauugguguccuuccuccucuuauguggaagaucaugcucaacaacuuacaaggguguuuaugagcuacaaacucuagagcuagacauggcaagccuuaauaugacaaugcccuuaucuugcacgaagaacaacucccaccauuacaucauggucggaaaugagacuggcuuggagcugacuuugacaaauacaagcauuaucaaccacaaguuuuguaaccuuucugaugcgcauaaaaagaaucuuuaugaccaugcuuuaaugaguaucaucucaaccuuccacuuguccauuccuaacuuuaaucaguaugaagcaaugaguugugauuucaaugggggaaagauaaguguucaguacaaccuuagccacacuuaugcuauagaugcagccaaccacugugggaccauugccaauggcguucuucagacuuucaugagaauggcuugggguggcaguuacauagcacuugauuccggaaaggggagcugggauugcauaaugacuuccuaccaauauuugauaauccaaaacaccacaugggaagaucacugccaguuuucucgcccaucccccaucgguuaucuggggcuacuaucacaaagaaccagggacauuuacauuagucgaagacuucuugggacuuucacuuggacucucucugacucugaagguaaugaaacaccggguggguauugucuaacaagauggaugcugauugaggccgaguugaagugcuuuggaaacacagcaguugcaaaaugcaaugaaaaacaugaugaagaguuuugugauauguugagauuguuugacuucaacaaacaagcuauaaggaggcuaaagacagaagcacagaugaguauccaacugauaaacaaagcggugaacgcacugaucaaugaccagcugaucaugaagaaucauuugagagauaucaugggaauuccuuacugcaauuacagcaaguauugguaucuaaaucacacuguaacagggaagacaucguugccaagaugcuggcuugugucgaaugguucuuaccugaaugagacacauuuuucugaugacauugaacaacaagcagacaacaugauaacagaaauguugcaaaaggaguacauggacaggcaagggaaaacacccuuaggguuaguagaucuuuuugucuucagcaccagcuuuuaucucauuagcaucuuccuccaccuaguuaaaauuccaacccacagacaugucauagggaaacccugcccuaaaccacacagacucaaccacaugggcauauguucauguggucuguauaagcauccuggcgugccagucaaguggaaaagauagggacuagugcaucacauuuaaaagcaucucagccuaccaugagaauaagagaaagaaaaugaagaucaauagcuuauucaucucuuuuucuuuuucguugguguaaagccaacacccugucuaaaaaacauaaauuucuuuaaucauuuugccucuuuucucugugcuucaauuaauaaaaaauggaaagaaccuagaucuaaaaaaaaaaaaaaaaaaaaaaaaaaaaaaaaaaaaaaaaaaaaaaaaaaaaaaaaaaaaaaaaugcaucccccccccccccccccccccccccccccccaaaggcucuuuucagagccaccagaauu

SEQ ID NO: 3073 - RNA, 1855 nt, Artificial Sequence
  mRNA product Design i-2 comprising derived and/or modified sequence from LASV(LASV237-NIG-2010;Clade II)__AIT17638__GPC (wt)
ggggcgcugccuacggagguggcagccaucuccuucucggcaucaagcuuaccaugggacaaaucauaacauuuuuccaggaaguaccucaugucauagaggaagugaugaacauuguccugauugcucucagccuucuggcaauacugaaggggaucuacaauguugccaccuguggccuauuuggacugguguccuuucuccucuuauguggaagaucaugcucaacaacuuauaaggguguuuaugagcuacaaacucuagagcuggauauggcaagccuuaauaugacaaugccccuaucuugcacaaagaacaacagucaccauuacaucauggucggaaaugagacuggcuuggagcugacuuuaacaaauacaaguauuaucaaccacaaguuuuguaaccuuucugaugcacauaaaaaggaucucuaugaccaugcuuuaaugaguaucaucucaaccuuccacuuaucuauuccuaauuuuaaucaguaugaagcaaugaguugugacuucaauggggggaagauaaguguucaguacaaccuuagccacacuuaugcuguagaugcagccaaucacugugggacuaucgccaauggcguucuucagacuuuuaugaggauggcuugggguggcaguuacauagcacuugauuccggaaaggggaguugggauuguauaaugacuuccuaccaauauuugauaauccagaacaccacuugggaagaucacugccaguuuucucgcccauccccuaucgguuaucuggggcuacugucacaaaggaccagagacauuuacaucagucgaagacuucuugggacuuuuacuuggacucucucugauucugaagguaaugaaacaccggguggguacugucuaacaagauggaugcugauugaggccgaguugaagugcuuugggaacacagcaguugcgaaaugcaaugagaaacaugaugaagaguuuugugacauguuaagacuguuugauuucaacaaacaagcuauaaggaggcuaaagacagaagcacagaugaguauccaacugauaaacaaagcagugaaugcauugaucaaugaccagcuuauuaugaagaaucacuugagagauaucaugggaauuccuuacugcaauuacagcaaguacugguaucugaaucacacuguaacagggaagacaucguugccgaggugcuggcuugugucaaaugguuccuaccugaaugagacacauuuuucugaugacauugaacaacaggcagacaacaugauaacagaacuguugcaaaaggaguacauggacaggcaagggaaaacacccuuaggguuaguagaccuuuuugucuucagcaccagcuuuuaucucauuagcaucuuccuccaccugaucaaaaucccaacccacagacauaucacagggaaacccugcccuaaaccacacagacuuaaccacaugggcauaugcucauguggucuauacaaacauccugguguaccagucaaguggaaaagauagggacuagugcaucacauuuaaaagcaucucagccuaccaugagaauaagagaaagaaaaugaagaucaauagcuuauucaucucuuuuucuuuuucguugguguaaagccaacacccugucuaaaaaacauaaauuucuuuaaucauuuugccucuuuucucugugcuucaauuaauaaaaaauggaaagaaccuagaucuaaaaaaaaaaaaaaaaaaaaaaaaaaaaaaaaaaaaaaaaaaaaaaaaaaaaaaaaaaaaaaaaugcaucccccccccccccccccccccccccccccccaaaggcucuuuucagagccaccagaauu

SEQ ID NO: 3074 - RNA, 1855 nt, Artificial Sequence
  mRNA product Design i-2 comprising derived and/or modified sequence from LASV(LASV253-NIG-2011;Clade II)__AIT17670__GPC (wt)
ggggcgcugccuacggagguggcagccaucuccuucucggcaucaagcuuaccauggggcaaaucauaacauuuuuucaggaagugccucaugucauagaagaagugaugaacauuguccugauugcccucagccuucuggcaauauugaaagggaucuacaauguugcuacuuguggccucuuuggacugguguccuuucuucucuuauguggaagaucaugcucaacaacuuacaaagguguuuaugagcuacaaacucuagagcuagacauggcaagccuuaauaugacaaugcccuuaucuugcacaaagaauaauagccaccauuacaucauggucggaaaugaaacuggcuuagagcugacuuuaacaaauacaaguaucaucaaccacaaguuuuguaaccuuucugaugcacauaaaaagaaucuuuaugaccaugcuuuaaugagcaucaucucaaccuuccacuuauccauuccuaacuucaaucaauaugaagcaaugaguugugacuucaauggggggaagauaaguguucaguacaaccuuagccacacuuaugcuguagaugcagcuaaccacugugggacuauugccaauggcguucuucagacuuuuaugaggauggcuugggguggcagcuacauagcacuugauuccggaaaagggagcugggauuguauaaugacuuccuaccaauauuugauaauccagaacaccacuugggaggaucacugccaguuuucucgcccaucccccaucgguuaucuggggcuacugucacaaaggaccagggacauuuacaucagucgaagacuccuuggaacuuuuacuuggacccucucugauucugaaggcaaugaaacuccagguggguauugucuaacaagguggauguugauugaggccgaguugaagugcuuugggaacacagcaguugcgaaaugcaaugagaaacaugaugaagaguuuugugacaugcuaagauuguuugacuuuaauaaacaagcuauaaggagacugaaagcagaagcacagaugaguauucaacuaauaaacaaagcagugaaugcacugaucaaugaccagcugauaaugaagaaucauuuaagagauaucauggggauuccuuacugcaauuacagcaaguauugguaucugaaucacacuguaacaggaaggacaucguuaccaagaugcuggcuugugucaaaugguuccuaccugaaugagacacauuuuucugacgacauugaacaacaagcagacaacaugauaacagaacuguugcagaaggaguacauagacaggcaagggaaaacaccuuuaggguuaguggaucuuuuugucuucagcaccagcuuuuaucucaucagcaucuuccuccaccugguuaaaaucccaacccacagacauaucauagggaaacccugcccuaaaccacacagacucaaccacaugggcauaugcucauguggucuguacaaacauccuggugugccaguuaaguggaaaagauagggacuagugcaucacauuuaaaagcaucucagccuaccaugagaauaagagaaagaaaaugaagaucaauagcuuauucaucucuuuuucuuuuucguugguguaaagccaacacccugucuaaaaaacauaaauuucuuuaaucauuuugccucuuuucucugugcuucaauuaauaaaaaauggaaagaaccuagaucuaaaaaaaaaaaaaaaaaaaaaaaaaaaaaaaaaaaaaaaaaaaaaaaaaaaaaaaaaaaaaaaaugcaucccccccccccccccccccccccccccccccaaaggcucuuuucagagccaccagaauu

SEQ ID NO: 3075 - RNA, 1855 nt, Artificial Sequence
  mRNA product Design i-2 comprising derived and/or modified sequence from LASV(LASV254-NIG-2011;Clade II)__AIT17674__GPC (wt)
ggggcgcugccuacggagguggcagccaucuccuucucggcaucaagcuuaccaugggacaaaucauaacauuuuuccaggaaguaccucaugucauagaggaagugaugaacauuguucugauugcucucagccuucuggcaauauugaaagggaucuacaauguugcuaccuguggccucuuuggauugguguccuuucuucucuuauguggaagaucaugcucaacaacuuacaaggguguuuaugagcuacaaacucuagagcuagacaugacaaaccucaauaugacaaugccuuuauccugcacgaaaaacaacagccaccauuacaucauggucggaaaugagacuggucuggagcugacuuuaacaaauacaagcaucaucaaccacaaguuuuguaaccuuucugaugcacauaaaaagaaucuuuauaaccaugcuuuaaugaguauuauuucaacuuuccacuuauccauuccuaacuuuaaucaguaugaagcaaugaguugugacuucaaugggggcaagauaaguguccaguacaaccuuagccauaguuaugcuguggaugcagcuaaccacugugggaccauugccaauggcgugcuucagacuuuuaugaggauggcuugggguggcaguuacauagcacuugauuccggaaaggggaauugggauuguauaaugaccuccuaccaauauuugauaauccaaaacaccacuugggaagaucacugucaguuuucucgcccauccccuauugguuaucugggguuacugucacaaaggaccagggacauuuacaucagucgaagacuucuugggacuuuuacuuggacucucucugauucugaagguaaugaaacaccagguggguauugucuaacaagauggaugcugauugaggccgaguugaagugcuuugggaacacagcaguugcgaaauguaaugagaaacaugaugaggaguuuugugacauguuaagauuguuugacuuuaacaaacaagcuauaaggaggcugaagacagaggcacaggcgaauauccaacugauaaauaaagcagugaacgcacugaucaaugaccagcugaucaugaagaaucauuugagagauaucaugggaauuccuuacugcaauuacagcaaguauugguacuuaaaucacacuguaacagggaagacaucguugccaagaugcuggcuugugucaaauggcuccuacuugaaugagacacauuuuucugaugacauugaacaacaagcagacaauaugauaacagaacuguugcagaaggaguacauggacaggcaagggaaaacacccuuaggguugguagaucuuuuugucuucagcaccagcuuuuaucucauuagcaucuuccuccaccugguuaaaaucccaacccacagacaugucauagggaaacccugcccuaaaccacacagacucaaccacaugggcauaugcucauguggucuguacaaacauccugguguaccagucaaguggaaaagauagggacuagugcaucacauuuaaaagcaucucagccuaccaugagaauaagagaaagaaaaugaagaucaauagcuuauucaucucuuuuucuuuuucguugguguaaagccaacacccugucuaaaaaacauaaauuucuuuaaucauuuugccucuuuucucugugcuucaauuaauaaaaaauggaaagaaccuagaucuaaaaaaaaaaaaaaaaaaaaaaaaaaaaaaaaaaaaaaaaaaaaaaaaaaaaaaaaaaaaaaaaugcaucccccccccccccccccccccccccccccccaaaggcucuuuucagagccaccagaauu

SEQ ID NO: 3076 - RNA, 1855 nt, Artificial Sequence
  mRNA product Design i-2 comprising derived and/or modified sequence from LASV(Nig08-A19;Clade III)__ADU56618__GPC (wt)
ggggcgcugccuacggagguggcagccaucuccuucucggcaucaagcuuaccaugggacaaauugugacauucuuccaggaagucccucauguuaucgaggaagugaugaauaucguccucauagcauugucaauuuuggcaauccuaaaaggacucuacaacauugcuacauguggcuugauaggccuugucacauuccucuuacuuucuggaaggucauguucaaugaccuacaaaggaguuuaugaacuacagacccuugaacugaacaugaacacucugaauaugacuaugccgcuaucuuguacaaagaacaauagucaccacuacaucauggugggaaacgagacagggcuugagcucaccuuaaccaacacaagcuugcuccaucacaaauucugcaaccuaucagaugcucauaagaaaaaucuuuaugaucacacucucaugagcauuaucuccacauuccauuuguccauuccuaacuuuaaucaguaugaggcaaugaguugugauuuuaaugguggcaagaucacugugcaauacaaucugagucauagcuaugcaauugaugcagcaaaccauuguggcacaguggcaaacgguguguugcaaacauuuaugaggauggcuuggggagguaguuacauugcccuugauuccggacgugggaaaugggauuguauaaugaccaguuaucaauacuuaaucauccagaacacaaccugggaagaucauugucaauuuuccagaccauccccaauuggauaucuugggcuccucucacagagaacuagagacauauacauuaguagaagacuacuaggaacauuuacuuggacacuuucugacucagaaggaaaugagacaccaggagguuacugucucacuagauggauguugauugaggcugaacuaaaguguuucgggaauacagcuguagcuaagugcaaugaaaaacacgaugaagaguuuugugacaugcuaaggcuauuugacuucaauaagcaagcuauaaggagguuaaaggcagaggcccaaaugagcauacagcugaucaacaaagcaguuaaugcucuaauaaacgaucagcugaucaugaagaaucaucuaagggacaucaugggaauaccauacugcaauuacagcaaguacugguaucucaaucacaccucaacagggaggaccucauuaccgagauguuggcuuguuucaaaugggucauaucucaaugaaacucacuuuucagaugacauugagcagcaagcugauaacaugauaacugaaauguugcaaaaagaauaccuggacagacaaggaaagaccccauugggauugguagaucuuuuugucuucaguacaaguuuuuacuuaaucaguauuuuccuccaucuggucaaaauaccaacccauagacacauuguagggaagccuugccccaaaccucauagguugaaccacaugggcaucugcucuuguggucuauauaaacagccaggaguacccguuagauggaagagauaaggacuagugcaucacauuuaaaagcaucucagccuaccaugagaauaagagaaagaaaaugaagaucaauagcuuauucaucucuuuuucuuuuucguugguguaaagccaacacccugucuaaaaaacauaaauuucuuuaaucauuuugccucuuuucucugugcuucaauuaauaaaaaauggaaagaaccuagaucuaaaaaaaaaaaaaaaaaaaaaaaaaaaaaaaaaaaaaaaaaaaaaaaaaaaaaaaaaaaaaaaaugcaucccccccccccccccccccccccccccccccaaaggcucuuuucagagccaccagaauu

SEQ ID NO: 3077 - RNA, 1858 nt, Artificial Sequence
  mRNA product Design i-2 comprising derived and/or modified sequence from LASV(G1180-SLE-2010;Clade IV)__AIT17168__GPC (wt)
ggggcgcugccuacggagguggcagccaucuccuucucggcaucaagcuuaccaugggacagauagugacauucuuccaggaagugccucauguaauagaagaggugaugaacauuguucucauugcacugucuauacuagcagugcugaaaggucuguacaauuuugcaacauguggccucguuggucuacucacuuuccuccuguuguguggcagaucuugcacagcuagucguuacaaagggguuuaugagcuucagacucuggaacuaaacauggagacacucaauaugaccaugccucucuccugcacaaagaacaacagucaucauuauauaaugguggguaaugagacaggacuagaacugacuuugacuaacacgagcaucauuaaucauaaauuuugcaaucugucugaugcccacaaaaagaaccuuuaugaccacgcucuuaugagcauaauuucaacuuuccacuuauccauccccaacuucaaucaguaugaggcaaugagcugcgauuuuaaugggggaaagauuagugugcaguacaaccugagucacagcuaugcuggggaugcagccaaucauugugguacuguugcaaauggugucuugcagaccuucaugaggauggcuuggggugggagcuacauugcucuugacucaggccauggcaguugggacuguauuaugacuaguuaucaauaucugauaauccaaaauacaaccugggaagaucacugccaguucucaagaccaucucccauugguuaucucgggcuccuuucacaaagaaccagagauauuuacauuaguagaagacuacuaggcacauucacauggacacugucagauucugaaggcaaggacacaccagggggauauugucugaccagauggaugcuaauugaagcugaacuaaaaugcuucgggaacacagcuguggcaaaauguaaugagaagcaugaugaggaauuuugugacaugcugaggcuguuugacuucaacaaacaagccauucaaagguugaaagcugaagcacaaaugagcauucaauugaucaacaaggcaguaaaugcuuugauaaaugaccaacuuauaaugaagaaccauuuacgagacaucaugggaaucccauacuguaauuacagcaaguauugguaccucaaccacacaaccacugggaaaacaucacugccuaaguguuggcuuguaucaaaugguucauacuuaaaugagacccacuuuucugaugauauugagcaacaagcugacaacaugaucacugagauguuacagaaggaguauauggaaaggcagggcaagacaccauugggccuaguugaccucuuuguguuuagcacaaguuucuaucucauuagcaucuuccuucaccuggucaaaauaccaacucauaggcauauuguaggcaagucgugucccaaaccucauagauugaaucacaugggcauauguuccuguggacucuacaaacagcccggugugccugugaaauggaagagaugaggacuagugcaucacauuuaaaagcaucucagccuaccaugagaauaagagaaagaaaaugaagaucaauagcuuauucaucucuuuuucuuuuucguugguguaaagccaacacccugucuaaaaaacauaaauuucuuuaaucauuuugccucuuuucucugugcuucaauuaauaaaaaauggaaagaaccuagaucuaaaaaaaaaaaaaaaaaaaaaaaaaaaaaaaaaaaaaaaaaaaaaaaaaaaaaaaaaaaaaaaaugcaucccccccccccccccccccccccccccccccaaaggcucuuuucagagccaccagaauu

SEQ ID NO: 3078 - RNA, 1858 nt, Artificial Sequence
  mRNA product Design i-2 comprising derived and/or modified sequence from LASV(G1442-SLE-2011;Clade IV)__AIT17180__GPC (wt)
ggggcgcugccuacggagguggcagccaucuccuucucggcaucaagcuuaccaugggacaaauagugacauucuuucaggaagugccucaugugauagaggagguaaugaacauugugcucauugcacuauccauacuggcagugcugaagggucuauacaauguugcaacaugcggccugauugguuuagucaccuuccuauuguuaugugguaggucuugcacaacaacucuuuacaaaggaguuuacgaacuucagacucuggaauuaaacauggagacacucaauaugacuaugccucucucuuguacaaagaacaacagucaccacuauauaaggguggguaaugagacaggacuagaguugacccugaccaacacaagcaucaucaaucacaaguuuugcaaucuaucugaugcucacaaaaagaaccucuaugaucaugcuuugaugagcauaaucucgacuuuucacuuguccauucccaacuucaaccaauaugaggcaaugagcugugacuucaauggagggaagauuagugugcaguauaaccugagucacagcuaugcuggagaugcagccaaccauugugguacaguugcaaaugguguuuuacaaaccuucaugaggauggcuuggggugggaguuacaucgcccuugacucaggucguggcaauugggacuguauuaugacuaguuaucaauaccuaauaauucagaauacgaccugggaugaucauugccaauucucaagaccaucccccaucgguuaucuugggcuccucucacaaaggaccagagauguuuauaucaguagaagacugcuaggcacauucacauggacacugucagauucugaaggcaaggacacaccaggaggguacugucugaccagguggaugcuaauugaagcugaacugaaaugcuuuggcaacacagcuguagcaaaauguaaugagaaacaugaugaagaauucugugacaugcuaaggcuguuugacuucaauaaacaagcuauucagagguugaaagccgaagcacaaaugaguauucaguugaucaacaaagcagugaaugcuuugauaaaugaccaacuaauaaugaaaaaccaucuacgggacaucauggggauuccauacugcaauuacagcaaguacugguaucucaacaacacagccacugggaaaacaucacugcccaaauguuggcuuauaucaaauggcucauauuugaacgaaacucacuucucugaugacauugaacaggaagcugacaauaugaucacugagauguuacaaaaagaauacauggagaggcaggggaagacaccauuaggucugguugaccucuuuguguucagcacaaguuucuaucucauuagcaucuuccuucaccuagucaaaauaccaacucacaggcauauugugggcaaaucauguccuaaaccccauagguugaaucacauggguauuugcucuuguggacuuuauaaacaacccggugugccuguaagauggaagagaugaggacuagugcaucacauuuaaaagcaucucagccuaccaugagaauaagagaaagaaaaugaagaucaauagcuuauucaucucuuuuucuuuuucguugguguaaagccaacacccugucuaaaaaacauaaauuucuuuaaucauuuugccucuuuucucugugcuucaauuaauaaaaaauggaaagaaccuagaucuaaaaaaaaaaaaaaaaaaaaaaaaaaaaaaaaaaaaaaaaaaaaaaaaaaaaaaaaaaaaaaaaugcaucccccccccccccccccccccccccccccccaaaggcucuuuucagagccaccagaauu

SEQ ID NO: 3079 - RNA, 1858 nt, Artificial Sequence
  mRNA product Design i-2 comprising derived and/or modified sequence from LASV(G3010-SLE-2013;Clade IV)__AIT17344__GPC (wt)
ggggcgcugccuacggagguggcagccaucuccuucucggcaucaagcuuaccaugggacagauaguaacauucuuccaggaagugccucaugugauagaagaggugaugaacauuguucucauugcacugucuauauuagcagugcugaaaggucuguacaauuuugcaacauguggccucguugguuugguuaccuuccuccuguuaugugguaggucuugcacaaccagucuuuacaaagggguuuaugagcuucagacucuggaacuaaacauggagacacucaauaugaccaugccucucuccuguacaaagaacaacagucaucauuauauuaugguggguaaugagacaggacuagaacugaccuugaccaacacgagcaucauuaaucauaaauuuugcaaucugucugaugcccacaaaaagaaccucuauaaucacgcucuuaugagcauaauuucaacuuuccaucuguccauucccaacuucaaucaguaugaggcaaugagcugcgauuucaaugggggaaagauuagugugcaguacaaccugagucacaguuaugcuggggaugcggccagccauuguggcacuguugcaaauggugucuuacagacuuucaugaggauggcuugggguggaagcuauauugcucuugacucaggcuauggcaagugggacugcauuaugacuaguuaucaguaccugauaauucaaaauacaaccugggaagaucacugccaauucucaagaccaucucccauuggcuaucucgggcuccucucacaaaggaccagagauauuuauauuaguagaagacugcugggcacauucacauggacacugucggauucugaagguaaggacacaccagggggauauuguuugaccagauggaugcuaauugaagcugaacuaaagugcuucgggaacacagcuguagcaaaauguaaugagaagcaugaugaggaauuuugugacaugcugaggcuguuugacuucaacaaacaagccauucaaagauugaaaacugaagcacaaaugagcauucaguugaucaacaaggcaguaaaugccuuaauaaaugaccagcuuauaaugaagaaccaucuacgagacauaaugggaauuccauacuguaacuacagcaaguauugguaccucaaccacacaaccacugggaaaacaucacugccuaaauguuggcuuguaucaaauggcucauacuugaaugagacccacuuuucugaugauauugaacaacaggcugacaacaugaucacugagauguuacagaaagaguacauggagaggcaggggaagacaccauugggccuggucgaccuuuuuguguucagcacaaguuucuaucucaucaguaucuuucuucaccuagucaaaauaccaacucauagacauauuguaggaaagucgugucccaaaccucacagauugaaucacaugggcauauguuccuguggacucuacaaacagcccggugugccugugagauggaagagaugaggacuagugcaucacauuuaaaagcaucucagccuaccaugagaauaagagaaagaaaaugaagaucaauagcuuauucaucucuuuuucuuuuucguugguguaaagccaacacccugucuaaaaaacauaaauuucuuuaaucauuuugccucuuuucucugugcuucaauuaauaaaaaauggaaagaaccuagaucuaaaaaaaaaaaaaaaaaaaaaaaaaaaaaaaaaaaaaaaaaaaaaaaaaaaaaaaaaaaaaaaaugcaucccccccccccccccccccccccccccccccaaaggcucuuuucagagccaccagaauu

SEQ ID NO: 3080 - RNA, 1858 nt, Artificial Sequence
  mRNA product Design i-2 comprising derived and/or modified sequence from LASV(G502-SLE-2009;Clade IV)__AIT17126__GPC (wt)
ggggcgcugccuacggagguggcagccaucuccuucucggcaucaagcuuaccaugggacagauagugacauucuuccaggaaguaccucauguaauagaagaggugaugaacauuguucucauugcacugucuauacuagcagugcugaaaggucuguauaauuuugcaacauguggccucguuggucuacucaccuuccuccuauuguguggcaggucuugcacaaccggacuuuacaaagggguuuaugagcuucaaacucuggaacuaaacauggagacacucaauaugaccaugccucucuccugcacaaagaacaacagucaucauuauauaaugguggguaaugagacaggacuagaacugacuuugacuaacacgagcaucauuaaucauaaauuuugcaaucugucugaugcccacaaaaagaaccuuuaugaccacgcucuuaugagcauaauuucaacuuuccacuuguccauccccaacuucaaucaguaugaggcaaugagcugcgauuuuaaugggggaaagauuaguguacaguacaaccugagccacaguuaugcuggggaugcggcugaucauuguggcacuguugcaaauggugucuugcagacuuucaugaggauggccuggggugggagcuacauugcucuugacucaggucguggcaggugggacuguauuaugacuaguuaucaauauuugauaauccaaaauacaaccugggaagaucacugccaguucucaagaccaucucccaucgguuaucucgggcuccucucacaaagaacuagagacauuuacauuaguagaaggcuacuaggcacauucacauggacacugucagauucugaaggcaaggacacaccaggaggauauugucugacuagauggaugcugauugaggcugaauuaaaaugcuucgggaacacagcuguagcaaaauguaaugagaagcaugaugaggaauuuugugacaugcugaggcuguuugacuucaacaaacaagccauucaaagguuaaaagcugaagcacagaugagcauucaauugaucaacaaggcaguaaaugcuuugauaaaugaccaacuuguaaugaagaaccacuuacgggacaucaugggaauuccauacuguaauuacagcagguauugguaucucaaccacacaaccacuggaagaacaucacugccuaaauguuggcuugugucaaauggcucauacuuaaacgagacccacuuuucugaugauauugagcaacaagcugacaacaugaucacugagauguuacagaaggaauauauggaaaggcagggaaagacaccauuaggucugguugaccucuuuguguucagcacaaguuucuaucuuauuagcaucuuccuucaccuggucaagauaccaacucauaggcauauugugggcaagucgugucccaaaccucauagauugaaucacaugggcauauguuccuguggacucuacaaacagcccgguguaccugugaaauggaagagaugaggacuagugcaucacauuuaaaagcaucucagccuaccaugagaauaagagaaagaaaaugaagaucaauagcuuauucaucucuuuuucuuuuucguugguguaaagccaacacccugucuaaaaaacauaaauuucuuuaaucauuuugccucuuuucucugugcuucaauuaauaaaaaauggaaagaaccuagaucuaaaaaaaaaaaaaaaaaaaaaaaaaaaaaaaaaaaaaaaaaaaaaaaaaaaaaaaaaaaaaaaaugcaucccccccccccccccccccccccccccccccaaaggcucuuuucagagccaccagaauu

SEQ ID NO: 3081 - RNA, 1858 nt, Artificial Sequence
  mRNA product Design i-2 comprising derived and/or modified sequence from LASV(G733-SLE-2010;Clade IV)__AIT17154__GPC (wt)
ggggcgcugccuacggagguggcagccaucuccuucucggcaucaagcuuaccaugggacagauagugacauucuuccaggaagugccucauguaauagaagaggugaugaacauuguucucauugcacugucuauacuagcaguccugaagggucuguacaacuuugcaacauguggcaucguugguuuggucagcuuucuccuguuguguggcaggucuugcacaaccagucuuuacaaagggguuuaugagcuucagacucuggagcuaaacauggagacacuuaacaugaccaugccucucucuugcacaaagaacaacagucaucauuauauaauggugggcaaugagacgggauuggaacugaccuugaccaacacgagcauuaucaaucauaaauuuugcaaucuaucugaugcccauaagaagaaccucuaugaccacgcccuuaugaguauaaucucaaccuuccacuuguccauccccaacuucaaucaguaugaagcaaugagcugugauuucaaugggggaaagauuaguguacaguacaaccugagucacagcuaugcuggggaugcagccaaccauuguggcacaauugcaaauggugucuuacagacuuucaugaggauggccuggggugggagcuacauugcucuugacucaggccgugacaggugggacugcauaaugaccaguuaucaauaucugauaauccaaaacacaaccugggaagaucacugccaauucucaagaccaucucccaucgguuaucuugggcuccucucacaaaggaccagagauauauauauuaguaggagacuacugggcacauuuacauggacauugucagauucugaagguaaggacacaccaggaggguauugucuaaccagauggaugcugauugaggcugagcugaaaugcuuugggaacacagcuguggcaaaaugcaaugagaaacaugaugaggaauuuugugauaugcuaaggcuguuugacuucaacaaacaagccauucaaagguuaaaagcugaggcacaaaugagcauucaguugaucaacaaagcagugaaugcuuugauaaacgaccaacuaauaaugaagaaccaucuacgggacaucaugggaauuccauacuguaauuacagcaaguacugguaccucaaccacacaacuacugggaaaacaucacugccuaaauguuggcuugugucgaaugguucauacuuaaacgagacucacuuuucugaugacauugaacaacaagcugacaauaugaucacugagauguuacagaaggaauacauggaaaggcaggggaagacaccauugggucuaguugaccucuuuguguucagcacaaguuucuaucucauuagcaucuuccuucauuuggucaaaauaccaacucauaggcauguuguaggcaagucgugucccaagccucacagauugaaucacaugggcauaugcuccugcggacucuauggacagccugguguaccugugaaauggaagagaugaggacuagugcaucacauuuaaaagcaucucagccuaccaugagaauaagagaaagaaaaugaagaucaauagcuuauucaucucuuuuucuuuuucguugguguaaagccaacacccugucuaaaaaacauaaauuucuuuaaucauuuugccucuuuucucugugcuucaauuaauaaaaaauggaaagaaccuagaucuaaaaaaaaaaaaaaaaaaaaaaaaaaaaaaaaaaaaaaaaaaaaaaaaaaaaaaaaaaaaaaaaugcaucccccccccccccccccccccccccccccccaaaggcucuuuucagagccaccagaauu

SEQ ID NO: 3082 - RNA, 1858 nt, Artificial Sequence
  mRNA product Design i-2 comprising derived and/or modified sequence from MOPV/LASV reassortant(IGS-1;Clade IV)__AFY05576__GPC (wt)
ggggcgcugccuacggagguggcagccaucuccuucucggcaucaagcuuaccaugggacaaauagugacauucuuccaggaagugccucauguaauagaagaggugaugaacauuguucucauugcacugucuguacuagcagugcugaaaggucuguacaauuuugcaacguguggccuuguugguuuggucacuuuccuccuguugugugguaggucuugcacaaccagucuuuauaaagggguuuaugagcuucagacucuggaacuaaacauggagacacucaauaugaccaugccucucuccugcacaaagaacaacagucaucauuauauaauggugggcaaugagacaggacuagaacugaccuugaccaacacgagcauuauuaaucacaaauuuugcaaucugucugaugcccacaaaaagaaccucuaugaccacgcucuuaugagcauaaucucaacuuuccacuuguccauccccaacuucaaucaguaugaggcaaugagcugcgauuuuaaugggggaaagauuagugugcaguacaaccugagucacagcuaugcuggggaugcagccaaccauugugguacuguugcaaaugguguguuacagacuuuuaugaggauggcuuggggugggagcuacauugcucuugacucaggccguggcaacugggacuguauuaugacuaguuaucaauaucugauaauccaaaauacaaccugggaagaucacugccaauucucgagaccaucucccaucgguuaucucgggcuccucucacaaaggacuagagauauuuauauuaguagaagauugcuaggcacauucacauggacacugucagauucugaaggugaagacacaccagggggauauugucugaccagguggaugcuaauugaggcugaacuaaaaugcuucgggaacacagcuguggcaaaauguaaugagaagcaugaugaggaauuuugugacaugcugaggcuguuugacuucaacaaacaagccauucaaagguugaaagcugaagcacaaaugagcauucaguugaucaacaaagcaguaaaugcuuugauaaaugaccaacuuauaaugaagaaccaucuacgggacaucaugggaauuccauacuguaauuacagcaaguauugguaccucaaccacacaacuacugggagaacaucacugcccaaauguuggcuuguaucaaaugguucauacuugaacgagacccacuuuucugaugauauugaacaacaagcugacaauaugaucacugagauguuacagaaggaguauauggagaggcaggggaagacaccauugggucuaguugaccucuuuguguucagcacaaguuucuaucuuauuagcaucuuccuucaccuagucaaaauaccaacucauaggcauauuguaggcaagucgugucccaaaccucacagauugaaucauaugggcauuuguuccuguggacucuacaaacagccuggugugccugugaaauggaagagaugaggacuagugcaucacauuuaaaagcaucucagccuaccaugagaauaagagaaagaaaaugaagaucaauagcuuauucaucucuuuuucuuuuucguugguguaaagccaacacccugucuaaaaaacauaaauuucuuuaaucauuuugccucuuuucucugugcuucaauuaauaaaaaauggaaagaaccuagaucuaaaaaaaaaaaaaaaaaaaaaaaaaaaaaaaaaaaaaaaaaaaaaaaaaaaaaaaaaaaaaaaaugcaucccccccccccccccccccccccccccccccaaaggcucuuuucagagccaccagaauu

SEQ ID NO: 3083 - RNA, 1858 nt, Artificial Sequence
  mRNA product Design i-2 comprising derived and/or modified sequence from LASV(LM765-SLE-2012;Clade IV)__AIT17814__GPC (wt)
ggggcgcugccuacggagguggcagccaucuccuucucggcaucaagcuuaccaugggacaaauagugacauucuuccaggaagugccccaugucauagaagaggugaugaacauuguucucauugcacuguccauacuagcagugcugaaaggucuguacaauuuugcaacauguggccucguuggcuuggucacuuuccuccuguuguguggcaggucuuguacaacuagccuuuacaaagggguuuaugagcuucagacucuggaacuaaacauggaaacacucaauaugaccaugccucucuccugcacaaagaacaauagucaucauuauauaauggugggcaaugagacaggacuagaacugaccuugaccaacacgagcauuauugaucauaaauuuugcaaucugucugaugcccacagaaagaaccucuaugaccacgcucuuaugagcauuaucucaacuuuccacuugucuaucccuaacuucaaucaguaugaggcaaugagcugcgauuucaaugggggaaagauuaguguacaguacaaccugagucacagcuaugccaaggacgcagccgaccauuguggaacuguugcaaaugguguauuacagacuuucaugaggauggcuuggggugggagcuacaucgcucuugacucaggccguggcaggugggacuguauuaugacuaguuaucaauaucugauaauccaaaauacaaccugggaagaucacugccaauucucgagaccaucucccaucgguuaucucgggcuccucucacagaggaccagagauauuuauauuaguagaaggcuacuaggcacauucacauggacacugucagauucugaaggcaaggacacaccagggggauauugucuaaccagauggaugcuaauugaggcugagcuaaagugcuucgggaauacagcuguggcaaaauguaaugagaagcaugaugaggaauuuugugacaugcugagguuguuugacuuuaacaagcaagccauucaaagguugaaagcugaagcacaaaugagcauucaguugaucaacaaagcaguaaaugcuuugauaaaugaccaacuuauaaugaagaaccaucuacgggacaucauggggauuccauacuguaauuacagcaaguauugguaccucaaccacacaacuacuggaaaaacaucacugcccaaguguuggcuuguaucaaaugguucauaccugaacgagacccacuuuucugaugacauugaacaacaagcugacaacaugaucaccgagauguuacagaaggaguauauggagaggcaggggaagacaccauugggucugguugaccucuuuguguucagcacaagcuucuaucucauuagcaucuuccuucaccuaguuaaaauaccaacucauaggcauauuguaggcaagccgugucccaaaccucacagguugaaucauaugggcauuuguuccuguggacucuauaaacagccuggugugccuguaaaauggaagagaugaggacuagugcaucacauuuaaaagcaucucagccuaccaugagaauaagagaaagaaaaugaagaucaauagcuuauucaucucuuuuucuuuuucguugguguaaagccaacacccugucuaaaaaacauaaauuucuuuaaucauuuugccucuuuucucugugcuucaauuaauaaaaaauggaaagaaccuagaucuaaaaaaaaaaaaaaaaaaaaaaaaaaaaaaaaaaaaaaaaaaaaaaaaaaaaaaaaaaaaaaaaugcaucccccccccccccccccccccccccccccccaaaggcucuuuucagagccaccagaauu

SEQ ID NO: 3084 - RNA, 1858 nt, Artificial Sequence
  mRNA product Design i-2 comprising derived and/or modified sequence from LASV(LM776-SLE-2012;Clade IV)__AIT17824__GPC (wt)
ggggcgcugccuacggagguggcagccaucuccuucucggcaucaagcuuaccaugggacagauagugacauucuuccaggaagugccucauguaauagaagaggugaugaacauuguccucauugcgcugucuauauuagcagugcugaaaggucuguacaacuuugcaacauguggccucguugguuugguuacuuuccuccuguuguguggcaggucuugcacaaccaguguuuauaaaggggucuaugagcuucagacucuggaguuaaacauggagacacucaauaugaccaugccucucuccugcacaaagaauaacagucaucauuauauaaugguagguaaugagacaggacuagaacugaccuugaccaacacaagcauuauuaaucauaaauuuugcaaucugucugaugcccacaaaaagaaccucuaugaccaugcccuuaugagcauaauuucaacuuuccacuuguccauccccaacuucaaucaguaugaagcaaugagcugugauuucaaugggggaaagauuagugugcaguacaaccugagucacagcuaugcuggggaugcugccaaccauuguggcacuguugcaaauggugucuuacagacuuucaugaggauggcuuggggugggagcuacauugcucuugacucaggccauggcaagugggacuguauuaugacuaguuaucaauaucugauaauccaaaauacaaccugggaagaucacugccaauucucaagaccaucuccuaucgguuaucuugggcuucucucacaaaggaccagagauauuuauaucaguagaagacuacuaggcacauucacauggacacugucagauucugaaggcaaggacacaccagggggauauugucugaccagauggaugcugauugaagcugaauuaaaaugcuucgggaacacagcuguagcaaaauguaaugagaagcaugaugaggaauuuugugacauguugaggcuguuugacuucaacaaacaagccauucaaagguugaaagcugaagcacaaaugagcauucaguugaucaacaaggcaguaaaugccuugauaaaugaucaacuuauaaugaagaaccaucuacgggacaucaugggaaucccauacuguaauuacagcaaauauugguaccucaaccacacaacuacugggaaaacaucacugccuaaauguuggcuugucucaaaugggucauacuugaacgagacccacuuuucugaugauauugaacaacaagcugacaacaugaucacugagauguuacagaaggaguauauggagaggcaggggaagacaccauugggccuaguugaccucuuuguguucagcacaaguuucuaucucaucagcaucuuccuucaccuagucaaaauaccaacucauaggcauauuguaggcaagucguguccuaaaccucacagauugaaucacaugggcauauguuccuguggacucuacaaacagcccggugugccugugagauggaaaagaugaggacuagugcaucacauuuaaaagcaucucagccuaccaugagaauaagagaaagaaaaugaagaucaauagcuuauucaucucuuuuucuuuuucguugguguaaagccaacacccugucuaaaaaacauaaauuucuuuaaucauuuugccucuuuucucugugcuucaauuaauaaaaaauggaaagaaccuagaucuaaaaaaaaaaaaaaaaaaaaaaaaaaaaaaaaaaaaaaaaaaaaaaaaaaaaaaaaaaaaaaaaugcaucccccccccccccccccccccccccccccccaaaggcucuuuucagagccaccagaauu

SEQ ID NO: 3085 - RNA, 1858 nt, Artificial Sequence
  mRNA product Design i-2 comprising derived and/or modified sequence from LASV(Mad39;Clade IV)__ANH09722__GPC (wt)
ggggcgcugccuacggagguggcagccaucuccuucucggcaucaagcuuaccauggggcaaauugugacauucuuucaggaagugccucauguaauugaggaggugaugaacauuguacucauugcacuauccauacuggcagugcuaaagggucuguacaauguugcaacauguggccucauuggcuugguuaccuuccuccugcugugugguagaucuuguacaaccacucuuuauaaagggguuuaugagcuucaagcucuggaacuaaacauggaaacacucaacaugacuaugccucucucuugcacaaaaaacaacucucaucacuauauaagggugggcaaugaaacaggccuagaacugaccuugaccaacacaagccucauaaaucacaaguucugcaaucugucugaugcucacaaaaagaaccucuaugaucaugcucuuaugagcauaaucucaacuuuccauuuguccauccccaacuucaaucaguaugaagcaaugagcugugauuucaaugaugggaagaucaguguacaguacaaccuaagccacaccuacgcuggggauacagccaaccacugugguacuguugcgaacgguguuuuacagacuuucaugaggauggcuuggggugggaguuacauugcucuugauucaggccgugguggaugggacugcauuaugaccagcuaucaauauuugauaauucagaacacaaccugggaagaucacugucaguucucaagaccaucucccaucggguaccuugggcuccucucacaaagaaccagagacauuuauaucaguagaagacuacugggcacauucacauggacacuaucagauucugaggguaaagacacaccagggggguacugucuaacuagguggaugcugauugaagcugaauugaaaugcuuuggcaacacagcuguagcaaaaugcaaugagaagcaugaugaggaauuuugugauauguugaggcuauuugacuuuaacaaacaagccauucaaagauugaaagcugaagcacaaaugaguauucagcugaucaacaaagcagugaaugccuugauaaaugaucaacugauaaugaaaaaccauuugcgggacauuauggggauuccguacugcaacuacagcaaguauugguaucuuaaucacacagucaccggaaagacaucauuacccaaaugcuggcuuguaucaaauggcucauaccuaaacgagacccacuucucugaugauauugagcagcaagcugauaacaugauuacugagaugcuacagaaggaauacauggagagacaggggaagacaccacuuggucugguugaccucuuuguauuuagcacaaguuucuaucucauuagcauuuuccuucaccuagugaaaauaccaacucauaggcauguugugggcaaaccguguccuaaaccucacagacugaaccacauggguauauguucuuguggguucuacaagcaaccuggugugccugugagauggaagagaugaggacuagugcaucacauuuaaaagcaucucagccuaccaugagaauaagagaaagaaaaugaagaucaauagcuuauucaucucuuuuucuuuuucguugguguaaagccaacacccugucuaaaaaacauaaauuucuuuaaucauuuugccucuuuucucugugcuucaauuaauaaaaaauggaaagaaccuagaucuaaaaaaaaaaaaaaaaaaaaaaaaaaaaaaaaaaaaaaaaaaaaaaaaaaaaaaaaaaaaaaaaugcaucccccccccccccccccccccccccccccccaaaggcucuuuucagagccaccagaauu

SEQ ID NO: 3086 - RNA, 1858 nt, Artificial Sequence
  mRNA product Design i-2 comprising derived and/or modified sequence from LASV(Z0947-SLE-2011;Clade IV)__AIT17840__GPC (wt)
ggggcgcugccuacggagguggcagccaucuccuucucggcaucaagcuuaccaugggacaaauagugacauucuuccaggaagugccccaugucauagaagaggugaugaacaucguucucauugcacugucuauacuagcaguguugaaaggucuguacaauuuugcaacauguggccucguuggcuuggucacuuuccuccuguuguguggcaggucuugcacaauuagccuuuacaaggggguuuaugagcuucagacucuggaacuaaacauggaaacacucaauaugaccaugccucucuccuguacaaagaacaacagucaucauuauauaauggugggcaaugagacaggacuagaacugaccuugaccaacacgagcauuauuaaucauaaauuuugcaaucugucugaugcccacaaaaagaaccucuaugaccaugcucuuaugagcauuaucucaacuuuccacuuguccaucccuaacuucaaucaguaugaggcaaugagcugcgauuucaaugggggaaagauuagugugcaguacaaccugagucacagcuaugccggggacgcagccaaccauugugguacuguugcaaaugguguauuacagacuuucaugaggauggcuuggggugggagcuacaucgcucuugacucaggccgugacaggugggacuguauuaugacuaguuaucaauaucugauaauccaaaauacaaccugggaagaucacugccaauucucgagaccaucucccaucgguuaucucgggcuccucucacaaaggaccagagauauuuauauuaguagaaggcuacuaggcacauucacauggacacugucagauucugaaggcaaggacacaccagggggauauugucuaaccagauggaugcuaauugaggcugagcuaaagugcuucgggaacacagccguggcaaaauguaaugagaagcaugaugaggaauuuugugacaugcugagguuguuugacuuuaacaaacaagccauucaaagguugaaagcugaagcacaaaugagcauucaguugaucaacaaagcaguaaaugcuuugauaaaugaccaacuuauaaugaagaaccaucuacgggacaucauggggauuccauacuguaauuacagcaaguauugguaccucaaccacacaacuacuggaaaaacaucacugcccaaguguuggcuuguaucaaaugguucauaccugaacgagacccacuuuucugaugacaucgaacaacaagcugacaacaugaucacugagauguuacagaaggaguauauggagaggcaggggaagacaccauugggucugguugaccucuuuguguucagcacaagcuucuaucucauuagcaucuuccuucaccuaguuaaaauaccaacucauaggcauauuguaggcaagccgugucccaaaccucacagguugaaucauaugggcauuuguuccuguggacucuauaaacagccuggugugccugugaaauggaagagaugaggacuagugcaucacauuuaaaagcaucucagccuaccaugagaauaagagaaagaaaaugaagaucaauagcuuauucaucucuuuuucuuuuucguugguguaaagccaacacccugucuaaaaaacauaaauuucuuuaaucauuuugccucuuuucucugugcuucaauuaauaaaaaauggaaagaaccuagaucuaaaaaaaaaaaaaaaaaaaaaaaaaaaaaaaaaaaaaaaaaaaaaaaaaaaaaaaaaaaaaaaaugcaucccccccccccccccccccccccccccccccaaaggcucuuuucagagccaccagaauu

SEQ ID NO: 3087 - RNA, 1858 nt, Artificial Sequence
  mRNA product Design i-2 comprising derived and/or modified sequence from LASV(Josiah;Clade IV)__NP_694870__GPC (opt1) R6023/R6630
ggggcgcugccuacggagguggcagccaucuccuucucggcaucaagcuuaccaugggccagaucgugaccuucuuccaggaggucccccacgugaucgaggaggugaugaacaucguccugaucgcccucagcgugcuggccgugcugaaggggcucuacaacuucgcgaccugcggccuggucgggcuggugacguuccuccugcugugcggccgcuccugcaccaccagccucuacaaggggguguacgagcugcagacccuggagcucaacauggagacgcugaacaugaccaugccgcuguccugcaccaagaacaacagccaccacuacaucauggucggcaacgagaccggccucgagcugacgcugaccaacaccuccaucaucaaccacaaguucugcaaccucagcgacgcccacaagaagaaccuguacgaccacgcccugauguccaucaucagcaccuuccaccucuccauccccaacuucaaccaguacgaggccaugagcugcgacuucaacgggggcaagaucuccgugcaguacaaccugagccacuccuacgccggggacgcggccaaccacugcggcacgguggccaacgggguccugcagaccuucaugcggauggccuggggcggcagcuacaucgcgcucgacuccgggcgcggcaacugggacugcaucaugaccagcuaccaguaccugaucauccagaacaccacgugggaggaccacugccaguucucccggcccagccccaucggguaccugggccuccugucccagcgcacccgggacaucuacaucagccgccggcugcucggcaccuucaccuggacgcugagcgacuccgaggggaaggacaccccgggcggguacugccugacccgcuggaugcucaucgaggccgagcugaagugcuucggcaacaccgccguggccaagugcaacgagaagcacgacgaggaguucugcgacaugcugcggcuguucgacuucaacaagcaggccauccagcgccugaaggcggaggcccagaugagcauccagcugaucaacaaggccgugaacgcccucaucaacgaccagcugaucaugaagaaccaccuccgggacaucauggggauccccuacugcaacuacuccaaguacugguaccucaaccacacgaccaccggccgcaccagccugcccaagugcuggcuggucuccaacggcagcuaccucaacgagacgcacuucuccgacgacaucgagcagcaggccgacaacaugaucaccgagaugcugcagaaggaguacauggagcggcaggggaagacgccccugggccucguggaccuguucguguucagcaccuccuucuaccugaucagcaucuuccugcaccucgucaagaucccgacccaccgccacaucguggggaaguccugccccaagccccaccggcugaaccacaugggcaucugcagcugcgggcuguacaagcagcccggcgugccggucaaguggaagcgcugaggacuagugcaucacauuuaaaagcaucucagccuaccaugagaauaagagaaagaaaaugaagaucaauagcuuauucaucucuuuuucuuuuucguugguguaaagccaacacccugucuaaaaaacauaaauuucuuuaaucauuuugccucuuuucucugugcuucaauuaauaaaaaauggaaagaaccuagaucuaaaaaaaaaaaaaaaaaaaaaaaaaaaaaaaaaaaaaaaaaaaaaaaaaaaaaaaaaaaaaaaaugcaucccccccccccccccccccccccccccccccaaaggcucuuuucagagccaccagaauu

SEQ ID NO: 3088 - RNA, 1855 nt, Artificial Sequence
  mRNA product Design i-2 comprising derived and/or modified sequence from LASV(LP;Clade I)__AAF86701__GPC (opt1) R6026/R6631
ggggcgcugccuacggagguggcagccaucuccuucucggcaucaagcuuaccaugggccagaucaucaccuucuuccaggaggugccccacgucaucgaggaggugaugaacaucgugcugaucgcccucagccugcuggccauccucaaggggcuguacaacaucgcgaccugcggcaucaucgggcuggucgccuuccucuuccugugcggcaaguccugcagccugacgcucaagggcggguacgagcugcagacccuggagcucaacauggagacccugaacaugaccaugccgcuguccugcacgaagaacagcucccaccacuacauccgcgugggcaacgagaccgggcucgagcugacccugaccaacacgagcaucaucaaccacaaguucugcaaccucuccgacgcccacaagaagaaccuguacgaccacgcccugaugagcaucaucuccaccuuccaccucagcauccccaacuucaaccaguacgaggccauguccugcgacuucaacggcgggaagaucagcgugcaguacaaccugucccacagcuacgcgggcgacgccgccgagcacugcgggaccgucgccaacggcgugcugcagaccuucaugcggauggcguggggcgggcgcuacaucgcccucgacuccggcaaggggaacugggacugcaucaugacgagcuaccaguaccugaucauccagaacaccaccugggaggaccacugccaguucucccggcccagccccaucggcuaccugggccuccugucccagcgcacccgggacaucuacaucagccgccggcugcucgggacguucaccuggacccugagcgacuccgagggcaacgagacccccgggggcuacugccugacgcgcuggaugcucaucgaggccgagcugaagugcuucgggaacaccgccguggccaagugcaacgagaagcacgacgaggaguucugcgacaugcugcggcuguucgacuucaacaagcaggcgauccgccggcugaaggccgaggcccagaugagcauccagcugaucaacaaggccgucaacgcccucaucaacgaccagcugaucaugaagaaccaccuccgcgacaucaugggcauccccuacugcaacuacuccaaguacugguaccucaaccacaccagcuccggccggaccagccugcccaagugcuggcugaucuccaacgggagcuaccucaacgagacgcaguucuccgacgacaucgagcagcaggcggacaacaugaucaccgagaugcugcagaaggaguacaucgagcgccagggcaagaccccgcuggggcucguggacaucuucaucuucagcaccuccuucuaccugaucagcaucuuccugcaccugaucaagaucccgacgcaccggcacaucgugggcaagcccugccccaagccccaccgccucaaccacaugggggucugcuccugcggccuguacaagcacccgggcgugcccaccaaguggaagcggugaggacuagugcaucacauuuaaaagcaucucagccuaccaugagaauaagagaaagaaaaugaagaucaauagcuuauucaucucuuuuucuuuuucguugguguaaagccaacacccugucuaaaaaacauaaauuucuuuaaucauuuugccucuuuucucugugcuucaauuaauaaaaaauggaaagaaccuagaucuaaaaaaaaaaaaaaaaaaaaaaaaaaaaaaaaaaaaaaaaaaaaaaaaaaaaaaaaaaaaaaaaugcaucccccccccccccccccccccccccccccccaaaggcucuuuucagagccaccagaauu

SEQ ID NO: 3089 - RNA, 1855 nt, Artificial Sequence
  mRNA product Design i-2 comprising derived and/or modified sequence from LASV(803213;Clade II)__AAF86703__GPC (opt1) R6027/R6632
ggggcgcugccuacggagguggcagccaucuccuucucggcaucaagcuuaccaugggccagaucaucaccuucuuccaggaggugccccacgucaucgaggaggugaugaacaucgugcugaucgcccucagccugcuggccauccucaaggggaucuacaacgucgcgaccugcggccuguucgggcugaucuccuuccuccugcugugcggccgcagcugcuccgugacguacaaggggguguacgagcuccagacccuggagcugaacauggccaaccucaacaugaccaugccgcugagcugcaccaagaacaacucccaccacuacaucauggucggcaacgagacgggccuggagcucacccugaccaacaccagcaucaucaaccacaaguucugcaaccuguccgacgcccacaagaagaaccucuacgaccacgcccugaugagcaucaucuccacguuccaccugagcauccccaacuucaaccaguacgaggccauguccugcgacuucaacgggggcaagaucagcgugcaguacaaccucucccacagcuucgcgguggacgccgccaaccacugcgggaccaucgccaacggcguccugcagaccuucaugcggauggcguggggcggguccuacaucgcccuggacagcggcaaggggaacugggacugcaucaugaccuccuaccaguaccucaucauccagaacacgaccugggaggaccacugccaguucagccgccccucccccaucggcuaccuggggcugcucagccagcggacccgcgacaucuacaucagccggcgccugcugggcaccuucacguggacccucuccgacagcgagggcaacgaggcccccgggggcuacugccugacccgguggaugcugaucgaggccgagcucaagugcuucgggaacaccgccguggcgaagugcaacgagaagcacgacgaggaguucugcgacaugcugcgccuguucgacuucaacaagcaggccaucaagcggcucaagacggaggcccagauguccauccagcugaucaacaaggccgugaacgcccugaucaacgaccagcucaucaugaagaaccaccuccgcgacaucaugggcauccccuacugcaacuacagccgguacugguaccugaaccacaccgucaccgggaagaccucccugccccgcugcuggcuggugagcaacggcuccuaccugaacgagacgcacuucagcgacgacaucgagcagcaggcggacaacaugaucaccgagaugcuccagaaggaguacauggaccggcagggcaagaccccgcuggggcugguggaccucuucgucuucuccaccagcuucuaccugaucuccaucuuccugcaccuggugaagaucccgacgcaccgccacaucgugggcaagcccugccccaagccccaccggcucaaccacauggggaucugcagcugcggccuguacaagcacccggggguccccgugaaguggaagcgcugaggacuagugcaucacauuuaaaagcaucucagccuaccaugagaauaagagaaagaaaaugaagaucaauagcuuauucaucucuuuuucuuuuucguugguguaaagccaacacccugucuaaaaaacauaaauuucuuuaaucauuuugccucuuuucucugugcuucaauuaauaaaaaauggaaagaaccuagaucuaaaaaaaaaaaaaaaaaaaaaaaaaaaaaaaaaaaaaaaaaaaaaaaaaaaaaaaaaaaaaaaaugcaucccccccccccccccccccccccccccccccaaaggcucuuuucagagccaccagaauu

SEQ ID NO: 3090 - RNA, 1855 nt, Artificial Sequence
  mRNA product Design i-2 comprising derived and/or modified sequence from LASV(GA391;Clade III)__CAA36645__GPC (opt1) R6028/R6633
ggggcgcugccuacggagguggcagccaucuccuucucggcaucaagcuuaccaugggccagaucgugaccuucuuccaggaggucccccacgugaucgaggaggugaugaacaucguccugaucgcccucagcauccuggccauccugaaggggcucuacaacguggcgaccugcggccugaucgggcuggugacguuccuccugcuguccggccgcagcugcucccucaucuacaaggggaccuacgagcugcagacccuggagcucaacauggagacccugaacaugacgaugccgcugagcugcaccaagaacaacucccaccacuacauccgggucggcaacgagaccggccucgagcugacccugacgaacaccagcauccucaaccacaaguucugcaaccuguccgacgcccacaagcgcaaccuguacgaccacagccucauguccaucaucagcaccuuccaccuguccauccccaacuucaaccaguacgaggccaugagcugcgacuucaacgggggcaagaucaccgugcaguacaaccugucccacagcuucgccguggacgccgcggggcacugcggcacgcucgccaacgggguccugcagaccuucaugcggauggccuggggcggcuccuacaucgcccuggacagcgggcgcggcaacugggacugcaucaugaccuccuaccaguaccucaucauccagaacaccacgugggacgaccacugccaguucagccggcccucccccaucggguaccugggccugcucagccagcgcacccgggacaucuacaucagccgccggcugcugggcaccuucaccuggacgcucuccgacagcgaggggaacgagaccccgggcggguacugccugacccgcuggaugcugaucgaggcggagcucaagugcuucggcaacaccgccguggccaagugcaacgagaagcacgacgaggaguucugcgacaugcugcggcuguucgacuucaacaagcaggccauccgccggcucaagacggaggcccagauguccauccagcugaucaacaaggcggugaacgcccugaucaacgaccagcucaucaugaagaaccaccuccgcgacaucauggggauccccuacugcaacuacagccgguacugguaccugaaccacaccuccaccggcaagaccagccugccccgcugcuggcugaucuccaacggcagcuaccugaacgagacgaaguucuccgacgacaucgagcagcaggccgacaacaugaucaccgagaugcuccagaaggaguacaucgaccggcaggggaagacgccccugggccuggucgaccuguucguguucagcaccuccuucuaccucaucagcaucuuccugcaccuggugaagaucccgacccaccgccacaucgucgggaagcccugccccaagccccaccggcucaaccacaugggcaucugcuccugcgggcuguacaagcagccgggcgugcccgugcgcuggaagcggugaggacuagugcaucacauuuaaaagcaucucagccuaccaugagaauaagagaaagaaaaugaagaucaauagcuuauucaucucuuuuucuuuuucguugguguaaagccaacacccugucuaaaaaacauaaauuucuuuaaucauuuugccucuuuucucugugcuucaauuaauaaaaaauggaaagaaccuagaucuaaaaaaaaaaaaaaaaaaaaaaaaaaaaaaaaaaaaaaaaaaaaaaaaaaaaaaaaaaaaaaaaugcaucccccccccccccccccccccccccccccccaaaggcucuuuucagagccaccagaauu

SEQ ID NO: 3091 - RNA, 1858 nt, Artificial Sequence
  mRNA product Design i-2 comprising derived and/or modified sequence from LASV(AV;Clade V)__CCA30314__GPC (opt1)
ggggcgcugccuacggagguggcagccaucuccuucucggcaucaagcuuaccaugggccagaucgugaccuucuuccaggaggucccccacgugaucgaggaggugaugaacaucguccugaucgcccucagcauccuggccgugcugaaggggcucuacaacaucgcgaccugcggccugaucgggcugaucacguuccuccugcugugcggccgcuccugcagcuccaaccucuacaaggggguguacgagcugcagagccuggaccucaacauggagacccugaacaugaccaugccgcuguccugcaccaagaacaacagccaccacuacauccgggucggcaacgacacgggccucgagcugacccugaccaacaccuccauccucaaccacaaguucugcaaccugagcgacgcccacaagaaggaccuguacgaccacgcccucauguccaucaucagcacguuccaccuguccauccccaacuucaaccaguacgaggccaugagcugcgacuucaacgggggcaagaucuccgugcaguacaaccugagccacuccuacgccaucgacgcggccaaccacugcgggaccguggccaacggcauccuccagaccuucaugcgcauggccuggggcgggagcuacaucgcgcuggacuccggccgggggaacugggacugcaucaugaccagcuaccaguaccugaucauccagaacacgaccugggagaaccacugccaguucucccgccccagccccaucggcuaccucgggcugcugagccagcggacccgcgacaucuacaucucccggcgccuccugggcaccuucacguggacccugagcgacuccgagggcaacgccacccccgggggcuacugccucacccgguggaugcugaucgaggccgagcugaagugcuucgggaacacggccgucgccaagugcaacgagaagcacgacgaggaguucugcgacaugcuccgccuguucgacuucaacaagcaggcgaucagccggcugaaguccgaggcccagaugagcauccagcucaucaacaaggccgugaacgcccugaucaacgaccagcugaucaugaagaaccaccuccgcgacaucaugggcauccccuacugcaacuacuccaaguacugguaccugaaccacaccaucaccgggaagaccagccugcccaagugcuggcucguguccaacggcagcuaccugaacgagacgcacuucuccgacgacaucgagcagcaggccgacaacaugaucaccgagaugcugcagaaggaguacauggagcggcagggcaagaccccgcucgggcuggucgaccuguucguguucagcaccuccuucuaccugaucagcaucuuccuccgccuggugaagaucccgacgcaccggcacaucgucggcaagcccugccccaagccccaccgccugaaccacauggggaucugcuccugcggccucuacaagcagccgggggugcccgugcgguggaagcgcugaggacuagugcaucacauuuaaaagcaucucagccuaccaugagaauaagagaaagaaaaugaagaucaauagcuuauucaucucuuuuucuuuuucguugguguaaagccaacacccugucuaaaaaacauaaauuucuuuaaucauuuugccucuuuucucugugcuucaauuaauaaaaaauggaaagaaccuagaucuaaaaaaaaaaaaaaaaaaaaaaaaaaaaaaaaaaaaaaaaaaaaaaaaaaaaaaaaaaaaaaaaugcaucccccccccccccccccccccccccccccccaaaggcucuuuucagagccaccagaauu

SEQ ID NO: 3092 - RNA, 1855 nt, Artificial Sequence
  mRNA product Design i-2 comprising derived and/or modified sequence from LASV(Togo/2016/7082;Clade VI)__AMR44577__GPC (opt1)
ggggcgcugccuacggagguggcagccaucuccuucucggcaucaagcuuaccaugggccagaucaucaccuucuuccaggaggugccccacgucaucgaggaggugaugaacaucgugcugaucgcccucagccugcuggccauccucaagggggucuacaacguggcgaccugcggcaucaucgggcuggugacguuccuguuccucugcggccgcuccugcagccugaucuacaagggguccuacgagcugcagacccucgagcugaacauggagacccugaacaugaccaugccgcucagcugcacgaagaacuccagccaccacuacauccgggucggcaacgagaccggccuggagcugacccucaccaacacguccaucaucaaccacaaguucugcaaccugagcgacgcccacaagcgcaaccuguacgaccacgcccucauguccauccugagcaccuuccaccuguccauccccaacuucaaccaguacgaggccaugagcugcgacuucaacgggggcaagaucuccgugcaguacaaccucagccacgccuacgcgguggacgccgccgagcacugcgggaccgucgccaacggcgugcugcagaccuucaugcggauggcguggggcggguccuacaucgcccuggacagcggccgcgggaacugggacugcaucaugacguccuaccaguaccucaucauccagaacaccaccugggaggaccacugccaguucagccggcccucccccaucggcuaccuggggcugcucagccagcgcacccgggacaucuacaucagccgccggcugcugggcacguucaccuggacccucuccgacagcgagggcaacgagacccccgggggcuacugccugacgcgcuggaugcugaucgaggccgagcucaagugcuucgggaacaccgccguggccaagugcaacgagaagcacgacgaggaguucugcgacaugcugcggcuguucgacuucaacaagcaggcgauccagcgccucaaguccgaggcccagaugagcauccagcugaucaacaaggccgucaacgcccugaucaacgaccagcucaucaugaagaaccaccuccgggacaugaugggcauccccuacugcaacuacuccaaguacugguaccugaaccacaccagcuccgggcgcaccagccugcccaagugcuggcugguguccaacggcagcuaccugaacgagacgcacuucuccgacgacaucgagcagcaggccgacaacaugaucaccgagaugcuccagaaggaguacaucgaccggcagggcaagaccccgcuggggcugguggaccucuucgucuucagcaccuccuucuaccugaucagcaucuuccugcaccugaucaagaucccgacgcaccgccacaucgugggcaagcccugccccaagccccaccggcucaaccacauggggaucugcuccugcggccuguacaagcagccgggggugcccacccgcuggaagcggugaggacuagugcaucacauuuaaaagcaucucagccuaccaugagaauaagagaaagaaaaugaagaucaauagcuuauucaucucuuuuucuuuuucguugguguaaagccaacacccugucuaaaaaacauaaauuucuuuaaucauuuugccucuuuucucugugcuucaauuaauaaaaaauggaaagaaccuagaucuaaaaaaaaaaaaaaaaaaaaaaaaaaaaaaaaaaaaaaaaaaaaaaaaaaaaaaaaaaaaaaaaugcaucccccccccccccccccccccccccccccccaaaggcucuuuucagagccaccagaauu

SEQ ID NO: 3093 - RNA, 1855 nt, Artificial Sequence
  mRNA product Design i-2 comprising derived and/or modified sequence from LASV(KAK-428;Clade n.d. (VII))__ANH09740__GPC (opt1)
ggggcgcugccuacggagguggcagccaucuccuucucggcaucaagcuuaccaugggccagaucgugaccuucuuccaggaggucccccacgugaucgaggaggugaugaacaucguccugaucgcccucagccugcuggccauccucaaggggcuguacaacuucgcgaccugcggcgugaucgggcugaucacguuccuccugcugugcggccgcuccugcagcgccaccuacaaggggcaguacgagcuccagacccuggagcugaacauggagucccucaacaugaccaugccgcugagcugcacgaagaacaacucccaccacuacauccgggccggcaacaacaccggccuggagcucacccugaccaacacgagcaucaucucccacaaguucugcaaccugagcgacgcccacaagaagaaccucuacgaccacacccugauguccaucaucaccaccuuccaccugagcauccccaacuucaaccaguacgaggccauguccugcgacuucaacgggggcaagaucagcauccaguacaaccucucccacagcuacgcgggggacgccgcccagcacugcggcacgguggccaacgggguccugcagaccuucaugcgcauggcguggggcggcuccuaccuggcccucgacagcgggcggcgcggcugggacugcaucaucuccagcuaccaguaccugaucauccagaacaccaccugggacgaccacugccaguucucccggcccagccccaucggguaccugggcuucgugagccagaagacgcgcgacaucuacaucucccggcgccuccugggcaccuucaccuggacccugagcgacuccgaggggcacgacaugccgggcggguacugccucacgcgguggaugcugaucgaggccgaccugaagugcuucggcaacaccgccguggccaagugcaacgagaagcacgacgaggaguucugcgacauguggcgccucuucgacuucaacaagcaggcgauccagcggcugaaggccgaggcccagaugaacauccagcugaucaacaaggccgucaacgcccucaucaacgaccagcugaugaugaagaaccaccuccgcgacaucauggggauccccuacugcaacuacagcaaguucugguaccugaacaacaccaccacgggccggaccucccugccccgcugcuggcugaucagcaacggcuccuaccucaacgagacccacuucagcgacgacaucgagcagcaggcggacaacaugaucaccgagaugcugcagaaggaguacauggaccggcaggggaagacgccccugggccucguggaccuguucguguucuccaccagcuucuaccugaucaccaucuuccuccaccuggucaagaucccgacccaccgccacaucguggggaagcccugccccaagccccaccggcugaaccacaugggcaucugcuccugcgggcuguacaagcagccgggcgugcccguccgcuggaagcggugaggacuagugcaucacauuuaaaagcaucucagccuaccaugagaauaagagaaagaaaaugaagaucaauagcuuauucaucucuuuuucuuuuucguugguguaaagccaacacccugucuaaaaaacauaaauuucuuuaaucauuuugccucuuuucucugugcuucaauuaauaaaaaauggaaagaaccuagaucuaaaaaaaaaaaaaaaaaaaaaaaaaaaaaaaaaaaaaaaaaaaaaaaaaaaaaaaaaaaaaaaaugcaucccccccccccccccccccccccccccccccaaaggcucuuuucagagccaccagaauu

SEQ ID NO: 3094 - RNA, 1855 nt, Artificial Sequence; identical to SEQ ID NO: 3088
  mRNA product Design i-2 comprising derived and/or modified sequence from LASV(Pinneo-NIG-1969;Clade I)__AIT17836__GPC (opt1)

SEQ ID NO: 3095 - RNA, 1855 nt, Artificial Sequence
  mRNA product Design i-2 comprising derived and/or modified sequence from LASV(ISTH0009-NIG-2011;Clade II)__AIT17404__GPC (opt1)
ggggcgcugccuacggagguggcagccaucuccuucucggcaucaagcuuaccaugggccagaucaucaccuucuuccaggaggugccccacgucaucgaggaggugaugaacaucgugcugaucgcccucagccugcuggccauccucaaggggaucuacaacgucgcgaccugcggccuguucgggcugguguccuuccuccugcugugcggccgcagcugcuccacgaccuacaaggggguguacgagcuccagacccuggagcuggacauggccagccucaacaugaccaugccgcuguccugcacgaagaacaacagccaccacuacaucauggucggcaacgagaccggccuggagcucacccugaccaacacguccaucaucaaccacaaguucugcaaccugagcgacgcccacaagaagaaccucuacgaccacgcccugauguccaucaucagcaccuuccaccuguccauccccaacuucaaccaguacgaggccaugagcugcgacuucaacgggggcaagaucuccgugcaguacaaccucagccacgcguacgccguggacgccgccaaccacugcgggaccaucgcgaacggcguccugcagaccuucaugcggauggccuggggcggguccuacaucgcccuggacagcggcaagggguccugggacugcaucaugacgagcuaccaguaccucaucauccagaacaccaccugggaggaccacugccaguucucccgccccagccccaucggcuaccuggggcugcucagccagcggacccgcgacaucuacaucucccggcgccugcugggcacguucaccuggacccucagcgacuccgagggcaacgagacccccgggggcuacugccugacgcgguggaugcugaucgaggccgagcucaagugcuucgggaacaccgccguggcgaagugcaacgagaagcacgacgaggaguucugcgacaugcugcgccuguucgacuucaacaagcaggccauccggcgccucaagaccgaggcccagaugagcauccagcugaucaacaaggccgugaacgcccugaucaacgaccagcucaucaugaagaaccaccuccgggacaucaugggcaucccguacugcaacuacuccaaguacugguaccugaaccacaccgucacggggaagaccagccugccccgcugcuggcugguguccaacggcagcuaccugaacgagacccacuucuccgacgacaucgagcagcaggcggacaacaugaucaccgagcuccugcagaaggaguacauggaccggcagggcaagacgccccuggggcucguggaccuguucgucuucagcaccuccuucuaccugaucagcaucuuccugcaccucaucaagaucccgacccaccgccacaucaccggcaagcccugccccaagccccaccggcugaaccacauggggaucugcuccugcggccuguacaagcacccgggggugcccgugaaguggaagcgcugaggacuagugcaucacauuuaaaagcaucucagccuaccaugagaauaagagaaagaaaaugaagaucaauagcuuauucaucucuuuuucuuuuucguugguguaaagccaacacccugucuaaaaaacauaaauuucuuuaaucauuuugccucuuuucucugugcuucaauuaauaaaaaauggaaagaaccuagaucuaaaaaaaaaaaaaaaaaaaaaaaaaaaaaaaaaaaaaaaaaaaaaaaaaaaaaaaaaaaaaaaaugcaucccccccccccccccccccccccccccccccaaaggcucuuuucagagccaccagaauu

SEQ ID NO: 3096 - RNA, 1855 nt, Artificial Sequence
  mRNA product Design i-2 comprising derived and/or modified sequence from LASV(ISTH2010-NIG-2012;Clade II)__AIT17482__GPC (opt1)
ggggcgcugccuacggagguggcagccaucuccuucucggcaucaagcuuaccaugggccagaucaucaccuucuuccaggaggugccccacgucaucgaggaggugaugaacaucgugcugaucgcccucagccugcuggccauccucaaggggaucuacaacgucgcgaccugcggccuguucgggcugguguccuuccuccugcugugcggccgcagcugcuccacgaccuacaaggggguguacgagcuccagacccuggagcuggacauggccagccucaacaugaccaugccgcuguccugcacgaagaacaacagccaccacuacaucauggucggcaacgagaccggccuggagcucacccugaccaacacguccaucaucaaccacaaguucugcaaccugagcgacgcccacaagaagaaccucuacgaccacgcccugauguccaucaucagcaccuuccaccuguccauccccaacuucaaccaguacgaggccaugagcugcgacuucaacgggggcaagaucuccgugcaguacaaccucagccacgcguacgccguggacgccgccaaccacugcgggaccaucgcgaacggcguccugcagaccuucaugcggauggccuggggcggguccuacaucgcccuggacagcggcaagggguccugggacugcaucaugacgagcuaccaguaccucaucauccagaacaucaccugggaggaccacugccaguucucccgccccagccccaucggcuaccuggggcugcucagccagcggacccgcgacaucuacaucucccggcgccugcugggcaccuucacguggacccucagcgacuccgagggcaacgagacccccgggggcuacugccugacccgguggaugcugaucgaggccgagcucaagugcuucgggaacacggccguggcgaagugcaacgagaagcacgacgaggaguucugcgacaugcugcgccuguucgacuucaacaagcaggccauccggcgccucaagaccgaggcccagaugagcauccagcugaucaacaaggccgugaacgcccugaucaacgaccagcucaucaugaagaaccaccuccgggacaucaugggcauccccuacugcaacuacuccaaguacugguaccugaaccacaccgucaccgggaagacgagccugccccgcugcuggcugguguccaacggcagcuaccugaacgagacccacuucuccgacgacaucgagcagcaggcggacaacaugaucaccgagcuccugcagaaggaguacaucgaccggcagggcaagaccccgcuggggcucguggaccuguucgucuucagcacguccuucuaccugaucagcaucuuccugcaccucgugaagaucccgacccaccgccacguggucggcaagcccugccccaagccccaccggcugaaccacauggggaucugcuccugcggccuguacaagcacccgggggugcccgugaaguggaagcgcugaggacuagugcaucacauuuaaaagcaucucagccuaccaugagaauaagagaaagaaaaugaagaucaauagcuuauucaucucuuuuucuuuuucguugguguaaagccaacacccugucuaaaaaacauaaauuucuuuaaucauuuugccucuuuucucugugcuucaauuaauaaaaaauggaaagaaccuagaucuaaaaaaaaaaaaaaaaaaaaaaaaaaaaaaaaaaaaaaaaaaaaaaaaaaaaaaaaaaaaaaaaugcaucccccccccccccccccccccccccccccccaaaggcucuuuucagagccaccagaauu

SEQ ID NO: 3097 - RNA, 1855 nt, Artificial Sequence
  mRNA product Design i-2 comprising derived and/or modified sequence from LASV(Lassa virus/H.sapiens-wt/NGA/2015/ISTH_0543;Clade II)__AVO03639__GPC (opt1)
ggggcgcugccuacggagguggcagccaucuccuucucggcaucaagcuuaccaugggccagaucaucaccuucuuccaggaggugccccacgucaucgaggaggugaugaacaucgugcugaucgcccucagccugcuggccauccucaaggggaucuacaacgucgcgaccugcggccuguucgggcugguguccuuccuccugcugugcggccgcagcugcuccacgaccuacaaggggguguacgagcuccagacccuggagcuggacauggccaaccucaacaugaccaugccgcugagcugcacgaagaacaacucccaccacuacaucauggucggcaacgagaccggccuggagcucacccugaccaacacgagcaucaucaaccacaaguucugcaaccuguccgacgcccacaagaagaaccucuacgaccacgcccugaugagcaucaucuccaccuuccaccugagcauccccaacuucaaccaguacgaggccauguccugcgacuucaacgggggcaagaucagcgugcaguacaaccucucccacaccuacgcgguggacgccgccaaccacugcgggaccaucgccaacggcguccugcagacguucaugcggauggcguggggcgggagcuacaucgcccuggacuccggcaaggggagcugggacugcaucaugaccuccuaccaguaccucgugauccagaacaccaccugggaggaccacugccaguucagccgccccucccccaucggcuaccuggggcugcucagccagcggacgcgcgacaucuacaucagccggcgccugcugggcaccuucaccuggacccucuccgacagcgagggcaacgagacgcccgggggcuacugccugacccgguggaugcugaucgaggccgagcucaagugcuucgggaacaccgccguggccaagugcaacgagaagcacgacgaggaguucugcgacaugcugcgccuguucgacuucaacaagcaggcgauccggcgccucaagaccgaggcccagauguccauccagcugaucaacaaggccgucaacgcccugaucaacgaccagcucaucaugaagaaccaccuccgggacaucaugggcauccccuacugcaacuacagcaaguacugguaccugaaccacacggugaccgggaagaccucccugccccgcugcuggcuggugagcaacggcuccuaccugaacgagacccacuucagcgacgacaucgagcagcaggccgacaacaugaucacggagcuccugcagaaggaguacaucgaccggcagggcaagaccccgcuggggcucgucgaccuguucguguucuccaccagcuucuaccugaucuccaucuuccugcaccucgugaagaucccgacccaccgccacaucacgggcaagcccugccccaagccccaccggcugaaccacauggggaucugcagcugcggccuguacaagcacccggggguccccgugaaguggaagcgcugaggacuagugcaucacauuuaaaagcaucucagccuaccaugagaauaagagaaagaaaaugaagaucaauagcuuauucaucucuuuuucuuuuucguugguguaaagccaacacccugucuaaaaaacauaaauuucuuuaaucauuuugccucuuuucucugugcuucaauuaauaaaaaauggaaagaaccuagaucuaaaaaaaaaaaaaaaaaaaaaaaaaaaaaaaaaaaaaaaaaaaaaaaaaaaaaaaaaaaaaaaaugcaucccccccccccccccccccccccccccccccaaaggcucuuuucagagccaccagaauu

SEQ ID NO: 3098 - RNA, 1855 nt, Artificial Sequence
  mRNA product Design i-2 comprising derived and/or modified sequence from LASV(Lassa virus/H.sapiens-wt/NGA/2016/ISTH_0009;Clade II)__AVO03571__GPC (opt1)
ggggcgcugccuacggagguggcagccaucuccuucucggcaucaagcuuaccaugggccagaucaucaccuucuuccaggaggugccccacgucaucgaggaggugaugaacaucgugcugaucgcccucagccugcuggccauccucaaggggaucuacaacgucgcgaccugcggccugcuggggcucguguccuuccugcugcucugcggccgcagcugcuccacgaccuacaaggggguguacgagcugcagacccuggagcucgacauggccagccugaacaugaccaugccgcuguccugcacgaagaacaacagccaccacuacaucauggucggcaacgagaccggccucgagcugacccugaccaacacguccaucaucaaccacaaguucugcaaccucagcgacgcccacaagaagaaccuguacgaccacgcccugauguccaucaucagcaccuuccaccucuccauccccaacuucaaccaguacgaggccaugagcugcgacuucaacgggggccggaucuccgugcaguacaaccugagccacuccuacgcgguggacgccgccaaccacugcgggaccaucgccaacggcguccugcagaccuucaugcgcauggcguggggcgggagcuacaucgcccucgacuccggcaaggggagcugggacugcaucaugacguccuaccaguaccugaucauccagaacaccaccugggaggaccacugccaguucagccggcccagccccaucggcuaccuggggcuccugucccagcgcacccgggacaucuacaucagccgccggcugcucggcacguucaccuggacccuguccgacagcgagggcaacgagacccccgggggcuacugccugacgcgcuggaugcucaucgaggccgagcugaagugcuucgggaacaccgccguggccaagugcaacgagaagcacgacgaggaguucugcgacaugcugcggcuguucgacuucaacaagcaggcgauccgccggcugaagaccgaggcccagauguccauccagcugaucaacaaggccgugaacgcccucaucaacgaccagcugaucaugaagaaccaccuccgcgacaucaugggcaucccguacugcaacuacagcaaguacugguaccucaaccacaccgucacggggaagaccucccugccccggugcuggcuggugagcaacggcuccuaccucaacgagacccacuucagcgacgacaucgagcagcaggccgacaacaugaucaccgagcugcugcagaaggaguacaucgaccgccagggcaagacgccccucgggcugguggaccuguucgucuucuccaccagcuucuaccugaucuccaucuuccuccaccuggugaagaucccgacccaccggcacaucaccggcaagcccugccccaagccccaccgccugaaccacauggggaucugcagcugcggccucuacaaccacccgggggugcccgucaaguggaagcggugaggacuagugcaucacauuuaaaagcaucucagccuaccaugagaauaagagaaagaaaaugaagaucaauagcuuauucaucucuuuuucuuuuucguugguguaaagccaacacccugucuaaaaaacauaaauuucuuuaaucauuuugccucuuuucucugugcuucaauuaauaaaaaauggaaagaaccuagaucuaaaaaaaaaaaaaaaaaaaaaaaaaaaaaaaaaaaaaaaaaaaaaaaaaaaaaaaaaaaaaaaaugcaucccccccccccccccccccccccccccccccaaaggcucuuuucagagccaccagaauu

SEQ ID NO: 3099 - RNA, 1855 nt, Artificial Sequence
  mRNA product Design i-2 comprising derived and/or modified sequence from LASV(Lassa virus/H.sapiens-wt/NGA/2016/ISTH_0017;Clade II)__AVO03567__GPC (opt1)
ggggcgcugccuacggagguggcagccaucuccuucucggcaucaagcuuaccaugggccagaucaucaccuucuuccaggaggugccccacgucaucgaggaggugaugaacaucgugcugaucgcccucagccugcuggccauccucaaggggaucuacaacgucgcgaccugcggccuguucgggcugguguccuuccuccugcugugcggccgcagcugcuccacgaccuacaaggggguguacgagcuccagacccuggagcuggacauggccagccucaacaugaccaugccgcuguccugcacgaagaacaacagccaccacuacaucauggucggcaacgagaccggccuggagcucacccugaccaacacguccaucaucaaccacaaguucugcaaccugagcgacgcccacaagaagaaccucuacgaccacgcccugauguccaucaucagcaccuuccaccuguccauccccaacuucaaccaguacgaggccaugagcugcgacuucaacgggggcaagaucuccgugcaguacaaccucagccacaccuacgcgaucgacgccgccaaccacugcgggaccaucgccaacggcgugcugcagacguucaugcggauggcguggggcggguccuacaucgcccuggacagcggcaagggguccugggacugcaucaugaccagcuaccaguaccucaucauccagaacaccaccugggaggaccacugccaguucucccgccccagccccaucggcuaccuggggcugcucagccagcggacgcgcgacaucuacaucucccggcgccugcugggcaccuucaccuggacccucagcgacuccgagggcaacgagacgcccgggggcuacugccugacccgguggaugcugaucgaggccgagcucaagugcuucgggaacaccgccgucgccaagugcaacgagaagcacgacgaggaguucugcgacaugcugcgccuguucgacuucaacaagcaggcgauccggcgccucaagaccgaggcccagaugagcauccagcugaucaacaaggccgugaacgcccugaucaacgaccagcucaucaugaagaaccaccuccgggacaucaugggcauccccuacugcaacuacuccaaguacugguaccugaaccacacggugaccgggaagaccagccugccccgcugcuggcuggucuccaacggcagcuaccugaacgagacccacuucuccgacgacaucgagcagcaggccgacaacaugaucacggagcuccugcagaaggaguacauggaccggcagggcaagaccccgcuggggcucguggaccuguucguguucagcaccuccuucuaccugaucagcaucuuccugcaccucguccgcaucccgacccaccggcacgugaucggcaagcccugccccaagccccaccgccugaaccacauggggaucugcuccugcggccuguacaagcacccgggggugcccgucaaguggaagcggugaggacuagugcaucacauuuaaaagcaucucagccuaccaugagaauaagagaaagaaaaugaagaucaauagcuuauucaucucuuuuucuuuuucguugguguaaagccaacacccugucuaaaaaacauaaauuucuuuaaucauuuugccucuuuucucugugcuucaauuaauaaaaaauggaaagaaccuagaucuaaaaaaaaaaaaaaaaaaaaaaaaaaaaaaaaaaaaaaaaaaaaaaaaaaaaaaaaaaaaaaaaugcaucccccccccccccccccccccccccccccccaaaggcucuuuucagagccaccagaauu

SEQ ID NO: 3100 - RNA, 1855 nt, Artificial Sequence
  mRNA product Design i-2 comprising derived and/or modified sequence from LASV(Lassa virus/H.sapiens-wt/NGA/2018/ISTH_0959;Clade II)__AVV65099__GPC (opt1)
ggggcgcugccuacggagguggcagccaucuccuucucggcaucaagcuuaccaugggccagaucaucaccuucuuccaggaggugccccacgucaucgaggaggugaugaacaucgugcugaucgcccucagccugcuggccauccucaaggggaucuacaacgucgugaccugcggccuguucgggcugguguccuuccuccugcugugcggccgcagcugcuccacgaccuacaagggggucuacgagcuccagacccuggagcuggacauggcgagccucaacaugaccaugccgcuguccugcacgaagaacaacagccaccacuacaucauggugggcaacgagaccggccuggagcucacccugaccaacacguccaucaucaaccacaaguucugcaaccugagcgacgcccacaagaagaaccucuacgaccacgcccugauguccaucaucagcaccuuccaccuguccauccccaacuucaaccaguacgaggccaugagcugcgacuucaacgggggcaagaucuccgugcaguacaaccucagccacgccuacgcgaucgacgccgccaaccacugcgggaccaucgccaacggcguccugcagaccuucaugcggauggcguggggcggguccuacaucgcccuggacagcggcaagggguccugggacugcaucaugacgagcuaccaguaccucaucauccagaacaccaccugggaggaccacugccaguucucccgccccagccccaucggcuaccuggggcugcucagccagcggacccgcgacaucuacaucucccggcgccugcugggcacguucaccuggacccucagcgacuccgagggcaacgagacccccgggggcuacugccugacgcgguggaugcugaucgaggccgagcucaagugcuucgggaacaccgccguggccaagugcaacgagaagcacgacgaggaguucugcgacaugcugcgccuguucgacuucaacaagcaggcgauccggcgccucaagaccgaggcccagaugagcauccagcugaucaacaaggccgugaacgcccugaucaacgaccagcucaucaugaagaaccaccuccgggacaucaugggcaucccguacugcaacuacuccaaguacugguaccugaaccacaccgucacggggaagaccagccugccccgcugcuggcugguguccaacggcagcuaccugaacgagacccacuucuccgacgacaucgagcagcaggccgacaacaugaucaccgagcuccugcagaaggaguacaucgaccggcagggcaagacgccccuggggcucguggaccuguucgucuucagcaccuccuucuaccugaucagcaucuuccugcaccucgugaagaucccgacccaccgccacgugaucggcaagcccugccccaagccccaccggcugaaccacauggggaucugcuccugcggccuguacaagcacccggggguccccgugaaguggaagcgcugaggacuagugcaucacauuuaaaagcaucucagccuaccaugagaauaagagaaagaaaaugaagaucaauagcuuauucaucucuuuuucuuuuucguugguguaaagccaacacccugucuaaaaaacauaaauuucuuuaaucauuuugccucuuuucucugugcuucaauuaauaaaaaauggaaagaaccuagaucuaaaaaaaaaaaaaaaaaaaaaaaaaaaaaaaaaaaaaaaaaaaaaaaaaaaaaaaaaaaaaaaaugcaucccccccccccccccccccccccccccccccaaaggcucuuuucagagccaccagaauu

SEQ ID NO: 3101 - RNA, 1855 nt, Artificial Sequence
  mRNA product Design i-2 comprising derived and/or modified sequence from LASV(LASV003-NIG-2008;Clade II)__AIT17580__GPC (opt1)
ggggcgcugccuacggagguggcagccaucuccuucucggcaucaagcuuaccaugggccagaucaucaccuucuuccaggaggugccccacgucaucgaggaggugaugaacaucgugcugaucgcccucagccugcuggccauccucaaggggaucuacaacgucgcgaccugcggccuguucgggcugguguccuuccuccugcugugcggccgcagcugcuccacgaccuacaaggggguguacgagcuccagacccuggagcuggacauggccagccucaacaugaccaugccgcuguccugcacgaagaacaacagccaccacuacaucauggucggcaacgagaccggccuggagcucacccugaccaacacguccaucaucaaccacaaguucugcaaccugagcgacgcccacaagaagaaccucuacgaccacgcccugauguccaucaucagcaccuuccaccuguccauccccaacuucaaccaguacgaggccaugagcugcgacuucaacgggggcaagaucuccgugcaguacaaccucagccacaccuacgcgguggacgccgccaaccacugcgggaccaucgccaacggcguccugcagacguucaugcggauggcguggggcggguccuacaucgcccuggacagcggcaagggguccugggacugcaucaugaccagcuaccaguaccucaucauccagaacaccaccugggaggaccacugccaguucucccgccccagccccaucggcuaccuggggcugcucagccagcggacgcgcgacaucuacaucucccggcgccugcugggcaccuucaccuggacccucagcgacuccgagagcaacgagacgccgggcggguacugccugacccgguggaugcugaucgaggccgagcucaagugcuucggcaacaccgccguggccaagugcaacgagaagcacgacgaggaguucugcgacaugcugcgccuguucgacuucaacaagcaggcgauccggcgccucaaggccgaggcccagauguccauccagcugaucaacaaggccgugaacgcccugaucaacgaccagcucaucaugaagaaccaccuccgggacaucauggggauccccuacugcaacuacagcaaguacugguaccugaaccacaccgucacgggccgcaccucccugccccggugcuggcuggugagcaacggguccuaccugaacgagacccacuucagcgacgacaucgagcagcaggcggacaacaugaucaccgagcuccugcagaaggaguacauggaccgccagggcaagacgccccugggccucguggaccuguucgucuucuccaccagcuucuaccugaucuccaucuuccugcaccucgugaagaucccgacccaccggcacgugaucgggaagcccugccccaagccccaccgccugaaccacaugggcaucugcagcugcgggcuguacaagcacccgggcguccccgugaaguggaagcggugaggacuagugcaucacauuuaaaagcaucucagccuaccaugagaauaagagaaagaaaaugaagaucaauagcuuauucaucucuuuuucuuuuucguugguguaaagccaacacccugucuaaaaaacauaaauuucuuuaaucauuuugccucuuuucucugugcuucaauuaauaaaaaauggaaagaaccuagaucuaaaaaaaaaaaaaaaaaaaaaaaaaaaaaaaaaaaaaaaaaaaaaaaaaaaaaaaaaaaaaaaaugcaucccccccccccccccccccccccccccccccaaaggcucuuuucagagccaccagaauu

SEQ ID NO: 3102 - RNA, 1855 nt, Artificial Sequence
  mRNA product Design i-2 comprising derived and/or modified sequence from LASV(LASV035-NIG-2009;Clade II)__AIT17588__GPC (opt1)
ggggcgcugccuacggagguggcagccaucuccuucucggcaucaagcuuaccaugggccagaucaucaccuucuuccaggaggugccccacgucaucgaggaggugaugaacaucgugcugaucgcccucagccugcuggccauccucaaggggaucuacaacgucgcgaccugcggccuguucgggcugguguccuuccuccugcugugcggccgcagcugcuccacgaccuacaaggggguguacgagcuccagacccuggagcuggacauggccagccucaacaugaccaugccgcuguccugcacgaagaacaacagccaccacuacaucauggucggcaacgagaccggccuggagcucacccugaccaacacguccaucaucaaccacaaguucugcaaccugagcgacgcccacaagaagaaccucuacgaccacgcccugauguccaucaucagcaccuuccaccuguccauccccaacuucaaccaguacgaggccaugagcugcgacuucaacgggggcaagaucuccgugcaguacaaccucagccacgcguacgccguggacgccgccaaccacugcgggaccaucgcgaacggcguccugcagaccuucaugcggauggccuggggcggguccuacaucgcccuggacagcggcaagggguccugggacugcaucaugacgagcuaccaguaccucaucauccagaacaccaccugggaggaccacugccaguucucccgccccagccccaucggcuaccuggggcugcucagccagcggacccgcgacaucuacaucucccggcgccugcugggcacguucaccuggacccucagcgacuccgagggcaacgagacccccgggggcuacugccugacgcgguggaugcugaucgaggccgagcucaagugcuucgggaacaccgccguggcgaagugcaacgagaagcacgacgaggaguucugcgacaugcugcgccuguucgacuucaacaagcaggccauccggcgccucaaggccgaggcccagaugagcauccagcugaucaacaaggccgugaacgcgcugaucaacgaccagcucaucaugaagaaccaccuccgggacaucaugggcauccccuacugcaacuacuccaaguacugguaccugaaccacaccgucaccgggaagacgagccugccccgcugcuggcugguguccaacggcagcuaccugaacgagacccacuucuccgacgacaucgagcagcaggccgacaacaugaucaccgagcuccugcagaaggaguacaucgaccggcagggcaagaccccgcuggggcucguggaccuguucgucuucagcacguccuucuaccugaucagcaucuuccugcaccucgugaagaucccgacccaccgccacgugaucggcaagcccugccccaagccccaccggcugaaccacauggggaucugcuccugcggccuguacaagcacccggggguccccgugaaguggaagcgcugaggacuagugcaucacauuuaaaagcaucucagccuaccaugagaauaagagaaagaaaaugaagaucaauagcuuauucaucucuuuuucuuuuucguugguguaaagccaacacccugucuaaaaaacauaaauuucuuuaaucauuuugccucuuuucucugugcuucaauuaauaaaaaauggaaagaaccuagaucuaaaaaaaaaaaaaaaaaaaaaaaaaaaaaaaaaaaaaaaaaaaaaaaaaaaaaaaaaaaaaaaaugcaucccccccccccccccccccccccccccccccaaaggcucuuuucagagccaccagaauu

SEQ ID NO: 3103 - RNA, 1855 nt, Artificial Sequence
  mRNA product Design i-2 comprising derived and/or modified sequence from LASV(LASV1000-NIG-2009;Clade II)__AIT17782__GPC (opt1)
ggggcgcugccuacggagguggcagccaucuccuucucggcaucaagcuuaccaugggccagaucaucaccuucuuccaggaggugccccacgucaucgaggaggugaugaacaucgugcugaucgcccucagccugcuggccauccucaaggggaucuacaacgucgcgaccugcggccuguucgggcugguguccuuccuccugcugugcggccgcagcugcuccacgaccuacaaggggguguacgagcuccagacccuggagcuggacauggccagccucaacaugaccaugccgcuguccugcacgaagaacaacagccaccacuacaucauggucggcaacgagaccggccuggagcucacccugaccaacacguccaucaucaaccacaaguucugcaaccugagcgacgcccacaagaagaaccucuacgaccacgcccugauguccaucaucagcaccuuccaccuguccauccccaacuucaaccaguacgaggccaugagcugcgacuucaacgggggcaagaucuccgugcaguacaaccucagccacaccuacgcgguggacgccgccaaccacugcgggaccaucgccaacggcguccugcagacguucaugcggauggcguggggcggguccuacaucgcccuggacagcggcaagggguccugggacugcaucaugaccagcuaccaguaccucaucauccagaacaccaccugggaggaccacugccaguucucccgccccagccccaucggcuaccuggggcugcucagccagcggacgcgcgacaucuacaucucccggcgccugcugggcaccuucaccuggacccucagcgacuccgagggcaacgagacgcccgggggcuacugccugacccgguggaugcugaucgaggccgagcucaagugcuucgggaacaccgccguggccaagugcaacgagaagcacgacgaggaguucugcgacaugcugcgccuguucgacuucaacaagcaggcgaucaagcggcucaagaccgaggcccagaugagcauccagcugaucaacaaggccgugaacgcccugaucaacgaccagcucaucaugaagaaccaccuccgcgacaucaugggcauccccuacugcaacuacuccaaguacugguaccugaaccacacggucaccgggaagaccagccugccccggugcuggcugguguccaacggcagcuaccugaacgagacccacuucuccgacgacaucgagcagcaggccgacaacaugaucacggagcuccugcagaaggaguacaucgaccgccagggcaagaccccgcuggggcucguggaccuguucgucuucagcaccuccuucuaccugaucagcaucuuccugcaccucgugaagaucccgacccaccggcacguggucggcaagcccugccccaagccccaccgccugaaccacauggggaucugcuccugcggccuguacaagcacccgggggugcccgugaaguggaagcggugaggacuagugcaucacauuuaaaagcaucucagccuaccaugagaauaagagaaagaaaaugaagaucaauagcuuauucaucucuuuuucuuuuucguugguguaaagccaacacccugucuaaaaaacauaaauuucuuuaaucauuuugccucuuuucucugugcuucaauuaauaaaaaauggaaagaaccuagaucuaaaaaaaaaaaaaaaaaaaaaaaaaaaaaaaaaaaaaaaaaaaaaaaaaaaaaaaaaaaaaaaaugcaucccccccccccccccccccccccccccccccaaaggcucuuuucagagccaccagaauu

SEQ ID NO: 3104 - RNA, 1855 nt, Artificial Sequence
  mRNA product Design i-2 comprising derived and/or modified sequence from LASV(LASV221-NIG-2010;Clade II)__AIT17624__GPC (opt1)
ggggcgcugccuacggagguggcagccaucuccuucucggcaucaagcuuaccaugggccagaucaucaccuucuuccaggaggugccccacgucaucgaggaggugaugaacaucgugcugaucgcccucagccugcuggccauccucaaggggaucuacaacgucgcgaccugcggccuguucgggcugguguccuuccuccugcugugcggccgcagcugcuccacgaccuacaaggggguguacgagcuccagacccuggagcuggacauggccagccucaacaugaccaugccgcuguccugcacgaagaacaacagccaccacuacaucauggucggcaacgagaccggccuggagcucacccugaccaacacguccaucaucaaccacaaguucugcaaccugagcgacgcccacaagaagaaccucuacgaccacgcccugauguccaucaucagcaccuuccaccuguccauccccaacuucaaccaguacgaggccaugagcugcgacuucaacgggggcaagaucuccgugcaguacaaccucagccacaccuacgcgaucgacgccgccaaccacugcgggaccaucgccaacggcgugcugcagacguucaugcggauggcguggggcggguccuacaucgcccuggacagcggcaagggguccugggacugcaucaugaccagcuaccaguaccucaucauccagaacaccaccugggaggaccacugccaguucucccgccccagccccaucggcuaccuggggcugcucagccagcggacgcgcgacaucuacaucucccggcgccugcugggcaccuucaccuggacccucagcgacuccgagggcaacgagacgcccgggggcuacugccugacccgguggaugcugaucgaggccgagcucaagugcuucgggaacaccgccgucgccaagugcaacgagaagcacgacgaggaguucugcgacaugcugcgccuguucgacuucaacaagcaggcgauccggcgccucaagaccgaggcccagaugagcauccagcugaucaacaaggccgugaacgcccugaucaacgaccagcucaucaugaagaaccaccuccgggacaucaugggcauccccuacugcaacuacuccaaguacugguaccugaaccacacggugaccgggaagaccagccugccccgcugcuggcuggucuccaacggcagcuaccugaacgagacccacuucuccgacgacaucgagcagcaggccgacaacaugaucacggagaugcuccagaaggaguacauggaccggcagggcaagaccccgcuggggcugguggaccucuucguguucagcaccuccuucuaccugaucagcaucuuccugcaccuggucaagaucccgacccaccgccacgugaucggcaagcccugccccaagccccaccggcucaaccacauggggaucugcuccugcggccuguacaagcacccgggggugcccgucaaguggaagcgcugaggacuagugcaucacauuuaaaagcaucucagccuaccaugagaauaagagaaagaaaaugaagaucaauagcuuauucaucucuuuuucuuuuucguugguguaaagccaacacccugucuaaaaaacauaaauuucuuuaaucauuuugccucuuuucucugugcuucaauuaauaaaaaauggaaagaaccuagaucuaaaaaaaaaaaaaaaaaaaaaaaaaaaaaaaaaaaaaaaaaaaaaaaaaaaaaaaaaaaaaaaaugcaucccccccccccccccccccccccccccccccaaaggcucuuuucagagccaccagaauu

SEQ ID NO: 3105 - RNA, 1855 nt, Artificial Sequence
  mRNA product Design i-2 comprising derived and/or modified sequence from LASV(LASV237-NIG-2010;Clade II)__AIT17638__GPC (opt1)
ggggcgcugccuacggagguggcagccaucuccuucucggcaucaagcuuaccaugggccagaucaucaccuucuuccaggaggugccccacgucaucgaggaggugaugaacaucgugcugaucgcccucagccugcuggccauccucaaggggaucuacaacgucgcgaccugcggccuguucgggcugguguccuuccuccugcugugcggccgcagcugcuccacgaccuacaaggggguguacgagcuccagacccuggagcuggacauggccagccucaacaugaccaugccgcuguccugcacgaagaacaacagccaccacuacaucauggucggcaacgagaccggccuggagcucacccugaccaacacguccaucaucaaccacaaguucugcaaccugagcgacgcccacaagaaggaccucuacgaccacgcccugauguccaucaucagcaccuuccaccuguccauccccaacuucaaccaguacgaggccaugagcugcgacuucaacgggggcaagaucuccgugcaguacaaccucagccacaccuacgcgguggacgccgccaaccacugcgggaccaucgccaacggcguccugcagacguucaugcggauggcguggggcggguccuacaucgcccuggacagcggcaagggguccugggacugcaucaugaccagcuaccaguaccucaucauccagaacaccaccugggaggaccacugccaguucucccgccccagccccaucggcuaccuggggcugcucagccagcggacgcgcgacaucuacaucucccggcgccugcugggcaccuucaccuggacccucagcgacuccgagggcaacgagacgcccgggggcuacugccugacccgguggaugcugaucgaggccgagcucaagugcuucgggaacaccgccguggccaagugcaacgagaagcacgacgaggaguucugcgacaugcugcgccuguucgacuucaacaagcaggcgauccggcgccucaagaccgaggcccagaugagcauccagcugaucaacaaggccgugaacgcccugaucaacgaccagcucaucaugaagaaccaccuccgggacaucaugggcauccccuacugcaacuacuccaaguacugguaccugaaccacacggucaccgggaagaccagccugccccgcugcuggcugguguccaacggcagcuaccugaacgagacccacuucuccgacgacaucgagcagcaggccgacaacaugaucacggagcuccugcagaaggaguacauggaccggcagggcaagaccccgcuggggcucguggaccuguucgucuucagcaccuccuucuaccugaucagcaucuuccugcaccucaucaagaucccgacccaccgccacaucacgggcaagcccugccccaagccccaccggcugaaccacauggggaucugcuccugcggccuguacaagcacccgggggugcccgugaaguggaagcgcugaggacuagugcaucacauuuaaaagcaucucagccuaccaugagaauaagagaaagaaaaugaagaucaauagcuuauucaucucuuuuucuuuuucguugguguaaagccaacacccugucuaaaaaacauaaauuucuuuaaucauuuugccucuuuucucugugcuucaauuaauaaaaaauggaaagaaccuagaucuaaaaaaaaaaaaaaaaaaaaaaaaaaaaaaaaaaaaaaaaaaaaaaaaaaaaaaaaaaaaaaaaugcaucccccccccccccccccccccccccccccccaaaggcucuuuucagagccaccagaauu

SEQ ID NO: 3106 - RNA, 1855 nt, Artificial Sequence
  mRNA product Design i-2 comprising derived and/or modified sequence from LASV(LASV253-NIG-2011;Clade II)__AIT17670__GPC (opt1)
ggggcgcugccuacggagguggcagccaucuccuucucggcaucaagcuuaccaugggccagaucaucaccuucuuccaggaggugccccacgucaucgaggaggugaugaacaucgugcugaucgcccucagccugcuggccauccucaaggggaucuacaacgucgcgaccugcggccuguucgggcugguguccuuccuccugcugugcggccgcagcugcuccacgaccuacaaggggguguacgagcuccagacccuggagcuggacauggccagccucaacaugaccaugccgcuguccugcacgaagaacaacagccaccacuacaucauggucggcaacgagaccggccuggagcucacccugaccaacacguccaucaucaaccacaaguucugcaaccugagcgacgcccacaagaagaaccucuacgaccacgcccugauguccaucaucagcaccuuccaccuguccauccccaacuucaaccaguacgaggccaugagcugcgacuucaacgggggcaagaucuccgugcaguacaaccucagccacaccuacgcgguggacgccgccaaccacugcgggaccaucgccaacggcguccugcagacguucaugcggauggcguggggcggguccuacaucgcccuggacagcggcaagggguccugggacugcaucaugaccagcuaccaguaccucaucauccagaacaccaccugggaggaccacugccaguucucccgccccagccccaucggcuaccuggggcugcucagccagcggacgcgcgacaucuacaucucccggcgccugcugggcaccuucaccuggacccucagcgacuccgagggcaacgagacgcccgggggcuacugccugacccgguggaugcugaucgaggccgagcucaagugcuucgggaacaccgccguggccaagugcaacgagaagcacgacgaggaguucugcgacaugcugcgccuguucgacuucaacaagcaggcgauccggcgccucaaggccgaggcccagaugagcauccagcugaucaacaaggccgugaacgcccugaucaacgaccagcucaucaugaagaaccaccuccgggacaucaugggcaucccguacugcaacuacuccaaguacugguaccugaaccacaccgucacggggcgcaccagccugccccggugcuggcugguguccaacggcagcuaccugaacgagacccacuucuccgacgacaucgagcagcaggcggacaacaugaucaccgagcuccugcagaaggaguacaucgaccgccagggcaagacgccccuggggcucguggaccuguucgucuucagcaccuccuucuaccugaucagcaucuuccugcaccucgugaagaucccgacccaccggcacaucaucggcaagcccugccccaagccccaccgccugaaccacauggggaucugcuccugcggccuguacaagcacccgggggugcccgucaaguggaagcggugaggacuagugcaucacauuuaaaagcaucucagccuaccaugagaauaagagaaagaaaaugaagaucaauagcuuauucaucucuuuuucuuuuucguugguguaaagccaacacccugucuaaaaaacauaaauuucuuuaaucauuuugccucuuuucucugugcuucaauuaauaaaaaauggaaagaaccuagaucuaaaaaaaaaaaaaaaaaaaaaaaaaaaaaaaaaaaaaaaaaaaaaaaaaaaaaaaaaaaaaaaaugcaucccccccccccccccccccccccccccccccaaaggcucuuuucagagccaccagaauu

SEQ ID NO: 3107 - RNA, 1855 nt, Artificial Sequence
  mRNA product Design i-2 comprising derived and/or modified sequence from LASV(LASV254-NIG-2011;Clade II)__AIT17674__GPC (opt1)
ggggcgcugccuacggagguggcagccaucuccuucucggcaucaagcuuaccaugggccagaucaucaccuucuuccaggaggugccccacgucaucgaggaggugaugaacaucgugcugaucgcccucagccugcuggccauccucaaggggaucuacaacgucgcgaccugcggccuguucgggcugguguccuuccuccugcugugcggccgcagcugcuccacgaccuacaaggggguguacgagcuccagacccuggagcuggacaugaccaaccucaacaugacgaugccgcugagcugcaccaagaacaacucccaccacuacaucauggucggcaacgagaccggccuggagcucacccugacgaacaccagcaucaucaaccacaaguucugcaaccuguccgacgcccacaagaagaaccucuacaaccacgcccugaugagcaucaucuccaccuuccaccugagcauccccaacuucaaccaguacgaggccauguccugcgacuucaacgggggcaagaucagcgugcaguacaaccucucccacagcuacgccguggacgcggccaaccacugcgggaccaucgccaacggcguccugcagacguucaugcggauggccuggggcggguccuacaucgcgcuggacagcggcaaggggaacugggacugcaucaugaccuccuaccaguaccucaucauccagaacaccaccugggaggaccacugccaguucagccgccccucccccaucggcuaccuggggcugcucagccagcggacgcgcgacaucuacaucagccggcgccugcugggcaccuucaccuggacccucuccgacagcgagggcaacgagacgcccgggggcuacugccugacccgguggaugcugaucgaggccgagcucaagugcuucgggaacaccgccguggccaagugcaacgagaagcacgacgaggaguucugcgacaugcugcgccuguucgacuucaacaagcaggccauccggcgccucaagaccgaggcgcaggccaacauccagcugaucaacaaggccgugaacgcccugaucaacgaccagcucaucaugaagaaccaccuccgggacaucaugggcauccccuacugcaacuacuccaaguacugguaccugaaccacacggucaccgggaagaccagccugccccgcugcuggcugguguccaacggcagcuaccugaacgagacccacuucuccgacgacaucgagcagcaggccgacaacaugaucacggagcuccugcagaaggaguacauggaccggcagggcaagaccccgcuggggcucguggaccuguucgucuucagcaccuccuucuaccugaucagcaucuuccugcaccucgugaagaucccgacccaccgccacgugaucggcaagcccugccccaagccccaccggcugaaccacauggggaucugcuccugcggccuguacaagcacccggggguccccgugaaguggaagcgcugaggacuagugcaucacauuuaaaagcaucucagccuaccaugagaauaagagaaagaaaaugaagaucaauagcuuauucaucucuuuuucuuuuucguugguguaaagccaacacccugucuaaaaaacauaaauuucuuuaaucauuuugccucuuuucucugugcuucaauuaauaaaaaauggaaagaaccuagaucuaaaaaaaaaaaaaaaaaaaaaaaaaaaaaaaaaaaaaaaaaaaaaaaaaaaaaaaaaaaaaaaaugcaucccccccccccccccccccccccccccccccaaaggcucuuuucagagccaccagaauu

SEQ ID NO: 3108 - RNA, 1855 nt, Artificial Sequence
  mRNA product Design i-2 comprising derived and/or modified sequence from LASV(Nig08-A19;Clade III)__ADU56618__GPC (opt1)
ggggcgcugccuacggagguggcagccaucuccuucucggcaucaagcuuaccaugggccagaucgugaccuucuuccaggaggucccccacgugaucgaggaggugaugaacaucguccugaucgcccucagcauccuggccauccugaaggggcucuacaacaucgcgaccugcggccugaucgggcuggugacguuccuccugcuguccggccgcagcugcuccaugaccuacaaggggguguacgagcuccagacccuggagcugaacaugaacacccucaacaugacgaugccgcugagcugcaccaagaacaacucccaccacuacaucauggucggcaacgagaccggccuggagcucacccugacgaacaccagccugcuccaccacaaguucugcaaccuguccgacgcccacaagaagaaccuguacgaccacacccucaugagcaucaucuccaccuuccaccugagcauccccaacuucaaccaguacgaggccauguccugcgacuucaacgggggcaagaucacggugcaguacaaccugagccacuccuacgccaucgacgccgcgaaccacugcgggaccguggccaacggcguccuccagaccuucaugcggauggccuggggcgggagcuacaucgcccuggacuccggccgcgggaagugggacugcaucaugaccagcuaccaguaccugaucauccagaacacgaccugggaggaccacugccaguucucccggcccagccccaucggcuaccucgggcugcugucccagcgcacccgggacaucuacaucagccgccggcuccugggcaccuucacguggacccugagcgacuccgagggcaacgagacccccgggggcuacugccucacccgcuggaugcugaucgaggcggagcugaagugcuucgggaacacggccguggccaagugcaacgagaagcacgacgaggaguucugcgacaugcuccggcuguucgacuucaacaagcaggccauccgccggcugaaggccgaggcgcagaugagcauccagcucaucaacaaggccgugaacgcccugaucaacgaccagcugaucaugaagaaccaccuccgcgacaucaugggcauccccuacugcaacuacuccaaguacugguaccugaaccacaccagcaccgggcggaccucccugccccgcugcuggcucgucagcaacggcuccuaccugaacgagacgcacuucagcgacgacaucgagcagcaggccgacaacaugaucaccgagaugcugcagaaggaguaccucgaccggcagggcaagaccccgcuggggcugguggaccuguucguguucuccaccagcuucuaccucaucuccaucuuccugcaccuggucaagaucccgacgcaccgccacaucgugggcaagcccugccccaagccccaccggcucaaccacauggggaucugcagcugcggccuguacaagcagccgggggugcccguccgcuggaagcggugaggacuagugcaucacauuuaaaagcaucucagccuaccaugagaauaagagaaagaaaaugaagaucaauagcuuauucaucucuuuuucuuuuucguugguguaaagccaacacccugucuaaaaaacauaaauuucuuuaaucauuuugccucuuuucucugugcuucaauuaauaaaaaauggaaagaaccuagaucuaaaaaaaaaaaaaaaaaaaaaaaaaaaaaaaaaaaaaaaaaaaaaaaaaaaaaaaaaaaaaaaaugcaucccccccccccccccccccccccccccccccaaaggcucuuuucagagccaccagaauu

SEQ ID NO: 3109 - RNA, 1858 nt, Artificial Sequence
  mRNA product Design i-2 comprising derived and/or modified sequence from LASV(G1180-SLE-2010;Clade IV)__AIT17168__GPC (opt1)
ggggcgcugccuacggagguggcagccaucuccuucucggcaucaagcuuaccaugggccagaucgugaccuucuuccaggaggucccccacgugaucgaggaggugaugaacaucguccugaucgcccucagcauccuggccgugcugaaggggcucuacaacuucgcgaccugcggccugguggggcugcucaccuuccugcugcucugcggccgcuccugcaccgccagccgguacaagggggucuacgagcugcagacccuggagcucaacauggagacccugaacaugacgaugccgcuguccugcaccaagaacaacagccaccacuacaucauggugggcaacgagaccggccucgagcugacccugacgaacaccuccaucaucaaccacaaguucugcaaccucagcgacgcccacaagaagaaccuguacgaccacgcccugauguccaucaucagcaccuuccaccucuccauccccaacuucaaccaguacgaggccaugagcugcgacuucaacgggggcaagaucuccgugcaguacaaccugagccacuccuacgcgggggacgccgccaaccacugcggcaccgucgccaacggggugcugcagacguucaugcgcauggcguggggcggcagcuacaucgcccucgacuccgggcacggcagcugggacugcaucaugaccuccuaccaguaccugaucauccagaacaccaccugggaggaccacugccaguucagccggcccucccccaucggguaccugggccuccugagccagcgcacgcgggacaucuacaucagccgccggcugcucggcaccuucaccuggacccuguccgacagcgaggggaaggacacgccgggcggguacugccugacccgcuggaugcucaucgaggccgagcugaagugcuucggcaacaccgccguggccaagugcaacgagaagcacgacgaggaguucugcgacaugcugcggcuguucgacuucaacaagcaggcgauccagcgccugaaggccgaggcccagauguccauccagcugaucaacaaggccgucaacgcccucaucaacgaccagcugaucaugaagaaccaccuccgggacaucauggggauccccuacugcaacuacagcaaguacugguaccucaaccacaccacgaccggcaagaccucccugcccaagugcuggcuggugagcaacggcuccuaccucaacgagacccacuucagcgacgacaucgagcagcaggcggacaacaugaucacggagaugcugcagaaggaguacauggagcgccaggggaagacgccccugggccucguggaccuguucgucuucuccaccagcuucuaccugaucuccaucuuccugcaccucgugaagaucccgacccaccggcacaucgugggcaagagcugccccaagccccaccgccugaaccacauggggaucugcuccugcgggcuguacaagcagcccggcgucccggugaaguggaagcggugaggacuagugcaucacauuuaaaagcaucucagccuaccaugagaauaagagaaagaaaaugaagaucaauagcuuauucaucucuuuuucuuuuucguugguguaaagccaacacccugucuaaaaaacauaaauuucuuuaaucauuuugccucuuuucucugugcuucaauuaauaaaaaauggaaagaaccuagaucuaaaaaaaaaaaaaaaaaaaaaaaaaaaaaaaaaaaaaaaaaaaaaaaaaaaaaaaaaaaaaaaaugcaucccccccccccccccccccccccccccccccaaaggcucuuuucagagccaccagaauu

SEQ ID NO: 3110 - RNA, 1858 nt, Artificial Sequence
  mRNA product Design i-2 comprising derived and/or modified sequence from LASV(G1442-SLE-2011;Clade IV)__AIT17180__GPC (opt1)
ggggcgcugccuacggagguggcagccaucuccuucucggcaucaagcuuaccaugggccagaucgugaccuucuuccaggaggucccccacgugaucgaggaggugaugaacaucguccugaucgcccucagcauccuggccgugcugaaggggcucuacaacguggcgaccugcggccugaucgggcuggucacguuccuccugcugugcggccgcuccugcaccaccacccucuacaaggggguguacgagcugcagacgcuggagcucaacauggagacccugaacaugaccaugccgcugagcugcaccaagaacaacucccaccacuacauccgggugggcaacgagacgggccucgagcugacccugaccaacaccagcaucaucaaccacaaguucugcaaccucuccgacgcccacaagaagaaccuguacgaccacgcccugaugagcaucaucuccacguuccaccucagcauccccaacuucaaccaguacgaggccauguccugcgacuucaacgggggcaagaucagcguccaguacaaccugucccacagcuacgccggggacgcggccaaccacugcggcaccguggccaacggggugcugcagaccuucaugcgcauggccuggggcggcuccuacaucgcgcucgacagcgggcggggcaacugggacugcaucaugaccuccuaccaguaccugaucauccagaacacgaccugggacgaccacugccaguucagccgccccucccccaucggguaccugggccuccugagccagcggacccgcgacgucuacaucucccggcgccugcucggcaccuucacguggacccugagcgacagcgaggggaaggacaccccgggcggguacugccugacccgguggaugcucaucgaggccgagcugaagugcuucggcaacacggccguggccaagugcaacgagaagcacgacgaggaguucugcgacaugcugcgccucuucgacuucaacaagcaggccauccagcggcugaaggcggaggcccagauguccauccagcugaucaacaaggccgugaacgcccucaucaacgaccagcugaucaugaagaaccaccuccgcgacaucauggggauccccuacugcaacuacagcaaguacugguaccugaacaacaccgccaccggcaagaccucccugcccaagugcuggcugaucagcaacggcuccuaccucaacgagacgcacuucagcgacgacaucgagcaggaggcggacaacaugaucaccgagaugcugcagaaggaguacauggagcggcaggggaagacgccccugggccucgucgaccuguucguguucuccaccagcuucuaccugaucuccaucuuccugcaccucgugaagaucccgacccaccgccacaucgucggcaagagcugccccaagccccaccggcugaaccacauggggaucugcuccugcgggcuguacaagcagcccggcgugccggugcgcuggaagcggugaggacuagugcaucacauuuaaaagcaucucagccuaccaugagaauaagagaaagaaaaugaagaucaauagcuuauucaucucuuuuucuuuuucguugguguaaagccaacacccugucuaaaaaacauaaauuucuuuaaucauuuugccucuuuucucugugcuucaauuaauaaaaaauggaaagaaccuagaucuaaaaaaaaaaaaaaaaaaaaaaaaaaaaaaaaaaaaaaaaaaaaaaaaaaaaaaaaaaaaaaaaugcaucccccccccccccccccccccccccccccccaaaggcucuuuucagagccaccagaauu

SEQ ID NO: 3111 - RNA, 1858 nt, Artificial Sequence
  mRNA product Design i-2 comprising derived and/or modified sequence from LASV(G3010-SLE-2013;Clade IV)__AIT17344__GPC (opt1)
ggggcgcugccuacggagguggcagccaucuccuucucggcaucaagcuuaccaugggccagaucgugaccuucuuccaggaggucccccacgugaucgaggaggugaugaacaucguccugaucgcccucagcauccuggccgugcugaaggggcucuacaacuucgcgaccugcggccugguggggcuggucacguuccuccugcugugcggccgcuccugcaccaccagccucuacaaggggguguacgagcugcagacccuggagcucaacauggagacgcugaacaugaccaugccgcuguccugcaccaagaacaacagccaccacuacaucauggugggcaacgagaccggccucgagcugacgcugaccaacaccuccaucaucaaccacaaguucugcaaccucagcgacgcccacaagaagaaccuguacaaccacgcccugauguccaucaucagcaccuuccaccucuccauccccaacuucaaccaguacgaggccaugagcugcgacuucaacgggggcaagaucuccguccaguacaaccugagccacuccuacgccggggacgcggccagccacugcggcacgguggccaacggggugcugcagaccuucaugcggauggccuggggcggcuccuacaucgcgcucgacagcggguacggcaagugggacugcaucaugaccuccuaccaguaccugaucauccagaacaccacgugggaggaccacugccaguucagccgccccucccccaucggguaccugggccuccugagccagcggacccgcgacaucuacaucagccggcgccugcucggcaccuucaccuggacgcuguccgacagcgaggggaaggacaccccgggcggguacugccugacccgguggaugcucaucgaggccgagcugaagugcuucggcaacaccgccgucgccaagugcaacgagaagcacgacgaggaguucugcgacaugcugcgccucuucgacuucaacaagcaggccauccagcggcugaagacggaggcgcagauguccauccagcugaucaacaaggccgugaacgcccucaucaacgaccagcugaucaugaagaaccaccuccgcgacaucauggggauccccuacugcaacuacagcaaguacugguaccugaaccacaccaccaccggcaagacgucccugcccaagugcuggcuggugagcaacggcuccuaccucaacgagacccacuucagcgacgacaucgagcagcaggccgacaacaugaucaccgagaugcugcagaaggaguacauggagcggcaggggaagacgccccugggccucgucgaccuguucguguucuccaccagcuucuaccugaucuccaucuuccugcaccucgugaagaucccgacccaccgccacaucgucggcaagagcugccccaagccccaccggcugaaccacauggggaucugcuccugcgggcuguacaagcagcccggcgugccggugcgcuggaagcggugaggacuagugcaucacauuuaaaagcaucucagccuaccaugagaauaagagaaagaaaaugaagaucaauagcuuauucaucucuuuuucuuuuucguugguguaaagccaacacccugucuaaaaaacauaaauuucuuuaaucauuuugccucuuuucucugugcuucaauuaauaaaaaauggaaagaaccuagaucuaaaaaaaaaaaaaaaaaaaaaaaaaaaaaaaaaaaaaaaaaaaaaaaaaaaaaaaaaaaaaaaaugcaucccccccccccccccccccccccccccccccaaaggcucuuuucagagccaccagaauu

SEQ ID NO: 3112 - RNA, 1858 nt, Artificial Sequence
  mRNA product Design i-2 comprising derived and/or modified sequence from LASV(G502-SLE-2009;Clade IV)__AIT17126__GPC (opt1)
ggggcgcugccuacggagguggcagccaucuccuucucggcaucaagcuuaccaugggccagaucgugaccuucuuccaggaggucccccacgugaucgaggaggugaugaacaucguccugaucgcccucagcauccuggccgugcugaaggggcucuacaacuucgcgaccugcggccugguggggcugcucacguuccugcugcucugcggccgcuccugcaccaccgggcuguacaagggcgucuacgagcugcagacccucgagcugaacauggagacgcugaacaugaccaugccgcucagcugcaccaagaacaacucccaccacuacaucauggugggcaacgagaccgggcuggagcugacgcucaccaacaccagcaucaucaaccacaaguucugcaaccuguccgacgcccacaagaagaaccuguacgaccacgcccucaugagcaucaucuccaccuuccaccugagcauccccaacuucaaccaguacgaggccauguccugcgacuucaacggcgggaagaucagcgugcaguacaaccugucccacagcuacgccggcgacgcggccgaccacugcgggacggucgccaacggcgugcuccagaccuucaugcggauggccuggggcggguccuacaucgcgcuggacagcggccgcgggcggugggacugcaucaugaccuccuaccaguaccugaucauccagaacaccacgugggaggaccacugccaguucagccgccccucccccaucggcuaccucggccugcugagccagcggacccgcgacaucuacaucucccggcgccuccuggggaccuucaccuggacgcugagcgacagcgagggcaaggacacccccgggggcuacugccucacccgguggaugcugaucgaggccgagcugaagugcuucgggaacaccgccguggccaagugcaacgagaagcacgacgaggaguucugcgacaugcuccgccuguucgacuucaacaagcaggccauccagcggcugaaggcggaggcccagauguccauccagcucaucaacaaggccgucaacgcccugaucaacgaccagcuggugaugaagaaccaccuccgcgacaucaugggcauccccuacugcaacuacagccgguacugguaccugaaccacacgaccaccggccgcaccucccugcccaagugcuggcucgugagcaacggguccuaccugaacgagacgcacuucagcgacgacaucgagcagcaggccgacaacaugaucaccgagaugcugcagaaggaguacauggagcggcagggcaagaccccgcucgggcuggucgaccuguucguguucuccaccagcuucuaccugaucuccaucuuccuccaccuggugaagaucccgacgcaccgccacaucgucggcaagagcugccccaagccccaccggcugaaccacauggggaucugcuccugcggccucuacaagcagcccggcgugccggugaaguggaagcgcugaggacuagugcaucacauuuaaaagcaucucagccuaccaugagaauaagagaaagaaaaugaagaucaauagcuuauucaucucuuuuucuuuuucguugguguaaagccaacacccugucuaaaaaacauaaauuucuuuaaucauuuugccucuuuucucugugcuucaauuaauaaaaaauggaaagaaccuagaucuaaaaaaaaaaaaaaaaaaaaaaaaaaaaaaaaaaaaaaaaaaaaaaaaaaaaaaaaaaaaaaaaugcaucccccccccccccccccccccccccccccccaaaggcucuuuucagagccaccagaauu

SEQ ID NO: 3113 - RNA, 1858 nt, Artificial Sequence
  mRNA product Design i-2 comprising derived and/or modified sequence from LASV(G733-SLE-2010;Clade IV)__AIT17154__GPC (opt1)
ggggcgcugccuacggagguggcagccaucuccuucucggcaucaagcuuaccaugggccagaucgugaccuucuuccaggaggucccccacgugaucgaggaggugaugaacaucguccugaucgcccucagcauccuggccgugcugaaggggcucuacaacuucgcgaccugcggcaucguggggcuggucuccuuccugcuccugugcggccgcagcugcacgaccucccuguacaaggggguguacgagcuccagacccuggagcugaacauggagacccucaacaugacgaugccgcugagcugcaccaagaacaacucccaccacuacaucauggugggcaacgagaccggccuggagcucacccugacgaacaccagcaucaucaaccacaaguucugcaaccuguccgacgcccacaagaagaaccucuacgaccacgcccugaugagcaucaucuccaccuuccaccugagcauccccaacuucaaccaguacgaggccauguccugcgacuucaacgggggcaagaucagcguccaguacaaccucucccacagcuacgccggggacgcggccaaccacugcggcaccaucgccaacggggugcugcagacguucaugcggauggccuggggcggcuccuacaucgcgcuggacagcgggcgcgaccggugggacugcaucaugaccuccuaccaguaccucaucauccagaacaccaccugggaggaccacugccaguucagccgccccucccccaucggcuaccuggggcugcucagccagcggacgcgcgacaucuacaucagccggcgccugcugggcaccuucaccuggacccucuccgacagcgagggcaaggacacgcccgggggcuacugccugacccgguggaugcugaucgaggccgagcucaagugcuucgggaacaccgccguggccaagugcaacgagaagcacgacgaggaguucugcgacaugcugcgccuguucgacuucaacaagcaggccauccagcggcucaaggcggaggcccagauguccauccagcugaucaacaaggccgucaacgcccugaucaacgaccagcucaucaugaagaaccaccuccgcgacaucaugggcauccccuacugcaacuacagcaaguacugguaccugaaccacaccacgaccgggaagaccucccugcccaagugcuggcuggugagcaacggcuccuaccugaacgagacccacuucagcgacgacaucgagcagcaggccgacaacaugaucacggagaugcuccagaaggaguacauggagcggcagggcaagaccccgcuggggcugguggaccucuucgucuucuccaccagcuucuaccugaucuccaucuuccugcaccuggugaagaucccgacccaccgccacguggucggcaagagcugccccaagccccaccggcucaaccacauggggaucugcuccugcggccuguacgggcagcccggcgugccggugaaguggaagcgcugaggacuagugcaucacauuuaaaagcaucucagccuaccaugagaauaagagaaagaaaaugaagaucaauagcuuauucaucucuuuuucuuuuucguugguguaaagccaacacccugucuaaaaaacauaaauuucuuuaaucauuuugccucuuuucucugugcuucaauuaauaaaaaauggaaagaaccuagaucuaaaaaaaaaaaaaaaaaaaaaaaaaaaaaaaaaaaaaaaaaaaaaaaaaaaaaaaaaaaaaaaaugcaucccccccccccccccccccccccccccccccaaaggcucuuuucagagccaccagaauu

SEQ ID NO: 3114 - RNA, 1858 nt, Artificial Sequence
  mRNA product Design i-2 comprising derived and/or modified sequence from MOPV/LASV reassortant(IGS-1;Clade IV)__AFY05576__GPC (opt1)
ggggcgcugccuacggagguggcagccaucuccuucucggcaucaagcuuaccaugggccagaucgugaccuucuuccaggaggucccccacgugaucgaggaggugaugaacaucguccugaucgcccucagcgugcuggccgugcugaaggggcucuacaacuucgcgaccugcggccuggucgggcuggugacguuccuccugcugugcggccgcuccugcaccaccagccucuacaaggggguguacgagcugcagacccuggagcucaacauggagacgcugaacaugaccaugccgcuguccugcaccaagaacaacagccaccacuacaucauggucggcaacgagaccggccucgagcugacgcugaccaacaccuccaucaucaaccacaaguucugcaaccucagcgacgcccacaagaagaaccuguacgaccacgcccugauguccaucaucagcaccuuccaccucuccauccccaacuucaaccaguacgaggccaugagcugcgacuucaacgggggcaagaucuccgugcaguacaaccugagccacuccuacgccggggacgcggccaaccacugcggcacgguggccaacgggguccugcagaccuucaugcggauggccuggggcggcagcuacaucgcgcucgacuccgggcgcggcaacugggacugcaucaugaccagcuaccaguaccugaucauccagaacaccacgugggaggaccacugccaguucucccggcccagccccaucggguaccugggccuccugucccagcgcacccgggacaucuacaucagccgccggcugcucggcaccuucaccuggacgcugagcgacuccgagggggaggacaccccgggcggguacugccugacccgcuggaugcucaucgaggccgagcugaagugcuucggcaacaccgccguggccaagugcaacgagaagcacgacgaggaguucugcgacaugcugcggcuguucgacuucaacaagcaggccauccagcgccugaaggcggaggcccagaugagcauccagcugaucaacaaggccgugaacgcccucaucaacgaccagcugaucaugaagaaccaccuccgggacaucauggggauccccuacugcaacuacuccaaguacugguaccucaaccacacgaccaccggccgcaccagccugcccaagugcuggcuggucuccaacggcagcuaccucaacgagacgcacuucuccgacgacaucgagcagcaggccgacaacaugaucaccgagaugcugcagaaggaguacauggagcggcaggggaagacgccccugggccucguggaccuguucguguucagcaccuccuucuaccugaucagcaucuuccugcaccucgucaagaucccgacccaccgccacaucguggggaaguccugccccaagccccaccggcugaaccacaugggcaucugcagcugcgggcuguacaagcagcccggcgugccggucaaguggaagcgcugaggacuagugcaucacauuuaaaagcaucucagccuaccaugagaauaagagaaagaaaaugaagaucaauagcuuauucaucucuuuuucuuuuucguugguguaaagccaacacccugucuaaaaaacauaaauuucuuuaaucauuuugccucuuuucucugugcuucaauuaauaaaaaauggaaagaaccuagaucuaaaaaaaaaaaaaaaaaaaaaaaaaaaaaaaaaaaaaaaaaaaaaaaaaaaaaaaaaaaaaaaaugcaucccccccccccccccccccccccccccccccaaaggcucuuuucagagccaccagaauu

SEQ ID NO: 3115 - RNA, 1858 nt, Artificial Sequence
  mRNA product Design i-2 comprising derived and/or modified sequence from LASV(LM765-SLE-2012;Clade IV)__AIT17814__GPC (opt1)
ggggcgcugccuacggagguggcagccaucuccuucucggcaucaagcuuaccaugggccagaucgugaccuucuuccaggaggucccccacgugaucgaggaggugaugaacaucguccugaucgcccucagcauccuggccgugcugaaggggcucuacaacuucgcgaccugcggccugguggggcuggucacguuccuccugcugugcggccgcuccugcaccaccagccucuacaaggggguguacgagcugcagacccuggagcucaacauggagacgcugaacaugaccaugccgcuguccugcaccaagaacaacagccaccacuacaucauggugggcaacgagaccggccucgagcugacgcugaccaacaccuccaucaucgaccacaaguucugcaaccucagcgacgcccaccggaagaaccuguacgaccacgcccugauguccaucaucagcaccuuccaccucuccauccccaacuucaaccaguacgaggccaugagcugcgacuucaacgggggcaagaucuccguccaguacaaccugagccacuccuacgccaaggacgcggccgaccacugcgggacgguggccaacggcgugcugcagaccuucaugcgcauggccuggggcgggagcuacaucgcgcucgacuccggccgggggcgcugggacugcaucaugaccagcuaccaguaccugaucauccagaacaccacgugggaggaccacugccaguucucccggcccagccccaucggcuaccuggggcuccugucccagcgcacccgggacaucuacaucagccgccggcugcucggcaccuucaccuggacgcugagcgacuccgagggcaaggacacccccgggggcuacugccugacccgcuggaugcucaucgaggccgagcugaagugcuucgggaacaccgccgucgccaagugcaacgagaagcacgacgaggaguucugcgacaugcugcggcuguucgacuucaacaagcaggccauccagcgccugaaggcggaggcccagaugagcauccagcugaucaacaaggccgugaacgcccucaucaacgaccagcugaucaugaagaaccaccuccgggacaucaugggcauccccuacugcaacuacuccaaguacugguaccucaaccacacgaccaccgggaagaccagccugcccaagugcuggcugguguccaacggcagcuaccucaacgagacgcacuucuccgacgacaucgagcagcaggccgacaacaugaucaccgagaugcugcagaaggaguacauggagcgccagggcaagaccccgcuggggcucgucgaccuguucguguucagcaccuccuucuaccugaucagcaucuuccugcaccucgugaagaucccgacgcaccggcacaucgucggcaagcccugccccaagccccaccgccugaaccacauggggaucugcuccugcggccuguacaagcagccgggggugcccgugaaguggaagcggugaggacuagugcaucacauuuaaaagcaucucagccuaccaugagaauaagagaaagaaaaugaagaucaauagcuuauucaucucuuuuucuuuuucguugguguaaagccaacacccugucuaaaaaacauaaauuucuuuaaucauuuugccucuuuucucugugcuucaauuaauaaaaaauggaaagaaccuagaucuaaaaaaaaaaaaaaaaaaaaaaaaaaaaaaaaaaaaaaaaaaaaaaaaaaaaaaaaaaaaaaaaugcaucccccccccccccccccccccccccccccccaaaggcucuuuucagagccaccagaauu

SEQ ID NO: 3116 - RNA, 1858 nt, Artificial Sequence
  mRNA product Design i-2 comprising derived and/or modified sequence from LASV(LM776-SLE-2012;Clade IV)__AIT17824__GPC (opt1)
ggggcgcugccuacggagguggcagccaucuccuucucggcaucaagcuuaccaugggccagaucgugaccuucuuccaggaggucccccacgugaucgaggaggugaugaacaucguccugaucgcccucagcauccuggccgugcugaaggggcucuacaacuucgcgaccugcggccugguggggcuggucacguuccuccugcugugcggccgcuccugcaccaccagcguguacaaggggguguacgagcuccagacccuggagcugaacauggagacgcucaacaugaccaugccgcuguccugcaccaagaacaacagccaccacuacaucauggucggcaacgagaccggccuggagcucacgcugaccaacaccuccaucaucaaccacaaguucugcaaccugagcgacgcccacaagaagaaccucuacgaccacgcccugauguccaucaucagcaccuuccaccuguccauccccaacuucaaccaguacgaggccaugagcugcgacuucaacgggggcaagaucuccgugcaguacaaccucagccacuccuacgccggggacgcggccaaccacugcggcacgguggccaacgggguccugcagaccuucaugcggauggccuggggcggcagcuacaucgcgcuggacuccgggcacggcaagugggacugcaucaugaccagcuaccaguaccucaucauccagaacaccacgugggaggaccacugccaguucucccgccccagccccaucggguaccugggccugcucucccagcggacccgcgacaucuacaucagccggcgccugcugggcaccuucaccuggacgcucagcgacuccgaggggaaggacaccccgggcggguacugccugacccgguggaugcugaucgaggccgagcucaagugcuucggcaacaccgccguggccaagugcaacgagaagcacgacgaggaguucugcgacaugcugcgccuguucgacuucaacaagcaggccauccagcggcucaaggcggaggcccagaugagcauccagcugaucaacaaggccgugaacgcccugaucaacgaccagcucaucaugaagaaccaccuccgcgacaucauggggauccccuacugcaacuacuccaaguacugguaccugaaccacacgaccaccggcaagaccagccugcccaagugcuggcuggucuccaacggcagcuaccugaacgagacgcacuucuccgacgacaucgagcagcaggccgacaacaugaucaccgagaugcuccagaaggaguacauggagcggcaggggaagacgccccugggccugguggaccucuucguguucagcaccuccuucuaccugaucagcaucuuccugcaccuggucaagaucccgacccaccgccacaucguggggaaguccugccccaagccccaccggcucaaccacaugggcaucugcagcugcgggcuguacaagcagcccggcgugccgguccgcuggaagcggugaggacuagugcaucacauuuaaaagcaucucagccuaccaugagaauaagagaaagaaaaugaagaucaauagcuuauucaucucuuuuucuuuuucguugguguaaagccaacacccugucuaaaaaacauaaauuucuuuaaucauuuugccucuuuucucugugcuucaauuaauaaaaaauggaaagaaccuagaucuaaaaaaaaaaaaaaaaaaaaaaaaaaaaaaaaaaaaaaaaaaaaaaaaaaaaaaaaaaaaaaaaugcaucccccccccccccccccccccccccccccccaaaggcucuuuucagagccaccagaauu

SEQ ID NO: 3117 - RNA, 1858 nt, Artificial Sequence
  mRNA product Design i-2 comprising derived and/or modified sequence from LASV(Mad39;Clade IV)__ANH09722__GPC (opt1)
ggggcgcugccuacggagguggcagccaucuccuucucggcaucaagcuuaccaugggccagaucgugaccuucuuccaggaggucccccacgugaucgaggaggugaugaacaucguccugaucgcccucagcauccuggccgugcugaaggggcucuacaacguggcgaccugcggccugaucgggcuggucacguuccuccugcugugcggccgcuccugcaccaccacccucuacaaggggguguacgagcugcaggcccuggagcucaacauggagacgcugaacaugaccaugccgcugagcugcaccaagaacaacucccaccacuacauccgggugggcaacgagaccggccucgagcugacgcugaccaacaccagccucaucaaccacaaguucugcaaccuguccgacgcccacaagaagaaccuguacgaccacgcccucaugagcaucaucuccaccuuccaccugagcauccccaacuucaaccaguacgaggccauguccugcgacuucaacgacgggaagaucagcguccaguacaaccugucccacacguacgcgggcgacaccgccaaccacugcgggaccguggccaacggcgugcuccagaccuucaugcgcauggccuggggcgggagcuacaucgcgcuggacuccggccgcgggggcugggacugcaucaugacgagcuaccaguaccugaucauccagaacaccaccugggaggaccacugccaguucucccggcccagccccaucggguaccucggccugcugucccagcggacccgcgacaucuacaucagccggcgccuccugggcacguucaccuggacccuguccgacagcgaggggaaggacaccccgggcggguacugccucacgcgguggaugcugaucgaggccgagcugaagugcuucggcaacaccgccgucgccaagugcaacgagaagcacgacgaggaguucugcgacaugcuccgccuguucgacuucaacaagcaggccauccagcggcugaaggcggaggcccagaugagcauccagcucaucaacaaggccgugaacgcccugaucaacgaccagcugaucaugaagaaccaccuccgcgacaucauggggauccccuacugcaacuacuccaaguacugguaccugaaccacaccgugaccggcaagacgagccugcccaagugcuggcucgucuccaacggcagcuaccugaacgagacccacuucuccgacgacaucgagcagcaggccgacaacaugaucaccgagaugcugcagaaggaguacauggagcggcaggggaagacgccccucggccugguggaccuguucguguucagcaccuccuucuaccugaucagcaucuuccuccaccuggucaagaucccgacccaccgccacgugguggggaagcccugccccaagccccaccggcugaaccacaugggcaucugcuccugcggguucuacaagcagccgggcguccccgugcgcuggaagcggugaggacuagugcaucacauuuaaaagcaucucagccuaccaugagaauaagagaaagaaaaugaagaucaauagcuuauucaucucuuuuucuuuuucguugguguaaagccaacacccugucuaaaaaacauaaauuucuuuaaucauuuugccucuuuucucugugcuucaauuaauaaaaaauggaaagaaccuagaucuaaaaaaaaaaaaaaaaaaaaaaaaaaaaaaaaaaaaaaaaaaaaaaaaaaaaaaaaaaaaaaaaugcaucccccccccccccccccccccccccccccccaaaggcucuuuucagagccaccagaauu

SEQ ID NO: 3118 - RNA, 1858 nt, Artificial Sequence
  mRNA product Design i-2 comprising derived and/or modified sequence from LASV(Z0947-SLE-2011;Clade IV)__AIT17840__GPC (opt1)
ggggcgcugccuacggagguggcagccaucuccuucucggcaucaagcuuaccaugggccagaucgugaccuucuuccaggaggucccccacgugaucgaggaggugaugaacaucguccugaucgcccucagcauccuggccgugcugaaggggcucuacaacuucgcgaccugcggccugguggggcuggucacguuccuccugcugugcggccgcuccugcaccaucagccucuacaaggggguguacgagcugcagacccuggagcucaacauggagacccugaacaugacgaugccgcuguccugcaccaagaacaacagccaccacuacaucauggugggcaacgagaccggccucgagcugacccugacgaacaccuccaucaucaaccacaaguucugcaaccucagcgacgcccacaagaagaaccuguacgaccacgcccugauguccaucaucagcaccuuccaccucuccauccccaacuucaaccaguacgaggccaugagcugcgacuucaacgggggcaagaucuccguccaguacaaccugagccacuccuacgccggggacgcggccaaccacugcggcaccguggccaacggggugcugcagacguucaugcggauggccuggggcggcagcuacaucgcgcucgacuccgggcgcgaccggugggacugcaucaugaccagcuaccaguaccugaucauccagaacaccaccugggaggaccacugccaguucucccgccccagccccaucggcuaccuggggcuccugucccagcggacgcgcgacaucuacaucagccggcgccugcucggcaccuucaccuggacccugagcgacuccgagggcaaggacacgcccgggggcuacugccugacccgguggaugcucaucgaggccgagcugaagugcuucgggaacaccgccgucgccaagugcaacgagaagcacgacgaggaguucugcgacaugcugcgccucuucgacuucaacaagcaggccauccagcggcugaaggcggaggcccagaugagcauccagcugaucaacaaggccgugaacgcccucaucaacgaccagcugaucaugaagaaccaccuccgcgacaucaugggcauccccuacugcaacuacuccaaguacugguaccugaaccacaccacgaccgggaagaccagccugcccaagugcuggcugguguccaacggcagcuaccucaacgagacccacuucuccgacgacaucgagcagcaggccgacaacaugaucacggagaugcugcagaaggaguacauggagcggcagggcaagaccccgcuggggcucgucgaccuguucguguucagcaccuccuucuaccugaucagcaucuuccugcaccucgugaagaucccgacccaccgccacaucgucggcaagcccugccccaagccccaccggcugaaccacauggggaucugcuccugcggccuguacaagcagccgggggugcccgugaaguggaagcgcugaggacuagugcaucacauuuaaaagcaucucagccuaccaugagaauaagagaaagaaaaugaagaucaauagcuuauucaucucuuuuucuuuuucguugguguaaagccaacacccugucuaaaaaacauaaauuucuuuaaucauuuugccucuuuucucugugcuucaauuaauaaaaaauggaaagaaccuagaucuaaaaaaaaaaaaaaaaaaaaaaaaaaaaaaaaaaaaaaaaaaaaaaaaaaaaaaaaaaaaaaaaugcaucccccccccccccccccccccccccccccccaaaggcucuuuucagagccaccagaauu

SEQ ID NO: 3119 - RNA, 1858 nt, Artificial Sequence
  mRNA product Design i-2 comprising derived and/or modified sequence from LASV(Josiah;Clade IV)__NP_694870__GPC (opt2)
ggggcgcugccuacggagguggcagccaucuccuucucggcaucaagcuuaccaugggccagaucgucaccuucuuccaggaggucccccacgucaucgaggaggucaugaacaucguccucaucgcccucuccguccucgccguccucaagggccucuacaacuucgccaccugcggccucgucggccucgucaccuuccuccuccucugcggccgcuccugcaccaccucccucuacaagggcgucuacgagcuccagacccucgagcucaacauggagacccucaacaugaccaugccccucuccugcaccaagaacaacucccaccacuacaucauggucggcaacgagaccggccucgagcucacccucaccaacaccuccaucaucaaccacaaguucugcaaccucuccgacgcccacaagaagaaccucuacgaccacgcccucauguccaucaucuccaccuuccaccucuccauccccaacuucaaccaguacgaggccauguccugcgacuucaacggcggcaagaucuccguccaguacaaccucucccacuccuacgccggcgacgccgccaaccacugcggcaccgucgccaacggcguccuccagaccuucaugcgcauggccuggggcggcuccuacaucgcccucgacuccggccgcggcaacugggacugcaucaugaccuccuaccaguaccucaucauccagaacaccaccugggaggaccacugccaguucucccgccccucccccaucggcuaccucggccuccucucccagcgcacccgcgacaucuacaucucccgccgccuccucggcaccuucaccuggacccucuccgacuccgagggcaaggacacccccggcggcuacugccucacccgcuggaugcucaucgaggccgagcucaagugcuucggcaacaccgccgucgccaagugcaacgagaagcacgacgaggaguucugcgacaugcuccgccucuucgacuucaacaagcaggccauccagcgccucaaggccgaggcccagauguccauccagcucaucaacaaggccgucaacgcccucaucaacgaccagcucaucaugaagaaccaccuccgcgacaucaugggcauccccuacugcaacuacuccaaguacugguaccucaaccacaccaccaccggccgcaccucccuccccaagugcuggcucgucuccaacggcuccuaccucaacgagacccacuucuccgacgacaucgagcagcaggccgacaacaugaucaccgagaugcuccagaaggaguacauggagcgccagggcaagaccccccucggccucgucgaccucuucgucuucuccaccuccuucuaccucaucuccaucuuccuccaccucgucaagauccccacccaccgccacaucgucggcaaguccugccccaagccccaccgccucaaccacaugggcaucugcuccugcggccucuacaagcagcccggcguccccgucaaguggaagcgcugaggacuagugcaucacauuuaaaagcaucucagccuaccaugagaauaagagaaagaaaaugaagaucaauagcuuauucaucucuuuuucuuuuucguugguguaaagccaacacccugucuaaaaaacauaaauuucuuuaaucauuuugccucuuuucucugugcuucaauuaauaaaaaauggaaagaaccuagaucuaaaaaaaaaaaaaaaaaaaaaaaaaaaaaaaaaaaaaaaaaaaaaaaaaaaaaaaaaaaaaaaaugcaucccccccccccccccccccccccccccccccaaaggcucuuuucagagccaccagaauu

SEQ ID NO: 3120 - RNA, 1855 nt, Artificial Sequence
  mRNA product Design i-2 comprising derived and/or modified sequence from LASV(LP;Clade I)__AAF86701__GPC (opt2)
ggggcgcugccuacggagguggcagccaucuccuucucggcaucaagcuuaccaugggccagaucaucaccuucuuccaggaggucccccacgucaucgaggaggucaugaacaucguccucaucgcccucucccuccucgccauccucaagggccucuacaacaucgccaccugcggcaucaucggccucgucgccuuccucuuccucugcggcaaguccugcucccucacccucaagggcggcuacgagcuccagacccucgagcucaacauggagacccucaacaugaccaugccccucuccugcaccaagaacuccucccaccacuacauccgcgucggcaacgagaccggccucgagcucacccucaccaacaccuccaucaucaaccacaaguucugcaaccucuccgacgcccacaagaagaaccucuacgaccacgcccucauguccaucaucuccaccuuccaccucuccauccccaacuucaaccaguacgaggccauguccugcgacuucaacggcggcaagaucuccguccaguacaaccucucccacuccuacgccggcgacgccgccgagcacugcggcaccgucgccaacggcguccuccagaccuucaugcgcauggccuggggcggccgcuacaucgcccucgacuccggcaagggcaacugggacugcaucaugaccuccuaccaguaccucaucauccagaacaccaccugggaggaccacugccaguucucccgccccucccccaucggcuaccucggccuccucucccagcgcacccgcgacaucuacaucucccgccgccuccucggcaccuucaccuggacccucuccgacuccgagggcaacgagacccccggcggcuacugccucacccgcuggaugcucaucgaggccgagcucaagugcuucggcaacaccgccgucgccaagugcaacgagaagcacgacgaggaguucugcgacaugcuccgccucuucgacuucaacaagcaggccauccgccgccucaaggccgaggcccagauguccauccagcucaucaacaaggccgucaacgcccucaucaacgaccagcucaucaugaagaaccaccuccgcgacaucaugggcauccccuacugcaacuacuccaaguacugguaccucaaccacaccuccuccggccgcaccucccuccccaagugcuggcucaucuccaacggcuccuaccucaacgagacccaguucuccgacgacaucgagcagcaggccgacaacaugaucaccgagaugcuccagaaggaguacaucgagcgccagggcaagaccccccucggccucgucgacaucuucaucuucuccaccuccuucuaccucaucuccaucuuccuccaccucaucaagauccccacccaccgccacaucgucggcaagcccugccccaagccccaccgccucaaccacaugggcgucugcuccugcggccucuacaagcaccccggcguccccaccaaguggaagcgcugaggacuagugcaucacauuuaaaagcaucucagccuaccaugagaauaagagaaagaaaaugaagaucaauagcuuauucaucucuuuuucuuuuucguugguguaaagccaacacccugucuaaaaaacauaaauuucuuuaaucauuuugccucuuuucucugugcuucaauuaauaaaaaauggaaagaaccuagaucuaaaaaaaaaaaaaaaaaaaaaaaaaaaaaaaaaaaaaaaaaaaaaaaaaaaaaaaaaaaaaaaaugcaucccccccccccccccccccccccccccccccaaaggcucuuuucagagccaccagaauu

SEQ ID NO: 3121 - RNA, 1855 nt, Artificial Sequence
  mRNA product Design i-2 comprising derived and/or modified sequence from LASV(803213;Clade II)__AAF86703__GPC (opt2)
ggggcgcugccuacggagguggcagccaucuccuucucggcaucaagcuuaccaugggccagaucaucaccuucuuccaggaggucccccacgucaucgaggaggucaugaacaucguccucaucgcccucucccuccucgccauccucaagggcaucuacaacgucgccaccugcggccucuucggccucaucuccuuccuccuccucugcggccgcuccugcuccgucaccuacaagggcgucuacgagcuccagacccucgagcucaacauggccaaccucaacaugaccaugccccucuccugcaccaagaacaacucccaccacuacaucauggucggcaacgagaccggccucgagcucacccucaccaacaccuccaucaucaaccacaaguucugcaaccucuccgacgcccacaagaagaaccucuacgaccacgcccucauguccaucaucuccaccuuccaccucuccauccccaacuucaaccaguacgaggccauguccugcgacuucaacggcggcaagaucuccguccaguacaaccucucccacuccuucgccgucgacgccgccaaccacugcggcaccaucgccaacggcguccuccagaccuucaugcgcauggccuggggcggcuccuacaucgcccucgacuccggcaagggcaacugggacugcaucaugaccuccuaccaguaccucaucauccagaacaccaccugggaggaccacugccaguucucccgccccucccccaucggcuaccucggccuccucucccagcgcacccgcgacaucuacaucucccgccgccuccucggcaccuucaccuggacccucuccgacuccgagggcaacgaggcccccggcggcuacugccucacccgcuggaugcucaucgaggccgagcucaagugcuucggcaacaccgccgucgccaagugcaacgagaagcacgacgaggaguucugcgacaugcuccgccucuucgacuucaacaagcaggccaucaagcgccucaagaccgaggcccagauguccauccagcucaucaacaaggccgucaacgcccucaucaacgaccagcucaucaugaagaaccaccuccgcgacaucaugggcauccccuacugcaacuacucccgcuacugguaccucaaccacaccgucaccggcaagaccucccucccccgcugcuggcucgucuccaacggcuccuaccucaacgagacccacuucuccgacgacaucgagcagcaggccgacaacaugaucaccgagaugcuccagaaggaguacauggaccgccagggcaagaccccccucggccucgucgaccucuucgucuucuccaccuccuucuaccucaucuccaucuuccuccaccucgucaagauccccacccaccgccacaucgucggcaagcccugccccaagccccaccgccucaaccacaugggcaucugcuccugcggccucuacaagcaccccggcguccccgucaaguggaagcgcugaggacuagugcaucacauuuaaaagcaucucagccuaccaugagaauaagagaaagaaaaugaagaucaauagcuuauucaucucuuuuucuuuuucguugguguaaagccaacacccugucuaaaaaacauaaauuucuuuaaucauuuugccucuuuucucugugcuucaauuaauaaaaaauggaaagaaccuagaucuaaaaaaaaaaaaaaaaaaaaaaaaaaaaaaaaaaaaaaaaaaaaaaaaaaaaaaaaaaaaaaaaugcaucccccccccccccccccccccccccccccccaaaggcucuuuucagagccaccagaauu

SEQ ID NO: 3122 - RNA, 1855 nt, Artificial Sequence
  mRNA product Design i-2 comprising derived and/or modified sequence from LASV(GA391;Clade III)__CAA36645__GPC (opt2)
ggggcgcugccuacggagguggcagccaucuccuucucggcaucaagcuuaccaugggccagaucgucaccuucuuccaggaggucccccacgucaucgaggaggucaugaacaucguccucaucgcccucuccauccucgccauccucaagggccucuacaacgucgccaccugcggccucaucggccucgucaccuuccuccuccucuccggccgcuccugcucccucaucuacaagggcaccuacgagcuccagacccucgagcucaacauggagacccucaacaugaccaugccccucuccugcaccaagaacaacucccaccacuacauccgcgucggcaacgagaccggccucgagcucacccucaccaacaccuccauccucaaccacaaguucugcaaccucuccgacgcccacaagcgcaaccucuacgaccacucccucauguccaucaucuccaccuuccaccucuccauccccaacuucaaccaguacgaggccauguccugcgacuucaacggcggcaagaucaccguccaguacaaccucucccacuccuucgccgucgacgccgccggccacugcggcacccucgccaacggcguccuccagaccuucaugcgcauggccuggggcggcuccuacaucgcccucgacuccggccgcggcaacugggacugcaucaugaccuccuaccaguaccucaucauccagaacaccaccugggacgaccacugccaguucucccgccccucccccaucggcuaccucggccuccucucccagcgcacccgcgacaucuacaucucccgccgccuccucggcaccuucaccuggacccucuccgacuccgagggcaacgagacccccggcggcuacugccucacccgcuggaugcucaucgaggccgagcucaagugcuucggcaacaccgccgucgccaagugcaacgagaagcacgacgaggaguucugcgacaugcuccgccucuucgacuucaacaagcaggccauccgccgccucaagaccgaggcccagauguccauccagcucaucaacaaggccgucaacgcccucaucaacgaccagcucaucaugaagaaccaccuccgcgacaucaugggcauccccuacugcaacuacucccgcuacugguaccucaaccacaccuccaccggcaagaccucccucccccgcugcuggcucaucuccaacggcuccuaccucaacgagaccaaguucuccgacgacaucgagcagcaggccgacaacaugaucaccgagaugcuccagaaggaguacaucgaccgccagggcaagaccccccucggccucgucgaccucuucgucuucuccaccuccuucuaccucaucuccaucuuccuccaccucgucaagauccccacccaccgccacaucgucggcaagcccugccccaagccccaccgccucaaccacaugggcaucugcuccugcggccucuacaagcagcccggcguccccguccgcuggaagcgcugaggacuagugcaucacauuuaaaagcaucucagccuaccaugagaauaagagaaagaaaaugaagaucaauagcuuauucaucucuuuuucuuuuucguugguguaaagccaacacccugucuaaaaaacauaaauuucuuuaaucauuuugccucuuuucucugugcuucaauuaauaaaaaauggaaagaaccuagaucuaaaaaaaaaaaaaaaaaaaaaaaaaaaaaaaaaaaaaaaaaaaaaaaaaaaaaaaaaaaaaaaaugcaucccccccccccccccccccccccccccccccaaaggcucuuuucagagccaccagaauu

SEQ ID NO: 3123 - RNA, 1858 nt, Artificial Sequence
  mRNA product Design i-2 comprising derived and/or modified sequence from LASV(AV;Clade V)__CCA30314__GPC (opt2)
ggggcgcugccuacggagguggcagccaucuccuucucggcaucaagcuuaccaugggccagaucgucaccuucuuccaggaggucccccacgucaucgaggaggucaugaacaucguccucaucgcccucuccauccucgccguccucaagggccucuacaacaucgccaccugcggccucaucggccucaucaccuuccuccuccucugcggccgcuccugcuccuccaaccucuacaagggcgucuacgagcuccagucccucgaccucaacauggagacccucaacaugaccaugccccucuccugcaccaagaacaacucccaccacuacauccgcgucggcaacgacaccggccucgagcucacccucaccaacaccuccauccucaaccacaaguucugcaaccucuccgacgcccacaagaaggaccucuacgaccacgcccucauguccaucaucuccaccuuccaccucuccauccccaacuucaaccaguacgaggccauguccugcgacuucaacggcggcaagaucuccguccaguacaaccucucccacuccuacgccaucgacgccgccaaccacugcggcaccgucgccaacggcauccuccagaccuucaugcgcauggccuggggcggcuccuacaucgcccucgacuccggccgcggcaacugggacugcaucaugaccuccuaccaguaccucaucauccagaacaccaccugggagaaccacugccaguucucccgccccucccccaucggcuaccucggccuccucucccagcgcacccgcgacaucuacaucucccgccgccuccucggcaccuucaccuggacccucuccgacuccgagggcaacgccacccccggcggcuacugccucacccgcuggaugcucaucgaggccgagcucaagugcuucggcaacaccgccgucgccaagugcaacgagaagcacgacgaggaguucugcgacaugcuccgccucuucgacuucaacaagcaggccaucucccgccucaaguccgaggcccagauguccauccagcucaucaacaaggccgucaacgcccucaucaacgaccagcucaucaugaagaaccaccuccgcgacaucaugggcauccccuacugcaacuacuccaaguacugguaccucaaccacaccaucaccggcaagaccucccuccccaagugcuggcucgucuccaacggcuccuaccucaacgagacccacuucuccgacgacaucgagcagcaggccgacaacaugaucaccgagaugcuccagaaggaguacauggagcgccagggcaagaccccccucggccucgucgaccucuucgucuucuccaccuccuucuaccucaucuccaucuuccuccgccucgucaagauccccacccaccgccacaucgucggcaagcccugccccaagccccaccgccucaaccacaugggcaucugcuccugcggccucuacaagcagcccggcguccccguccgcuggaagcgcugaggacuagugcaucacauuuaaaagcaucucagccuaccaugagaauaagagaaagaaaaugaagaucaauagcuuauucaucucuuuuucuuuuucguugguguaaagccaacacccugucuaaaaaacauaaauuucuuuaaucauuuugccucuuuucucugugcuucaauuaauaaaaaauggaaagaaccuagaucuaaaaaaaaaaaaaaaaaaaaaaaaaaaaaaaaaaaaaaaaaaaaaaaaaaaaaaaaaaaaaaaaugcaucccccccccccccccccccccccccccccccaaaggcucuuuucagagccaccagaauu

SEQ ID NO: 3124 - RNA, 1855 nt, Artificial Sequence
  mRNA product Design i-2 comprising derived and/or modified sequence from LASV(Togo/2016/7082;Clade VI)__AMR44577__GPC (opt2)
ggggcgcugccuacggagguggcagccaucuccuucucggcaucaagcuuaccaugggccagaucaucaccuucuuccaggaggucccccacgucaucgaggaggucaugaacaucguccucaucgcccucucccuccucgccauccucaagggcgucuacaacgucgccaccugcggcaucaucggccucgucaccuuccucuuccucugcggccgcuccugcucccucaucuacaagggcuccuacgagcuccagacccucgagcucaacauggagacccucaacaugaccaugccccucuccugcaccaagaacuccucccaccacuacauccgcgucggcaacgagaccggccucgagcucacccucaccaacaccuccaucaucaaccacaaguucugcaaccucuccgacgcccacaagcgcaaccucuacgaccacgcccucauguccauccucuccaccuuccaccucuccauccccaacuucaaccaguacgaggccauguccugcgacuucaacggcggcaagaucuccguccaguacaaccucucccacgccuacgccgucgacgccgccgagcacugcggcaccgucgccaacggcguccuccagaccuucaugcgcauggccuggggcggcuccuacaucgcccucgacuccggccgcggcaacugggacugcaucaugaccuccuaccaguaccucaucauccagaacaccaccugggaggaccacugccaguucucccgccccucccccaucggcuaccucggccuccucucccagcgcacccgcgacaucuacaucucccgccgccuccucggcaccuucaccuggacccucuccgacuccgagggcaacgagacccccggcggcuacugccucacccgcuggaugcucaucgaggccgagcucaagugcuucggcaacaccgccgucgccaagugcaacgagaagcacgacgaggaguucugcgacaugcuccgccucuucgacuucaacaagcaggccauccagcgccucaaguccgaggcccagauguccauccagcucaucaacaaggccgucaacgcccucaucaacgaccagcucaucaugaagaaccaccuccgcgacaugaugggcauccccuacugcaacuacuccaaguacugguaccucaaccacaccuccuccggccgcaccucccuccccaagugcuggcucgucuccaacggcuccuaccucaacgagacccacuucuccgacgacaucgagcagcaggccgacaacaugaucaccgagaugcuccagaaggaguacaucgaccgccagggcaagaccccccucggccucgucgaccucuucgucuucuccaccuccuucuaccucaucuccaucuuccuccaccucaucaagauccccacccaccgccacaucgucggcaagcccugccccaagccccaccgccucaaccacaugggcaucugcuccugcggccucuacaagcagcccggcguccccacccgcuggaagcgcugaggacuagugcaucacauuuaaaagcaucucagccuaccaugagaauaagagaaagaaaaugaagaucaauagcuuauucaucucuuuuucuuuuucguugguguaaagccaacacccugucuaaaaaacauaaauuucuuuaaucauuuugccucuuuucucugugcuucaauuaauaaaaaauggaaagaaccuagaucuaaaaaaaaaaaaaaaaaaaaaaaaaaaaaaaaaaaaaaaaaaaaaaaaaaaaaaaaaaaaaaaaugcaucccccccccccccccccccccccccccccccaaaggcucuuuucagagccaccagaauu

SEQ ID NO: 3125 - RNA, 1855 nt, Artificial Sequence
  mRNA product Design i-2 comprising derived and/or modified sequence from LASV(KAK-428;Clade n.d. (VII))__ANH09740__GPC (opt2)
ggggcgcugccuacggagguggcagccaucuccuucucggcaucaagcuuaccaugggccagaucgucaccuucuuccaggaggucccccacgucaucgaggaggucaugaacaucguccucaucgcccucucccuccucgccauccucaagggccucuacaacuucgccaccugcggcgucaucggccucaucaccuuccuccuccucugcggccgcuccugcuccgccaccuacaagggccaguacgagcuccagacccucgagcucaacauggagucccucaacaugaccaugccccucuccugcaccaagaacaacucccaccacuacauccgcgccggcaacaacaccggccucgagcucacccucaccaacaccuccaucaucucccacaaguucugcaaccucuccgacgcccacaagaagaaccucuacgaccacacccucauguccaucaucaccaccuuccaccucuccauccccaacuucaaccaguacgaggccauguccugcgacuucaacggcggcaagaucuccauccaguacaaccucucccacuccuacgccggcgacgccgcccagcacugcggcaccgucgccaacggcguccuccagaccuucaugcgcauggccuggggcggcuccuaccucgcccucgacuccggccgccgcggcugggacugcaucaucuccuccuaccaguaccucaucauccagaacaccaccugggacgaccacugccaguucucccgccccucccccaucggcuaccucggcuucgucucccagaagacccgcgacaucuacaucucccgccgccuccucggcaccuucaccuggacccucuccgacuccgagggccacgacaugcccggcggcuacugccucacccgcuggaugcucaucgaggccgaccucaagugcuucggcaacaccgccgucgccaagugcaacgagaagcacgacgaggaguucugcgacauguggcgccucuucgacuucaacaagcaggccauccagcgccucaaggccgaggcccagaugaacauccagcucaucaacaaggccgucaacgcccucaucaacgaccagcucaugaugaagaaccaccuccgcgacaucaugggcauccccuacugcaacuacuccaaguucugguaccucaacaacaccaccaccggccgcaccucccucccccgcugcuggcucaucuccaacggcuccuaccucaacgagacccacuucuccgacgacaucgagcagcaggccgacaacaugaucaccgagaugcuccagaaggaguacauggaccgccagggcaagaccccccucggccucgucgaccucuucgucuucuccaccuccuucuaccucaucaccaucuuccuccaccucgucaagauccccacccaccgccacaucgucggcaagcccugccccaagccccaccgccucaaccacaugggcaucugcuccugcggccucuacaagcagcccggcguccccguccgcuggaagcgcugaggacuagugcaucacauuuaaaagcaucucagccuaccaugagaauaagagaaagaaaaugaagaucaauagcuuauucaucucuuuuucuuuuucguugguguaaagccaacacccugucuaaaaaacauaaauuucuuuaaucauuuugccucuuuucucugugcuucaauuaauaaaaaauggaaagaaccuagaucuaaaaaaaaaaaaaaaaaaaaaaaaaaaaaaaaaaaaaaaaaaaaaaaaaaaaaaaaaaaaaaaaugcaucccccccccccccccccccccccccccccccaaaggcucuuuucagagccaccagaauu

SEQ ID NO: 3126 - RNA, 1855 nt, Artificial Sequence; identical to SEQ ID NO: 3120
  mRNA product Design i-2 comprising derived and/or modified sequence from LASV(Pinneo-NIG-1969;Clade I)__AIT17836__GPC (opt2)

SEQ ID NO: 3127 - RNA, 1855 nt, Artificial Sequence
  mRNA product Design i-2 comprising derived and/or modified sequence from LASV(ISTH0009-NIG-2011;Clade II)__AIT17404__GPC (opt2)
ggggcgcugccuacggagguggcagccaucuccuucucggcaucaagcuuaccaugggccagaucaucaccuucuuccaggaggucccccacgucaucgaggaggucaugaacaucguccucaucgcccucucccuccucgccauccucaagggcaucuacaacgucgccaccugcggccucuucggccucgucuccuuccuccuccucugcggccgcuccugcuccaccaccuacaagggcgucuacgagcuccagacccucgagcucgacauggccucccucaacaugaccaugccccucuccugcaccaagaacaacucccaccacuacaucauggucggcaacgagaccggccucgagcucacccucaccaacaccuccaucaucaaccacaaguucugcaaccucuccgacgcccacaagaagaaccucuacgaccacgcccucauguccaucaucuccaccuuccaccucuccauccccaacuucaaccaguacgaggccauguccugcgacuucaacggcggcaagaucuccguccaguacaaccucucccacgccuacgccgucgacgccgccaaccacugcggcaccaucgccaacggcguccuccagaccuucaugcgcauggccuggggcggcuccuacaucgcccucgacuccggcaagggcuccugggacugcaucaugaccuccuaccaguaccucaucauccagaacaccaccugggaggaccacugccaguucucccgccccucccccaucggcuaccucggccuccucucccagcgcacccgcgacaucuacaucucccgccgccuccucggcaccuucaccuggacccucuccgacuccgagggcaacgagacccccggcggcuacugccucacccgcuggaugcucaucgaggccgagcucaagugcuucggcaacaccgccgucgccaagugcaacgagaagcacgacgaggaguucugcgacaugcuccgccucuucgacuucaacaagcaggccauccgccgccucaagaccgaggcccagauguccauccagcucaucaacaaggccgucaacgcccucaucaacgaccagcucaucaugaagaaccaccuccgcgacaucaugggcauccccuacugcaacuacuccaaguacugguaccucaaccacaccgucaccggcaagaccucccucccccgcugcuggcucgucuccaacggcuccuaccucaacgagacccacuucuccgacgacaucgagcagcaggccgacaacaugaucaccgagcuccuccagaaggaguacauggaccgccagggcaagaccccccucggccucgucgaccucuucgucuucuccaccuccuucuaccucaucuccaucuuccuccaccucaucaagauccccacccaccgccacaucaccggcaagcccugccccaagccccaccgccucaaccacaugggcaucugcuccugcggccucuacaagcaccccggcguccccgucaaguggaagcgcugaggacuagugcaucacauuuaaaagcaucucagccuaccaugagaauaagagaaagaaaaugaagaucaauagcuuauucaucucuuuuucuuuuucguugguguaaagccaacacccugucuaaaaaacauaaauuucuuuaaucauuuugccucuuuucucugugcuucaauuaauaaaaaauggaaagaaccuagaucuaaaaaaaaaaaaaaaaaaaaaaaaaaaaaaaaaaaaaaaaaaaaaaaaaaaaaaaaaaaaaaaaugcaucccccccccccccccccccccccccccccccaaaggcucuuuucagagccaccagaauu

SEQ ID NO: 3128 - RNA, 1855 nt, Artificial Sequence
  mRNA product Design i-2 comprising derived and/or modified sequence from LASV(ISTH2010-NIG-2012;Clade II)__AIT17482__GPC (opt2)
ggggcgcugccuacggagguggcagccaucuccuucucggcaucaagcuuaccaugggccagaucaucaccuucuuccaggaggucccccacgucaucgaggaggucaugaacaucguccucaucgcccucucccuccucgccauccucaagggcaucuacaacgucgccaccugcggccucuucggccucgucuccuuccuccuccucugcggccgcuccugcuccaccaccuacaagggcgucuacgagcuccagacccucgagcucgacauggccucccucaacaugaccaugccccucuccugcaccaagaacaacucccaccacuacaucauggucggcaacgagaccggccucgagcucacccucaccaacaccuccaucaucaaccacaaguucugcaaccucuccgacgcccacaagaagaaccucuacgaccacgcccucauguccaucaucuccaccuuccaccucuccauccccaacuucaaccaguacgaggccauguccugcgacuucaacggcggcaagaucuccguccaguacaaccucucccacgccuacgccgucgacgccgccaaccacugcggcaccaucgccaacggcguccuccagaccuucaugcgcauggccuggggcggcuccuacaucgcccucgacuccggcaagggcuccugggacugcaucaugaccuccuaccaguaccucaucauccagaacaucaccugggaggaccacugccaguucucccgccccucccccaucggcuaccucggccuccucucccagcgcacccgcgacaucuacaucucccgccgccuccucggcaccuucaccuggacccucuccgacuccgagggcaacgagacccccggcggcuacugccucacccgcuggaugcucaucgaggccgagcucaagugcuucggcaacaccgccgucgccaagugcaacgagaagcacgacgaggaguucugcgacaugcuccgccucuucgacuucaacaagcaggccauccgccgccucaagaccgaggcccagauguccauccagcucaucaacaaggccgucaacgcccucaucaacgaccagcucaucaugaagaaccaccuccgcgacaucaugggcauccccuacugcaacuacuccaaguacugguaccucaaccacaccgucaccggcaagaccucccucccccgcugcuggcucgucuccaacggcuccuaccucaacgagacccacuucuccgacgacaucgagcagcaggccgacaacaugaucaccgagcuccuccagaaggaguacaucgaccgccagggcaagaccccccucggccucgucgaccucuucgucuucuccaccuccuucuaccucaucuccaucuuccuccaccucgucaagauccccacccaccgccacgucgucggcaagcccugccccaagccccaccgccucaaccacaugggcaucugcuccugcggccucuacaagcaccccggcguccccgucaaguggaagcgcugaggacuagugcaucacauuuaaaagcaucucagccuaccaugagaauaagagaaagaaaaugaagaucaauagcuuauucaucucuuuuucuuuuucguugguguaaagccaacacccugucuaaaaaacauaaauuucuuuaaucauuuugccucuuuucucugugcuucaauuaauaaaaaauggaaagaaccuagaucuaaaaaaaaaaaaaaaaaaaaaaaaaaaaaaaaaaaaaaaaaaaaaaaaaaaaaaaaaaaaaaaaugcaucccccccccccccccccccccccccccccccaaaggcucuuuucagagccaccagaauu

SEQ ID NO: 3129 - RNA, 1855 nt, Artificial Sequence
  mRNA product Design i-2 comprising derived and/or modified sequence from LASV(Lassa virus/H.sapiens-wt/NGA/2015/ISTH_0543;Clade II)__AVO03639__GPC (opt2)
ggggcgcugccuacggagguggcagccaucuccuucucggcaucaagcuuaccaugggccagaucaucaccuucuuccaggaggucccccacgucaucgaggaggucaugaacaucguccucaucgcccucucccuccucgccauccucaagggcaucuacaacgucgccaccugcggccucuucggccucgucuccuuccuccuccucugcggccgcuccugcuccaccaccuacaagggcgucuacgagcuccagacccucgagcucgacauggccaaccucaacaugaccaugccccucuccugcaccaagaacaacucccaccacuacaucauggucggcaacgagaccggccucgagcucacccucaccaacaccuccaucaucaaccacaaguucugcaaccucuccgacgcccacaagaagaaccucuacgaccacgcccucauguccaucaucuccaccuuccaccucuccauccccaacuucaaccaguacgaggccauguccugcgacuucaacggcggcaagaucuccguccaguacaaccucucccacaccuacgccgucgacgccgccaaccacugcggcaccaucgccaacggcguccuccagaccuucaugcgcauggccuggggcggcuccuacaucgcccucgacuccggcaagggcuccugggacugcaucaugaccuccuaccaguaccucgucauccagaacaccaccugggaggaccacugccaguucucccgccccucccccaucggcuaccucggccuccucucccagcgcacccgcgacaucuacaucucccgccgccuccucggcaccuucaccuggacccucuccgacuccgagggcaacgagacccccggcggcuacugccucacccgcuggaugcucaucgaggccgagcucaagugcuucggcaacaccgccgucgccaagugcaacgagaagcacgacgaggaguucugcgacaugcuccgccucuucgacuucaacaagcaggccauccgccgccucaagaccgaggcccagauguccauccagcucaucaacaaggccgucaacgcccucaucaacgaccagcucaucaugaagaaccaccuccgcgacaucaugggcauccccuacugcaacuacuccaaguacugguaccucaaccacaccgucaccggcaagaccucccucccccgcugcuggcucgucuccaacggcuccuaccucaacgagacccacuucuccgacgacaucgagcagcaggccgacaacaugaucaccgagcuccuccagaaggaguacaucgaccgccagggcaagaccccccucggccucgucgaccucuucgucuucuccaccuccuucuaccucaucuccaucuuccuccaccucgucaagauccccacccaccgccacaucaccggcaagcccugccccaagccccaccgccucaaccacaugggcaucugcuccugcggccucuacaagcaccccggcguccccgucaaguggaagcgcugaggacuagugcaucacauuuaaaagcaucucagccuaccaugagaauaagagaaagaaaaugaagaucaauagcuuauucaucucuuuuucuuuuucguugguguaaagccaacacccugucuaaaaaacauaaauuucuuuaaucauuuugccucuuuucucugugcuucaauuaauaaaaaauggaaagaaccuagaucuaaaaaaaaaaaaaaaaaaaaaaaaaaaaaaaaaaaaaaaaaaaaaaaaaaaaaaaaaaaaaaaaugcaucccccccccccccccccccccccccccccccaaaggcucuuuucagagccaccagaauu

SEQ ID NO: 3130 - RNA, 1855 nt, Artificial Sequence
  mRNA product Design i-2 comprising derived and/or modified sequence from LASV(Lassa virus/H.sapiens-wt/NGA/2016/ISTH_0009;Clade II)__AVO03571__GPC (opt2)
ggggcgcugccuacggagguggcagccaucuccuucucggcaucaagcuuaccaugggccagaucaucaccuucuuccaggaggucccccacgucaucgaggaggucaugaacaucguccucaucgcccucucccuccucgccauccucaagggcaucuacaacgucgccaccugcggccuccucggccucgucuccuuccuccuccucugcggccgcuccugcuccaccaccuacaagggcgucuacgagcuccagacccucgagcucgacauggccucccucaacaugaccaugccccucuccugcaccaagaacaacucccaccacuacaucauggucggcaacgagaccggccucgagcucacccucaccaacaccuccaucaucaaccacaaguucugcaaccucuccgacgcccacaagaagaaccucuacgaccacgcccucauguccaucaucuccaccuuccaccucuccauccccaacuucaaccaguacgaggccauguccugcgacuucaacggcggccgcaucuccguccaguacaaccucucccacuccuacgccgucgacgccgccaaccacugcggcaccaucgccaacggcguccuccagaccuucaugcgcauggccuggggcggcuccuacaucgcccucgacuccggcaagggcuccugggacugcaucaugaccuccuaccaguaccucaucauccagaacaccaccugggaggaccacugccaguucucccgccccucccccaucggcuaccucggccuccucucccagcgcacccgcgacaucuacaucucccgccgccuccucggcaccuucaccuggacccucuccgacuccgagggcaacgagacccccggcggcuacugccucacccgcuggaugcucaucgaggccgagcucaagugcuucggcaacaccgccgucgccaagugcaacgagaagcacgacgaggaguucugcgacaugcuccgccucuucgacuucaacaagcaggccauccgccgccucaagaccgaggcccagauguccauccagcucaucaacaaggccgucaacgcccucaucaacgaccagcucaucaugaagaaccaccuccgcgacaucaugggcauccccuacugcaacuacuccaaguacugguaccucaaccacaccgucaccggcaagaccucccucccccgcugcuggcucgucuccaacggcuccuaccucaacgagacccacuucuccgacgacaucgagcagcaggccgacaacaugaucaccgagcuccuccagaaggaguacaucgaccgccagggcaagaccccccucggccucgucgaccucuucgucuucuccaccuccuucuaccucaucuccaucuuccuccaccucgucaagauccccacccaccgccacaucaccggcaagcccugccccaagccccaccgccucaaccacaugggcaucugcuccugcggccucuacaaccaccccggcguccccgucaaguggaagcgcugaggacuagugcaucacauuuaaaagcaucucagccuaccaugagaauaagagaaagaaaaugaagaucaauagcuuauucaucucuuuuucuuuuucguugguguaaagccaacacccugucuaaaaaacauaaauuucuuuaaucauuuugccucuuuucucugugcuucaauuaauaaaaaauggaaagaaccuagaucuaaaaaaaaaaaaaaaaaaaaaaaaaaaaaaaaaaaaaaaaaaaaaaaaaaaaaaaaaaaaaaaaugcaucccccccccccccccccccccccccccccccaaaggcucuuuucagagccaccagaauu

SEQ ID NO: 3131 - RNA, 1855 nt, Artificial Sequence
  mRNA product Design i-2 comprising derived and/or modified sequence from LASV(Lassa virus/H.sapiens-wt/NGA/2016/ISTH_0017;Clade II)__AVO03567__GPC (opt2)
ggggcgcugccuacggagguggcagccaucuccuucucggcaucaagcuuaccaugggccagaucaucaccuucuuccaggaggucccccacgucaucgaggaggucaugaacaucguccucaucgcccucucccuccucgccauccucaagggcaucuacaacgucgccaccugcggccucuucggccucgucuccuuccuccuccucugcggccgcuccugcuccaccaccuacaagggcgucuacgagcuccagacccucgagcucgacauggccucccucaacaugaccaugccccucuccugcaccaagaacaacucccaccacuacaucauggucggcaacgagaccggccucgagcucacccucaccaacaccuccaucaucaaccacaaguucugcaaccucuccgacgcccacaagaagaaccucuacgaccacgcccucauguccaucaucuccaccuuccaccucuccauccccaacuucaaccaguacgaggccauguccugcgacuucaacggcggcaagaucuccguccaguacaaccucucccacaccuacgccaucgacgccgccaaccacugcggcaccaucgccaacggcguccuccagaccuucaugcgcauggccuggggcggcuccuacaucgcccucgacuccggcaagggcuccugggacugcaucaugaccuccuaccaguaccucaucauccagaacaccaccugggaggaccacugccaguucucccgccccucccccaucggcuaccucggccuccucucccagcgcacccgcgacaucuacaucucccgccgccuccucggcaccuucaccuggacccucuccgacuccgagggcaacgagacccccggcggcuacugccucacccgcuggaugcucaucgaggccgagcucaagugcuucggcaacaccgccgucgccaagugcaacgagaagcacgacgaggaguucugcgacaugcuccgccucuucgacuucaacaagcaggccauccgccgccucaagaccgaggcccagauguccauccagcucaucaacaaggccgucaacgcccucaucaacgaccagcucaucaugaagaaccaccuccgcgacaucaugggcauccccuacugcaacuacuccaaguacugguaccucaaccacaccgucaccggcaagaccucccucccccgcugcuggcucgucuccaacggcuccuaccucaacgagacccacuucuccgacgacaucgagcagcaggccgacaacaugaucaccgagcuccuccagaaggaguacauggaccgccagggcaagaccccccucggccucgucgaccucuucgucuucuccaccuccuucuaccucaucuccaucuuccuccaccucguccgcauccccacccaccgccacgucaucggcaagcccugccccaagccccaccgccucaaccacaugggcaucugcuccugcggccucuacaagcaccccggcguccccgucaaguggaagcgcugaggacuagugcaucacauuuaaaagcaucucagccuaccaugagaauaagagaaagaaaaugaagaucaauagcuuauucaucucuuuuucuuuuucguugguguaaagccaacacccugucuaaaaaacauaaauuucuuuaaucauuuugccucuuuucucugugcuucaauuaauaaaaaauggaaagaaccuagaucuaaaaaaaaaaaaaaaaaaaaaaaaaaaaaaaaaaaaaaaaaaaaaaaaaaaaaaaaaaaaaaaaugcaucccccccccccccccccccccccccccccccaaaggcucuuuucagagccaccagaauu

SEQ ID NO: 3132 - RNA, 1855 nt, Artificial Sequence
  mRNA product Design i-2 comprising derived and/or modified sequence from LASV(Lassa virus/H.sapiens-wt/NGA/2018/ISTH_0959;Clade II)__AVV65099__GPC (opt2)
ggggcgcugccuacggagguggcagccaucuccuucucggcaucaagcuuaccaugggccagaucaucaccuucuuccaggaggucccccacgucaucgaggaggucaugaacaucguccucaucgcccucucccuccucgccauccucaagggcaucuacaacgucgucaccugcggccucuucggccucgucuccuuccuccuccucugcggccgcuccugcuccaccaccuacaagggcgucuacgagcuccagacccucgagcucgacauggccucccucaacaugaccaugccccucuccugcaccaagaacaacucccaccacuacaucauggucggcaacgagaccggccucgagcucacccucaccaacaccuccaucaucaaccacaaguucugcaaccucuccgacgcccacaagaagaaccucuacgaccacgcccucauguccaucaucuccaccuuccaccucuccauccccaacuucaaccaguacgaggccauguccugcgacuucaacggcggcaagaucuccguccaguacaaccucucccacgccuacgccaucgacgccgccaaccacugcggcaccaucgccaacggcguccuccagaccuucaugcgcauggccuggggcggcuccuacaucgcccucgacuccggcaagggcuccugggacugcaucaugaccuccuaccaguaccucaucauccagaacaccaccugggaggaccacugccaguucucccgccccucccccaucggcuaccucggccuccucucccagcgcacccgcgacaucuacaucucccgccgccuccucggcaccuucaccuggacccucuccgacuccgagggcaacgagacccccggcggcuacugccucacccgcuggaugcucaucgaggccgagcucaagugcuucggcaacaccgccgucgccaagugcaacgagaagcacgacgaggaguucugcgacaugcuccgccucuucgacuucaacaagcaggccauccgccgccucaagaccgaggcccagauguccauccagcucaucaacaaggccgucaacgcccucaucaacgaccagcucaucaugaagaaccaccuccgcgacaucaugggcauccccuacugcaacuacuccaaguacugguaccucaaccacaccgucaccggcaagaccucccucccccgcugcuggcucgucuccaacggcuccuaccucaacgagacccacuucuccgacgacaucgagcagcaggccgacaacaugaucaccgagcuccuccagaaggaguacaucgaccgccagggcaagaccccccucggccucgucgaccucuucgucuucuccaccuccuucuaccucaucuccaucuuccuccaccucgucaagauccccacccaccgccacgucaucggcaagcccugccccaagccccaccgccucaaccacaugggcaucugcuccugcggccucuacaagcaccccggcguccccgucaaguggaagcgcugaggacuagugcaucacauuuaaaagcaucucagccuaccaugagaauaagagaaagaaaaugaagaucaauagcuuauucaucucuuuuucuuuuucguugguguaaagccaacacccugucuaaaaaacauaaauuucuuuaaucauuuugccucuuuucucugugcuucaauuaauaaaaaauggaaagaaccuagaucuaaaaaaaaaaaaaaaaaaaaaaaaaaaaaaaaaaaaaaaaaaaaaaaaaaaaaaaaaaaaaaaaugcaucccccccccccccccccccccccccccccccaaaggcucuuuucagagccaccagaauu

SEQ ID NO: 3133 - RNA, 1855 nt, Artificial Sequence
  mRNA product Design i-2 comprising derived and/or modified sequence from LASV(LASV003-NIG-2008;Clade II)__AIT17580__GPC (opt2)
ggggcgcugccuacggagguggcagccaucuccuucucggcaucaagcuuaccaugggccagaucaucaccuucuuccaggaggucccccacgucaucgaggaggucaugaacaucguccucaucgcccucucccuccucgccauccucaagggcaucuacaacgucgccaccugcggccucuucggccucgucuccuuccuccuccucugcggccgcuccugcuccaccaccuacaagggcgucuacgagcuccagacccucgagcucgacauggccucccucaacaugaccaugccccucuccugcaccaagaacaacucccaccacuacaucauggucggcaacgagaccggccucgagcucacccucaccaacaccuccaucaucaaccacaaguucugcaaccucuccgacgcccacaagaagaaccucuacgaccacgcccucauguccaucaucuccaccuuccaccucuccauccccaacuucaaccaguacgaggccauguccugcgacuucaacggcggcaagaucuccguccaguacaaccucucccacaccuacgccgucgacgccgccaaccacugcggcaccaucgccaacggcguccuccagaccuucaugcgcauggccuggggcggcuccuacaucgcccucgacuccggcaagggcuccugggacugcaucaugaccuccuaccaguaccucaucauccagaacaccaccugggaggaccacugccaguucucccgccccucccccaucggcuaccucggccuccucucccagcgcacccgcgacaucuacaucucccgccgccuccucggcaccuucaccuggacccucuccgacuccgaguccaacgagacccccggcggcuacugccucacccgcuggaugcucaucgaggccgagcucaagugcuucggcaacaccgccgucgccaagugcaacgagaagcacgacgaggaguucugcgacaugcuccgccucuucgacuucaacaagcaggccauccgccgccucaaggccgaggcccagauguccauccagcucaucaacaaggccgucaacgcccucaucaacgaccagcucaucaugaagaaccaccuccgcgacaucaugggcauccccuacugcaacuacuccaaguacugguaccucaaccacaccgucaccggccgcaccucccucccccgcugcuggcucgucuccaacggcuccuaccucaacgagacccacuucuccgacgacaucgagcagcaggccgacaacaugaucaccgagcuccuccagaaggaguacauggaccgccagggcaagaccccccucggccucgucgaccucuucgucuucuccaccuccuucuaccucaucuccaucuuccuccaccucgucaagauccccacccaccgccacgucaucggcaagcccugccccaagccccaccgccucaaccacaugggcaucugcuccugcggccucuacaagcaccccggcguccccgucaaguggaagcgcugaggacuagugcaucacauuuaaaagcaucucagccuaccaugagaauaagagaaagaaaaugaagaucaauagcuuauucaucucuuuuucuuuuucguugguguaaagccaacacccugucuaaaaaacauaaauuucuuuaaucauuuugccucuuuucucugugcuucaauuaauaaaaaauggaaagaaccuagaucuaaaaaaaaaaaaaaaaaaaaaaaaaaaaaaaaaaaaaaaaaaaaaaaaaaaaaaaaaaaaaaaaugcaucccccccccccccccccccccccccccccccaaaggcucuuuucagagccaccagaauu

SEQ ID NO: 3134 - RNA, 1855 nt, Artificial Sequence
  mRNA product Design i-2 comprising derived and/or modified sequence from LASV(LASV035-NIG-2009;Clade II)__AIT17588__GPC (opt2)
ggggcgcugccuacggagguggcagccaucuccuucucggcaucaagcuuaccaugggccagaucaucaccuucuuccaggaggucccccacgucaucgaggaggucaugaacaucguccucaucgcccucucccuccucgccauccucaagggcaucuacaacgucgccaccugcggccucuucggccucgucuccuuccuccuccucugcggccgcuccugcuccaccaccuacaagggcgucuacgagcuccagacccucgagcucgacauggccucccucaacaugaccaugccccucuccugcaccaagaacaacucccaccacuacaucauggucggcaacgagaccggccucgagcucacccucaccaacaccuccaucaucaaccacaaguucugcaaccucuccgacgcccacaagaagaaccucuacgaccacgcccucauguccaucaucuccaccuuccaccucuccauccccaacuucaaccaguacgaggccauguccugcgacuucaacggcggcaagaucuccguccaguacaaccucucccacgccuacgccgucgacgccgccaaccacugcggcaccaucgccaacggcguccuccagaccuucaugcgcauggccuggggcggcuccuacaucgcccucgacuccggcaagggcuccugggacugcaucaugaccuccuaccaguaccucaucauccagaacaccaccugggaggaccacugccaguucucccgccccucccccaucggcuaccucggccuccucucccagcgcacccgcgacaucuacaucucccgccgccuccucggcaccuucaccuggacccucuccgacuccgagggcaacgagacccccggcggcuacugccucacccgcuggaugcucaucgaggccgagcucaagugcuucggcaacaccgccgucgccaagugcaacgagaagcacgacgaggaguucugcgacaugcuccgccucuucgacuucaacaagcaggccauccgccgccucaaggccgaggcccagauguccauccagcucaucaacaaggccgucaacgcccucaucaacgaccagcucaucaugaagaaccaccuccgcgacaucaugggcauccccuacugcaacuacuccaaguacugguaccucaaccacaccgucaccggcaagaccucccucccccgcugcuggcucgucuccaacggcuccuaccucaacgagacccacuucuccgacgacaucgagcagcaggccgacaacaugaucaccgagcuccuccagaaggaguacaucgaccgccagggcaagaccccccucggccucgucgaccucuucgucuucuccaccuccuucuaccucaucuccaucuuccuccaccucgucaagauccccacccaccgccacgucaucggcaagcccugccccaagccccaccgccucaaccacaugggcaucugcuccugcggccucuacaagcaccccggcguccccgucaaguggaagcgcugaggacuagugcaucacauuuaaaagcaucucagccuaccaugagaauaagagaaagaaaaugaagaucaauagcuuauucaucucuuuuucuuuuucguugguguaaagccaacacccugucuaaaaaacauaaauuucuuuaaucauuuugccucuuuucucugugcuucaauuaauaaaaaauggaaagaaccuagaucuaaaaaaaaaaaaaaaaaaaaaaaaaaaaaaaaaaaaaaaaaaaaaaaaaaaaaaaaaaaaaaaaugcaucccccccccccccccccccccccccccccccaaaggcucuuuucagagccaccagaauu

SEQ ID NO: 3135 - RNA, 1855 nt, Artificial Sequence
  mRNA product Design i-2 comprising derived and/or modified sequence from LASV(LASV1000-NIG-2009;Clade II)__AIT17782__GPC (opt2)
ggggcgcugccuacggagguggcagccaucuccuucucggcaucaagcuuaccaugggccagaucaucaccuucuuccaggaggucccccacgucaucgaggaggucaugaacaucguccucaucgcccucucccuccucgccauccucaagggcaucuacaacgucgccaccugcggccucuucggccucgucuccuuccuccuccucugcggccgcuccugcuccaccaccuacaagggcgucuacgagcuccagacccucgagcucgacauggccucccucaacaugaccaugccccucuccugcaccaagaacaacucccaccacuacaucauggucggcaacgagaccggccucgagcucacccucaccaacaccuccaucaucaaccacaaguucugcaaccucuccgacgcccacaagaagaaccucuacgaccacgcccucauguccaucaucuccaccuuccaccucuccauccccaacuucaaccaguacgaggccauguccugcgacuucaacggcggcaagaucuccguccaguacaaccucucccacaccuacgccgucgacgccgccaaccacugcggcaccaucgccaacggcguccuccagaccuucaugcgcauggccuggggcggcuccuacaucgcccucgacuccggcaagggcuccugggacugcaucaugaccuccuaccaguaccucaucauccagaacaccaccugggaggaccacugccaguucucccgccccucccccaucggcuaccucggccuccucucccagcgcacccgcgacaucuacaucucccgccgccuccucggcaccuucaccuggacccucuccgacuccgagggcaacgagacccccggcggcuacugccucacccgcuggaugcucaucgaggccgagcucaagugcuucggcaacaccgccgucgccaagugcaacgagaagcacgacgaggaguucugcgacaugcuccgccucuucgacuucaacaagcaggccaucaagcgccucaagaccgaggcccagauguccauccagcucaucaacaaggccgucaacgcccucaucaacgaccagcucaucaugaagaaccaccuccgcgacaucaugggcauccccuacugcaacuacuccaaguacugguaccucaaccacaccgucaccggcaagaccucccucccccgcugcuggcucgucuccaacggcuccuaccucaacgagacccacuucuccgacgacaucgagcagcaggccgacaacaugaucaccgagcuccuccagaaggaguacaucgaccgccagggcaagaccccccucggccucgucgaccucuucgucuucuccaccuccuucuaccucaucuccaucuuccuccaccucgucaagauccccacccaccgccacgucgucggcaagcccugccccaagccccaccgccucaaccacaugggcaucugcuccugcggccucuacaagcaccccggcguccccgucaaguggaagcgcugaggacuagugcaucacauuuaaaagcaucucagccuaccaugagaauaagagaaagaaaaugaagaucaauagcuuauucaucucuuuuucuuuuucguugguguaaagccaacacccugucuaaaaaacauaaauuucuuuaaucauuuugccucuuuucucugugcuucaauuaauaaaaaauggaaagaaccuagaucuaaaaaaaaaaaaaaaaaaaaaaaaaaaaaaaaaaaaaaaaaaaaaaaaaaaaaaaaaaaaaaaaugcaucccccccccccccccccccccccccccccccaaaggcucuuuucagagccaccagaauu

SEQ ID NO: 3136 - RNA, 1855 nt, Artificial Sequence
  mRNA product Design i-2 comprising derived and/or modified sequence from LASV(LASV221-NIG-2010;Clade II)__AIT17624__GPC (opt2)
ggggcgcugccuacggagguggcagccaucuccuucucggcaucaagcuuaccaugggccagaucaucaccuucuuccaggaggucccccacgucaucgaggaggucaugaacaucguccucaucgcccucucccuccucgccauccucaagggcaucuacaacgucgccaccugcggccucuucggccucgucuccuuccuccuccucugcggccgcuccugcuccaccaccuacaagggcgucuacgagcuccagacccucgagcucgacauggccucccucaacaugaccaugccccucuccugcaccaagaacaacucccaccacuacaucauggucggcaacgagaccggccucgagcucacccucaccaacaccuccaucaucaaccacaaguucugcaaccucuccgacgcccacaagaagaaccucuacgaccacgcccucauguccaucaucuccaccuuccaccucuccauccccaacuucaaccaguacgaggccauguccugcgacuucaacggcggcaagaucuccguccaguacaaccucucccacaccuacgccaucgacgccgccaaccacugcggcaccaucgccaacggcguccuccagaccuucaugcgcauggccuggggcggcuccuacaucgcccucgacuccggcaagggcuccugggacugcaucaugaccuccuaccaguaccucaucauccagaacaccaccugggaggaccacugccaguucucccgccccucccccaucggcuaccucggccuccucucccagcgcacccgcgacaucuacaucucccgccgccuccucggcaccuucaccuggacccucuccgacuccgagggcaacgagacccccggcggcuacugccucacccgcuggaugcucaucgaggccgagcucaagugcuucggcaacaccgccgucgccaagugcaacgagaagcacgacgaggaguucugcgacaugcuccgccucuucgacuucaacaagcaggccauccgccgccucaagaccgaggcccagauguccauccagcucaucaacaaggccgucaacgcccucaucaacgaccagcucaucaugaagaaccaccuccgcgacaucaugggcauccccuacugcaacuacuccaaguacugguaccucaaccacaccgucaccggcaagaccucccucccccgcugcuggcucgucuccaacggcuccuaccucaacgagacccacuucuccgacgacaucgagcagcaggccgacaacaugaucaccgagaugcuccagaaggaguacauggaccgccagggcaagaccccccucggccucgucgaccucuucgucuucuccaccuccuucuaccucaucuccaucuuccuccaccucgucaagauccccacccaccgccacgucaucggcaagcccugccccaagccccaccgccucaaccacaugggcaucugcuccugcggccucuacaagcaccccggcguccccgucaaguggaagcgcugaggacuagugcaucacauuuaaaagcaucucagccuaccaugagaauaagagaaagaaaaugaagaucaauagcuuauucaucucuuuuucuuuuucguugguguaaagccaacacccugucuaaaaaacauaaauuucuuuaaucauuuugccucuuuucucugugcuucaauuaauaaaaaauggaaagaaccuagaucuaaaaaaaaaaaaaaaaaaaaaaaaaaaaaaaaaaaaaaaaaaaaaaaaaaaaaaaaaaaaaaaaugcaucccccccccccccccccccccccccccccccaaaggcucuuuucagagccaccagaauu

SEQ ID NO: 3137 - RNA, 1855 nt, Artificial Sequence
  mRNA product Design i-2 comprising derived and/or modified sequence from LASV(LASV237-NIG-2010;Clade II)__AIT17638__GPC (opt2)
ggggcgcugccuacggagguggcagccaucuccuucucggcaucaagcuuaccaugggccagaucaucaccuucuuccaggaggucccccacgucaucgaggaggucaugaacaucguccucaucgcccucucccuccucgccauccucaagggcaucuacaacgucgccaccugcggccucuucggccucgucuccuuccuccuccucugcggccgcuccugcuccaccaccuacaagggcgucuacgagcuccagacccucgagcucgacauggccucccucaacaugaccaugccccucuccugcaccaagaacaacucccaccacuacaucauggucggcaacgagaccggccucgagcucacccucaccaacaccuccaucaucaaccacaaguucugcaaccucuccgacgcccacaagaaggaccucuacgaccacgcccucauguccaucaucuccaccuuccaccucuccauccccaacuucaaccaguacgaggccauguccugcgacuucaacggcggcaagaucuccguccaguacaaccucucccacaccuacgccgucgacgccgccaaccacugcggcaccaucgccaacggcguccuccagaccuucaugcgcauggccuggggcggcuccuacaucgcccucgacuccggcaagggcuccugggacugcaucaugaccuccuaccaguaccucaucauccagaacaccaccugggaggaccacugccaguucucccgccccucccccaucggcuaccucggccuccucucccagcgcacccgcgacaucuacaucucccgccgccuccucggcaccuucaccuggacccucuccgacuccgagggcaacgagacccccggcggcuacugccucacccgcuggaugcucaucgaggccgagcucaagugcuucggcaacaccgccgucgccaagugcaacgagaagcacgacgaggaguucugcgacaugcuccgccucuucgacuucaacaagcaggccauccgccgccucaagaccgaggcccagauguccauccagcucaucaacaaggccgucaacgcccucaucaacgaccagcucaucaugaagaaccaccuccgcgacaucaugggcauccccuacugcaacuacuccaaguacugguaccucaaccacaccgucaccggcaagaccucccucccccgcugcuggcucgucuccaacggcuccuaccucaacgagacccacuucuccgacgacaucgagcagcaggccgacaacaugaucaccgagcuccuccagaaggaguacauggaccgccagggcaagaccccccucggccucgucgaccucuucgucuucuccaccuccuucuaccucaucuccaucuuccuccaccucaucaagauccccacccaccgccacaucaccggcaagcccugccccaagccccaccgccucaaccacaugggcaucugcuccugcggccucuacaagcaccccggcguccccgucaaguggaagcgcugaggacuagugcaucacauuuaaaagcaucucagccuaccaugagaauaagagaaagaaaaugaagaucaauagcuuauucaucucuuuuucuuuuucguugguguaaagccaacacccugucuaaaaaacauaaauuucuuuaaucauuuugccucuuuucucugugcuucaauuaauaaaaaauggaaagaaccuagaucuaaaaaaaaaaaaaaaaaaaaaaaaaaaaaaaaaaaaaaaaaaaaaaaaaaaaaaaaaaaaaaaaugcaucccccccccccccccccccccccccccccccaaaggcucuuuucagagccaccagaauu

SEQ ID NO: 3138 - RNA, 1855 nt, Artificial Sequence
  mRNA product Design i-2 comprising derived and/or modified sequence from LASV(LASV253-NIG-2011;Clade II)__AIT17670__GPC (opt2)
ggggcgcugccuacggagguggcagccaucuccuucucggcaucaagcuuaccaugggccagaucaucaccuucuuccaggaggucccccacgucaucgaggaggucaugaacaucguccucaucgcccucucccuccucgccauccucaagggcaucuacaacgucgccaccugcggccucuucggccucgucuccuuccuccuccucugcggccgcuccugcuccaccaccuacaagggcgucuacgagcuccagacccucgagcucgacauggccucccucaacaugaccaugccccucuccugcaccaagaacaacucccaccacuacaucauggucggcaacgagaccggccucgagcucacccucaccaacaccuccaucaucaaccacaaguucugcaaccucuccgacgcccacaagaagaaccucuacgaccacgcccucauguccaucaucuccaccuuccaccucuccauccccaacuucaaccaguacgaggccauguccugcgacuucaacggcggcaagaucuccguccaguacaaccucucccacaccuacgccgucgacgccgccaaccacugcggcaccaucgccaacggcguccuccagaccuucaugcgcauggccuggggcggcuccuacaucgcccucgacuccggcaagggcuccugggacugcaucaugaccuccuaccaguaccucaucauccagaacaccaccugggaggaccacugccaguucucccgccccucccccaucggcuaccucggccuccucucccagcgcacccgcgacaucuacaucucccgccgccuccucggcaccuucaccuggacccucuccgacuccgagggcaacgagacccccggcggcuacugccucacccgcuggaugcucaucgaggccgagcucaagugcuucggcaacaccgccgucgccaagugcaacgagaagcacgacgaggaguucugcgacaugcuccgccucuucgacuucaacaagcaggccauccgccgccucaaggccgaggcccagauguccauccagcucaucaacaaggccgucaacgcccucaucaacgaccagcucaucaugaagaaccaccuccgcgacaucaugggcauccccuacugcaacuacuccaaguacugguaccucaaccacaccgucaccggccgcaccucccucccccgcugcuggcucgucuccaacggcuccuaccucaacgagacccacuucuccgacgacaucgagcagcaggccgacaacaugaucaccgagcuccuccagaaggaguacaucgaccgccagggcaagaccccccucggccucgucgaccucuucgucuucuccaccuccuucuaccucaucuccaucuuccuccaccucgucaagauccccacccaccgccacaucaucggcaagcccugccccaagccccaccgccucaaccacaugggcaucugcuccugcggccucuacaagcaccccggcguccccgucaaguggaagcgcugaggacuagugcaucacauuuaaaagcaucucagccuaccaugagaauaagagaaagaaaaugaagaucaauagcuuauucaucucuuuuucuuuuucguugguguaaagccaacacccugucuaaaaaacauaaauuucuuuaaucauuuugccucuuuucucugugcuucaauuaauaaaaaauggaaagaaccuagaucuaaaaaaaaaaaaaaaaaaaaaaaaaaaaaaaaaaaaaaaaaaaaaaaaaaaaaaaaaaaaaaaaugcaucccccccccccccccccccccccccccccccaaaggcucuuuucagagccaccagaauu

SEQ ID NO: 3139 - RNA, 1855 nt, Artificial Sequence
  mRNA product Design i-2 comprising derived and/or modified sequence from LASV(LASV254-NIG-2011;Clade II)__AIT17674__GPC (opt2)
ggggcgcugccuacggagguggcagccaucuccuucucggcaucaagcuuaccaugggccagaucaucaccuucuuccaggaggucccccacgucaucgaggaggucaugaacaucguccucaucgcccucucccuccucgccauccucaagggcaucuacaacgucgccaccugcggccucuucggccucgucuccuuccuccuccucugcggccgcuccugcuccaccaccuacaagggcgucuacgagcuccagacccucgagcucgacaugaccaaccucaacaugaccaugccccucuccugcaccaagaacaacucccaccacuacaucauggucggcaacgagaccggccucgagcucacccucaccaacaccuccaucaucaaccacaaguucugcaaccucuccgacgcccacaagaagaaccucuacaaccacgcccucauguccaucaucuccaccuuccaccucuccauccccaacuucaaccaguacgaggccauguccugcgacuucaacggcggcaagaucuccguccaguacaaccucucccacuccuacgccgucgacgccgccaaccacugcggcaccaucgccaacggcguccuccagaccuucaugcgcauggccuggggcggcuccuacaucgcccucgacuccggcaagggcaacugggacugcaucaugaccuccuaccaguaccucaucauccagaacaccaccugggaggaccacugccaguucucccgccccucccccaucggcuaccucggccuccucucccagcgcacccgcgacaucuacaucucccgccgccuccucggcaccuucaccuggacccucuccgacuccgagggcaacgagacccccggcggcuacugccucacccgcuggaugcucaucgaggccgagcucaagugcuucggcaacaccgccgucgccaagugcaacgagaagcacgacgaggaguucugcgacaugcuccgccucuucgacuucaacaagcaggccauccgccgccucaagaccgaggcccaggccaacauccagcucaucaacaaggccgucaacgcccucaucaacgaccagcucaucaugaagaaccaccuccgcgacaucaugggcauccccuacugcaacuacuccaaguacugguaccucaaccacaccgucaccggcaagaccucccucccccgcugcuggcucgucuccaacggcuccuaccucaacgagacccacuucuccgacgacaucgagcagcaggccgacaacaugaucaccgagcuccuccagaaggaguacauggaccgccagggcaagaccccccucggccucgucgaccucuucgucuucuccaccuccuucuaccucaucuccaucuuccuccaccucgucaagauccccacccaccgccacgucaucggcaagcccugccccaagccccaccgccucaaccacaugggcaucugcuccugcggccucuacaagcaccccggcguccccgucaaguggaagcgcugaggacuagugcaucacauuuaaaagcaucucagccuaccaugagaauaagagaaagaaaaugaagaucaauagcuuauucaucucuuuuucuuuuucguugguguaaagccaacacccugucuaaaaaacauaaauuucuuuaaucauuuugccucuuuucucugugcuucaauuaauaaaaaauggaaagaaccuagaucuaaaaaaaaaaaaaaaaaaaaaaaaaaaaaaaaaaaaaaaaaaaaaaaaaaaaaaaaaaaaaaaaugcaucccccccccccccccccccccccccccccccaaaggcucuuuucagagccaccagaauu

SEQ ID NO: 3140 - RNA, 1855 nt, Artificial Sequence
  mRNA product Design i-2 comprising derived and/or modified sequence from LASV(Nig08-A19;Clade III)__ADU56618__GPC (opt2)
ggggcgcugccuacggagguggcagccaucuccuucucggcaucaagcuuaccaugggccagaucgucaccuucuuccaggaggucccccacgucaucgaggaggucaugaacaucguccucaucgcccucuccauccucgccauccucaagggccucuacaacaucgccaccugcggccucaucggccucgucaccuuccuccuccucuccggccgcuccugcuccaugaccuacaagggcgucuacgagcuccagacccucgagcucaacaugaacacccucaacaugaccaugccccucuccugcaccaagaacaacucccaccacuacaucauggucggcaacgagaccggccucgagcucacccucaccaacaccucccuccuccaccacaaguucugcaaccucuccgacgcccacaagaagaaccucuacgaccacacccucauguccaucaucuccaccuuccaccucuccauccccaacuucaaccaguacgaggccauguccugcgacuucaacggcggcaagaucaccguccaguacaaccucucccacuccuacgccaucgacgccgccaaccacugcggcaccgucgccaacggcguccuccagaccuucaugcgcauggccuggggcggcuccuacaucgcccucgacuccggccgcggcaagugggacugcaucaugaccuccuaccaguaccucaucauccagaacaccaccugggaggaccacugccaguucucccgccccucccccaucggcuaccucggccuccucucccagcgcacccgcgacaucuacaucucccgccgccuccucggcaccuucaccuggacccucuccgacuccgagggcaacgagacccccggcggcuacugccucacccgcuggaugcucaucgaggccgagcucaagugcuucggcaacaccgccgucgccaagugcaacgagaagcacgacgaggaguucugcgacaugcuccgccucuucgacuucaacaagcaggccauccgccgccucaaggccgaggcccagauguccauccagcucaucaacaaggccgucaacgcccucaucaacgaccagcucaucaugaagaaccaccuccgcgacaucaugggcauccccuacugcaacuacuccaaguacugguaccucaaccacaccuccaccggccgcaccucccucccccgcugcuggcucgucuccaacggcuccuaccucaacgagacccacuucuccgacgacaucgagcagcaggccgacaacaugaucaccgagaugcuccagaaggaguaccucgaccgccagggcaagaccccccucggccucgucgaccucuucgucuucuccaccuccuucuaccucaucuccaucuuccuccaccucgucaagauccccacccaccgccacaucgucggcaagcccugccccaagccccaccgccucaaccacaugggcaucugcuccugcggccucuacaagcagcccggcguccccguccgcuggaagcgcugaggacuagugcaucacauuuaaaagcaucucagccuaccaugagaauaagagaaagaaaaugaagaucaauagcuuauucaucucuuuuucuuuuucguugguguaaagccaacacccugucuaaaaaacauaaauuucuuuaaucauuuugccucuuuucucugugcuucaauuaauaaaaaauggaaagaaccuagaucuaaaaaaaaaaaaaaaaaaaaaaaaaaaaaaaaaaaaaaaaaaaaaaaaaaaaaaaaaaaaaaaaugcaucccccccccccccccccccccccccccccccaaaggcucuuuucagagccaccagaauu

SEQ ID NO: 3141 - RNA, 1858 nt, Artificial Sequence
  mRNA product Design i-2 comprising derived and/or modified sequence from LASV(G1180-SLE-2010;Clade IV)__AIT17168__GPC (opt2)
ggggcgcugccuacggagguggcagccaucuccuucucggcaucaagcuuaccaugggccagaucgucaccuucuuccaggaggucccccacgucaucgaggaggucaugaacaucguccucaucgcccucuccauccucgccguccucaagggccucuacaacuucgccaccugcggccucgucggccuccucaccuuccuccuccucugcggccgcuccugcaccgccucccgcuacaagggcgucuacgagcuccagacccucgagcucaacauggagacccucaacaugaccaugccccucuccugcaccaagaacaacucccaccacuacaucauggucggcaacgagaccggccucgagcucacccucaccaacaccuccaucaucaaccacaaguucugcaaccucuccgacgcccacaagaagaaccucuacgaccacgcccucauguccaucaucuccaccuuccaccucuccauccccaacuucaaccaguacgaggccauguccugcgacuucaacggcggcaagaucuccguccaguacaaccucucccacuccuacgccggcgacgccgccaaccacugcggcaccgucgccaacggcguccuccagaccuucaugcgcauggccuggggcggcuccuacaucgcccucgacuccggccacggcuccugggacugcaucaugaccuccuaccaguaccucaucauccagaacaccaccugggaggaccacugccaguucucccgccccucccccaucggcuaccucggccuccucucccagcgcacccgcgacaucuacaucucccgccgccuccucggcaccuucaccuggacccucuccgacuccgagggcaaggacacccccggcggcuacugccucacccgcuggaugcucaucgaggccgagcucaagugcuucggcaacaccgccgucgccaagugcaacgagaagcacgacgaggaguucugcgacaugcuccgccucuucgacuucaacaagcaggccauccagcgccucaaggccgaggcccagauguccauccagcucaucaacaaggccgucaacgcccucaucaacgaccagcucaucaugaagaaccaccuccgcgacaucaugggcauccccuacugcaacuacuccaaguacugguaccucaaccacaccaccaccggcaagaccucccuccccaagugcuggcucgucuccaacggcuccuaccucaacgagacccacuucuccgacgacaucgagcagcaggccgacaacaugaucaccgagaugcuccagaaggaguacauggagcgccagggcaagaccccccucggccucgucgaccucuucgucuucuccaccuccuucuaccucaucuccaucuuccuccaccucgucaagauccccacccaccgccacaucgucggcaaguccugccccaagccccaccgccucaaccacaugggcaucugcuccugcggccucuacaagcagcccggcguccccgucaaguggaagcgcugaggacuagugcaucacauuuaaaagcaucucagccuaccaugagaauaagagaaagaaaaugaagaucaauagcuuauucaucucuuuuucuuuuucguugguguaaagccaacacccugucuaaaaaacauaaauuucuuuaaucauuuugccucuuuucucugugcuucaauuaauaaaaaauggaaagaaccuagaucuaaaaaaaaaaaaaaaaaaaaaaaaaaaaaaaaaaaaaaaaaaaaaaaaaaaaaaaaaaaaaaaaugcaucccccccccccccccccccccccccccccccaaaggcucuuuucagagccaccagaauu

SEQ ID NO: 3142 - RNA, 1858 nt, Artificial Sequence
  mRNA product Design i-2 comprising derived and/or modified sequence from LASV(G1442-SLE-2011;Clade IV)__AIT17180__GPC (opt2)
ggggcgcugccuacggagguggcagccaucuccuucucggcaucaagcuuaccaugggccagaucgucaccuucuuccaggaggucccccacgucaucgaggaggucaugaacaucguccucaucgcccucuccauccucgccguccucaagggccucuacaacgucgccaccugcggccucaucggccucgucaccuuccuccuccucugcggccgcuccugcaccaccacccucuacaagggcgucuacgagcuccagacccucgagcucaacauggagacccucaacaugaccaugccccucuccugcaccaagaacaacucccaccacuacauccgcgucggcaacgagaccggccucgagcucacccucaccaacaccuccaucaucaaccacaaguucugcaaccucuccgacgcccacaagaagaaccucuacgaccacgcccucauguccaucaucuccaccuuccaccucuccauccccaacuucaaccaguacgaggccauguccugcgacuucaacggcggcaagaucuccguccaguacaaccucucccacuccuacgccggcgacgccgccaaccacugcggcaccgucgccaacggcguccuccagaccuucaugcgcauggccuggggcggcuccuacaucgcccucgacuccggccgcggcaacugggacugcaucaugaccuccuaccaguaccucaucauccagaacaccaccugggacgaccacugccaguucucccgccccucccccaucggcuaccucggccuccucucccagcgcacccgcgacgucuacaucucccgccgccuccucggcaccuucaccuggacccucuccgacuccgagggcaaggacacccccggcggcuacugccucacccgcuggaugcucaucgaggccgagcucaagugcuucggcaacaccgccgucgccaagugcaacgagaagcacgacgaggaguucugcgacaugcuccgccucuucgacuucaacaagcaggccauccagcgccucaaggccgaggcccagauguccauccagcucaucaacaaggccgucaacgcccucaucaacgaccagcucaucaugaagaaccaccuccgcgacaucaugggcauccccuacugcaacuacuccaaguacugguaccucaacaacaccgccaccggcaagaccucccuccccaagugcuggcucaucuccaacggcuccuaccucaacgagacccacuucuccgacgacaucgagcaggaggccgacaacaugaucaccgagaugcuccagaaggaguacauggagcgccagggcaagaccccccucggccucgucgaccucuucgucuucuccaccuccuucuaccucaucuccaucuuccuccaccucgucaagauccccacccaccgccacaucgucggcaaguccugccccaagccccaccgccucaaccacaugggcaucugcuccugcggccucuacaagcagcccggcguccccguccgcuggaagcgcugaggacuagugcaucacauuuaaaagcaucucagccuaccaugagaauaagagaaagaaaaugaagaucaauagcuuauucaucucuuuuucuuuuucguugguguaaagccaacacccugucuaaaaaacauaaauuucuuuaaucauuuugccucuuuucucugugcuucaauuaauaaaaaauggaaagaaccuagaucuaaaaaaaaaaaaaaaaaaaaaaaaaaaaaaaaaaaaaaaaaaaaaaaaaaaaaaaaaaaaaaaaugcaucccccccccccccccccccccccccccccccaaaggcucuuuucagagccaccagaauu

SEQ ID NO: 3143 - RNA, 1858 nt, Artificial Sequence
  mRNA product Design i-2 comprising derived and/or modified sequence from LASV(G3010-SLE-2013;Clade IV)__AIT17344__GPC (opt2)
ggggcgcugccuacggagguggcagccaucuccuucucggcaucaagcuuaccaugggccagaucgucaccuucuuccaggaggucccccacgucaucgaggaggucaugaacaucguccucaucgcccucuccauccucgccguccucaagggccucuacaacuucgccaccugcggccucgucggccucgucaccuuccuccuccucugcggccgcuccugcaccaccucccucuacaagggcgucuacgagcuccagacccucgagcucaacauggagacccucaacaugaccaugccccucuccugcaccaagaacaacucccaccacuacaucauggucggcaacgagaccggccucgagcucacccucaccaacaccuccaucaucaaccacaaguucugcaaccucuccgacgcccacaagaagaaccucuacaaccacgcccucauguccaucaucuccaccuuccaccucuccauccccaacuucaaccaguacgaggccauguccugcgacuucaacggcggcaagaucuccguccaguacaaccucucccacuccuacgccggcgacgccgccucccacugcggcaccgucgccaacggcguccuccagaccuucaugcgcauggccuggggcggcuccuacaucgcccucgacuccggcuacggcaagugggacugcaucaugaccuccuaccaguaccucaucauccagaacaccaccugggaggaccacugccaguucucccgccccucccccaucggcuaccucggccuccucucccagcgcacccgcgacaucuacaucucccgccgccuccucggcaccuucaccuggacccucuccgacuccgagggcaaggacacccccggcggcuacugccucacccgcuggaugcucaucgaggccgagcucaagugcuucggcaacaccgccgucgccaagugcaacgagaagcacgacgaggaguucugcgacaugcuccgccucuucgacuucaacaagcaggccauccagcgccucaagaccgaggcccagauguccauccagcucaucaacaaggccgucaacgcccucaucaacgaccagcucaucaugaagaaccaccuccgcgacaucaugggcauccccuacugcaacuacuccaaguacugguaccucaaccacaccaccaccggcaagaccucccuccccaagugcuggcucgucuccaacggcuccuaccucaacgagacccacuucuccgacgacaucgagcagcaggccgacaacaugaucaccgagaugcuccagaaggaguacauggagcgccagggcaagaccccccucggccucgucgaccucuucgucuucuccaccuccuucuaccucaucuccaucuuccuccaccucgucaagauccccacccaccgccacaucgucggcaaguccugccccaagccccaccgccucaaccacaugggcaucugcuccugcggccucuacaagcagcccggcguccccguccgcuggaagcgcugaggacuagugcaucacauuuaaaagcaucucagccuaccaugagaauaagagaaagaaaaugaagaucaauagcuuauucaucucuuuuucuuuuucguugguguaaagccaacacccugucuaaaaaacauaaauuucuuuaaucauuuugccucuuuucucugugcuucaauuaauaaaaaauggaaagaaccuagaucuaaaaaaaaaaaaaaaaaaaaaaaaaaaaaaaaaaaaaaaaaaaaaaaaaaaaaaaaaaaaaaaaugcaucccccccccccccccccccccccccccccccaaaggcucuuuucagagccaccagaauu

SEQ ID NO: 3144 - RNA, 1858 nt, Artificial Sequence
  mRNA product Design i-2 comprising derived and/or modified sequence from LASV(G502-SLE-2009;Clade IV)__AIT17126__GPC (opt2)
ggggcgcugccuacggagguggcagccaucuccuucucggcaucaagcuuaccaugggccagaucgucaccuucuuccaggaggucccccacgucaucgaggaggucaugaacaucguccucaucgcccucuccauccucgccguccucaagggccucuacaacuucgccaccugcggccucgucggccuccucaccuuccuccuccucugcggccgcuccugcaccaccggccucuacaagggcgucuacgagcuccagacccucgagcucaacauggagacccucaacaugaccaugccccucuccugcaccaagaacaacucccaccacuacaucauggucggcaacgagaccggccucgagcucacccucaccaacaccuccaucaucaaccacaaguucugcaaccucuccgacgcccacaagaagaaccucuacgaccacgcccucauguccaucaucuccaccuuccaccucuccauccccaacuucaaccaguacgaggccauguccugcgacuucaacggcggcaagaucuccguccaguacaaccucucccacuccuacgccggcgacgccgccgaccacugcggcaccgucgccaacggcguccuccagaccuucaugcgcauggccuggggcggcuccuacaucgcccucgacuccggccgcggccgcugggacugcaucaugaccuccuaccaguaccucaucauccagaacaccaccugggaggaccacugccaguucucccgccccucccccaucggcuaccucggccuccucucccagcgcacccgcgacaucuacaucucccgccgccuccucggcaccuucaccuggacccucuccgacuccgagggcaaggacacccccggcggcuacugccucacccgcuggaugcucaucgaggccgagcucaagugcuucggcaacaccgccgucgccaagugcaacgagaagcacgacgaggaguucugcgacaugcuccgccucuucgacuucaacaagcaggccauccagcgccucaaggccgaggcccagauguccauccagcucaucaacaaggccgucaacgcccucaucaacgaccagcucgucaugaagaaccaccuccgcgacaucaugggcauccccuacugcaacuacucccgcuacugguaccucaaccacaccaccaccggccgcaccucccuccccaagugcuggcucgucuccaacggcuccuaccucaacgagacccacuucuccgacgacaucgagcagcaggccgacaacaugaucaccgagaugcuccagaaggaguacauggagcgccagggcaagaccccccucggccucgucgaccucuucgucuucuccaccuccuucuaccucaucuccaucuuccuccaccucgucaagauccccacccaccgccacaucgucggcaaguccugccccaagccccaccgccucaaccacaugggcaucugcuccugcggccucuacaagcagcccggcguccccgucaaguggaagcgcugaggacuagugcaucacauuuaaaagcaucucagccuaccaugagaauaagagaaagaaaaugaagaucaauagcuuauucaucucuuuuucuuuuucguugguguaaagccaacacccugucuaaaaaacauaaauuucuuuaaucauuuugccucuuuucucugugcuucaauuaauaaaaaauggaaagaaccuagaucuaaaaaaaaaaaaaaaaaaaaaaaaaaaaaaaaaaaaaaaaaaaaaaaaaaaaaaaaaaaaaaaaugcaucccccccccccccccccccccccccccccccaaaggcucuuuucagagccaccagaauu

SEQ ID NO: 3145 - RNA, 1858 nt, Artificial Sequence
  mRNA product Design i-2 comprising derived and/or modified sequence from LASV(G733-SLE-2010;Clade IV)__AIT17154__GPC (opt2)
ggggcgcugccuacggagguggcagccaucuccuucucggcaucaagcuuaccaugggccagaucgucaccuucuuccaggaggucccccacgucaucgaggaggucaugaacaucguccucaucgcccucuccauccucgccguccucaagggccucuacaacuucgccaccugcggcaucgucggccucgucuccuuccuccuccucugcggccgcuccugcaccaccucccucuacaagggcgucuacgagcuccagacccucgagcucaacauggagacccucaacaugaccaugccccucuccugcaccaagaacaacucccaccacuacaucauggucggcaacgagaccggccucgagcucacccucaccaacaccuccaucaucaaccacaaguucugcaaccucuccgacgcccacaagaagaaccucuacgaccacgcccucauguccaucaucuccaccuuccaccucuccauccccaacuucaaccaguacgaggccauguccugcgacuucaacggcggcaagaucuccguccaguacaaccucucccacuccuacgccggcgacgccgccaaccacugcggcaccaucgccaacggcguccuccagaccuucaugcgcauggccuggggcggcuccuacaucgcccucgacuccggccgcgaccgcugggacugcaucaugaccuccuaccaguaccucaucauccagaacaccaccugggaggaccacugccaguucucccgccccucccccaucggcuaccucggccuccucucccagcgcacccgcgacaucuacaucucccgccgccuccucggcaccuucaccuggacccucuccgacuccgagggcaaggacacccccggcggcuacugccucacccgcuggaugcucaucgaggccgagcucaagugcuucggcaacaccgccgucgccaagugcaacgagaagcacgacgaggaguucugcgacaugcuccgccucuucgacuucaacaagcaggccauccagcgccucaaggccgaggcccagauguccauccagcucaucaacaaggccgucaacgcccucaucaacgaccagcucaucaugaagaaccaccuccgcgacaucaugggcauccccuacugcaacuacuccaaguacugguaccucaaccacaccaccaccggcaagaccucccuccccaagugcuggcucgucuccaacggcuccuaccucaacgagacccacuucuccgacgacaucgagcagcaggccgacaacaugaucaccgagaugcuccagaaggaguacauggagcgccagggcaagaccccccucggccucgucgaccucuucgucuucuccaccuccuucuaccucaucuccaucuuccuccaccucgucaagauccccacccaccgccacgucgucggcaaguccugccccaagccccaccgccucaaccacaugggcaucugcuccugcggccucuacggccagcccggcguccccgucaaguggaagcgcugaggacuagugcaucacauuuaaaagcaucucagccuaccaugagaauaagagaaagaaaaugaagaucaauagcuuauucaucucuuuuucuuuuucguugguguaaagccaacacccugucuaaaaaacauaaauuucuuuaaucauuuugccucuuuucucugugcuucaauuaauaaaaaauggaaagaaccuagaucuaaaaaaaaaaaaaaaaaaaaaaaaaaaaaaaaaaaaaaaaaaaaaaaaaaaaaaaaaaaaaaaaugcaucccccccccccccccccccccccccccccccaaaggcucuuuucagagccaccagaauu

SEQ ID NO: 3146 - RNA, 1858 nt, Artificial Sequence
  mRNA product Design i-2 comprising derived and/or modified sequence from MOPV/LASV reassortant(IGS-1;Clade IV)__AFY05576__GPC (opt2)
ggggcgcugccuacggagguggcagccaucuccuucucggcaucaagcuuaccaugggccagaucgucaccuucuuccaggaggucccccacgucaucgaggaggucaugaacaucguccucaucgcccucuccguccucgccguccucaagggccucuacaacuucgccaccugcggccucgucggccucgucaccuuccuccuccucugcggccgcuccugcaccaccucccucuacaagggcgucuacgagcuccagacccucgagcucaacauggagacccucaacaugaccaugccccucuccugcaccaagaacaacucccaccacuacaucauggucggcaacgagaccggccucgagcucacccucaccaacaccuccaucaucaaccacaaguucugcaaccucuccgacgcccacaagaagaaccucuacgaccacgcccucauguccaucaucuccaccuuccaccucuccauccccaacuucaaccaguacgaggccauguccugcgacuucaacggcggcaagaucuccguccaguacaaccucucccacuccuacgccggcgacgccgccaaccacugcggcaccgucgccaacggcguccuccagaccuucaugcgcauggccuggggcggcuccuacaucgcccucgacuccggccgcggcaacugggacugcaucaugaccuccuaccaguaccucaucauccagaacaccaccugggaggaccacugccaguucucccgccccucccccaucggcuaccucggccuccucucccagcgcacccgcgacaucuacaucucccgccgccuccucggcaccuucaccuggacccucuccgacuccgagggcgaggacacccccggcggcuacugccucacccgcuggaugcucaucgaggccgagcucaagugcuucggcaacaccgccgucgccaagugcaacgagaagcacgacgaggaguucugcgacaugcuccgccucuucgacuucaacaagcaggccauccagcgccucaaggccgaggcccagauguccauccagcucaucaacaaggccgucaacgcccucaucaacgaccagcucaucaugaagaaccaccuccgcgacaucaugggcauccccuacugcaacuacuccaaguacugguaccucaaccacaccaccaccggccgcaccucccuccccaagugcuggcucgucuccaacggcuccuaccucaacgagacccacuucuccgacgacaucgagcagcaggccgacaacaugaucaccgagaugcuccagaaggaguacauggagcgccagggcaagaccccccucggccucgucgaccucuucgucuucuccaccuccuucuaccucaucuccaucuuccuccaccucgucaagauccccacccaccgccacaucgucggcaaguccugccccaagccccaccgccucaaccacaugggcaucugcuccugcggccucuacaagcagcccggcguccccgucaaguggaagcgcugaggacuagugcaucacauuuaaaagcaucucagccuaccaugagaauaagagaaagaaaaugaagaucaauagcuuauucaucucuuuuucuuuuucguugguguaaagccaacacccugucuaaaaaacauaaauuucuuuaaucauuuugccucuuuucucugugcuucaauuaauaaaaaauggaaagaaccuagaucuaaaaaaaaaaaaaaaaaaaaaaaaaaaaaaaaaaaaaaaaaaaaaaaaaaaaaaaaaaaaaaaaugcaucccccccccccccccccccccccccccccccaaaggcucuuuucagagccaccagaauu

SEQ ID NO: 3147 - RNA, 1858 nt, Artificial Sequence
  mRNA product Design i-2 comprising derived and/or modified sequence from LASV(LM765-SLE-2012;Clade IV)__AIT17814__GPC (opt2)
ggggcgcugccuacggagguggcagccaucuccuucucggcaucaagcuuaccaugggccagaucgucaccuucuuccaggaggucccccacgucaucgaggaggucaugaacaucguccucaucgcccucuccauccucgccguccucaagggccucuacaacuucgccaccugcggccucgucggccucgucaccuuccuccuccucugcggccgcuccugcaccaccucccucuacaagggcgucuacgagcuccagacccucgagcucaacauggagacccucaacaugaccaugccccucuccugcaccaagaacaacucccaccacuacaucauggucggcaacgagaccggccucgagcucacccucaccaacaccuccaucaucgaccacaaguucugcaaccucuccgacgcccaccgcaagaaccucuacgaccacgcccucauguccaucaucuccaccuuccaccucuccauccccaacuucaaccaguacgaggccauguccugcgacuucaacggcggcaagaucuccguccaguacaaccucucccacuccuacgccaaggacgccgccgaccacugcggcaccgucgccaacggcguccuccagaccuucaugcgcauggccuggggcggcuccuacaucgcccucgacuccggccgcggccgcugggacugcaucaugaccuccuaccaguaccucaucauccagaacaccaccugggaggaccacugccaguucucccgccccucccccaucggcuaccucggccuccucucccagcgcacccgcgacaucuacaucucccgccgccuccucggcaccuucaccuggacccucuccgacuccgagggcaaggacacccccggcggcuacugccucacccgcuggaugcucaucgaggccgagcucaagugcuucggcaacaccgccgucgccaagugcaacgagaagcacgacgaggaguucugcgacaugcuccgccucuucgacuucaacaagcaggccauccagcgccucaaggccgaggcccagauguccauccagcucaucaacaaggccgucaacgcccucaucaacgaccagcucaucaugaagaaccaccuccgcgacaucaugggcauccccuacugcaacuacuccaaguacugguaccucaaccacaccaccaccggcaagaccucccuccccaagugcuggcucgucuccaacggcuccuaccucaacgagacccacuucuccgacgacaucgagcagcaggccgacaacaugaucaccgagaugcuccagaaggaguacauggagcgccagggcaagaccccccucggccucgucgaccucuucgucuucuccaccuccuucuaccucaucuccaucuuccuccaccucgucaagauccccacccaccgccacaucgucggcaagcccugccccaagccccaccgccucaaccacaugggcaucugcuccugcggccucuacaagcagcccggcguccccgucaaguggaagcgcugaggacuagugcaucacauuuaaaagcaucucagccuaccaugagaauaagagaaagaaaaugaagaucaauagcuuauucaucucuuuuucuuuuucguugguguaaagccaacacccugucuaaaaaacauaaauuucuuuaaucauuuugccucuuuucucugugcuucaauuaauaaaaaauggaaagaaccuagaucuaaaaaaaaaaaaaaaaaaaaaaaaaaaaaaaaaaaaaaaaaaaaaaaaaaaaaaaaaaaaaaaaugcaucccccccccccccccccccccccccccccccaaaggcucuuuucagagccaccagaauu

SEQ ID NO: 3148 - RNA, 1858 nt, Artificial Sequence
  mRNA product Design i-2 comprising derived and/or modified sequence from LASV(LM776-SLE-2012;Clade IV)__AIT17824__GPC (opt2)
ggggcgcugccuacggagguggcagccaucuccuucucggcaucaagcuuaccaugggccagaucgucaccuucuuccaggaggucccccacgucaucgaggaggucaugaacaucguccucaucgcccucuccauccucgccguccucaagggccucuacaacuucgccaccugcggccucgucggccucgucaccuuccuccuccucugcggccgcuccugcaccaccuccgucuacaagggcgucuacgagcuccagacccucgagcucaacauggagacccucaacaugaccaugccccucuccugcaccaagaacaacucccaccacuacaucauggucggcaacgagaccggccucgagcucacccucaccaacaccuccaucaucaaccacaaguucugcaaccucuccgacgcccacaagaagaaccucuacgaccacgcccucauguccaucaucuccaccuuccaccucuccauccccaacuucaaccaguacgaggccauguccugcgacuucaacggcggcaagaucuccguccaguacaaccucucccacuccuacgccggcgacgccgccaaccacugcggcaccgucgccaacggcguccuccagaccuucaugcgcauggccuggggcggcuccuacaucgcccucgacuccggccacggcaagugggacugcaucaugaccuccuaccaguaccucaucauccagaacaccaccugggaggaccacugccaguucucccgccccucccccaucggcuaccucggccuccucucccagcgcacccgcgacaucuacaucucccgccgccuccucggcaccuucaccuggacccucuccgacuccgagggcaaggacacccccggcggcuacugccucacccgcuggaugcucaucgaggccgagcucaagugcuucggcaacaccgccgucgccaagugcaacgagaagcacgacgaggaguucugcgacaugcuccgccucuucgacuucaacaagcaggccauccagcgccucaaggccgaggcccagauguccauccagcucaucaacaaggccgucaacgcccucaucaacgaccagcucaucaugaagaaccaccuccgcgacaucaugggcauccccuacugcaacuacuccaaguacugguaccucaaccacaccaccaccggcaagaccucccuccccaagugcuggcucgucuccaacggcuccuaccucaacgagacccacuucuccgacgacaucgagcagcaggccgacaacaugaucaccgagaugcuccagaaggaguacauggagcgccagggcaagaccccccucggccucgucgaccucuucgucuucuccaccuccuucuaccucaucuccaucuuccuccaccucgucaagauccccacccaccgccacaucgucggcaaguccugccccaagccccaccgccucaaccacaugggcaucugcuccugcggccucuacaagcagcccggcguccccguccgcuggaagcgcugaggacuagugcaucacauuuaaaagcaucucagccuaccaugagaauaagagaaagaaaaugaagaucaauagcuuauucaucucuuuuucuuuuucguugguguaaagccaacacccugucuaaaaaacauaaauuucuuuaaucauuuugccucuuuucucugugcuucaauuaauaaaaaauggaaagaaccuagaucuaaaaaaaaaaaaaaaaaaaaaaaaaaaaaaaaaaaaaaaaaaaaaaaaaaaaaaaaaaaaaaaaugcaucccccccccccccccccccccccccccccccaaaggcucuuuucagagccaccagaauu

SEQ ID NO: 3149 - RNA, 1858 nt, Artificial Sequence
  mRNA product Design i-2 comprising derived and/or modified sequence from LASV(Mad39;Clade IV)__ANH09722__GPC (opt2)
ggggcgcugccuacggagguggcagccaucuccuucucggcaucaagcuuaccaugggccagaucgucaccuucuuccaggaggucccccacgucaucgaggaggucaugaacaucguccucaucgcccucuccauccucgccguccucaagggccucuacaacgucgccaccugcggccucaucggccucgucaccuuccuccuccucugcggccgcuccugcaccaccacccucuacaagggcgucuacgagcuccaggcccucgagcucaacauggagacccucaacaugaccaugccccucuccugcaccaagaacaacucccaccacuacauccgcgucggcaacgagaccggccucgagcucacccucaccaacaccucccucaucaaccacaaguucugcaaccucuccgacgcccacaagaagaaccucuacgaccacgcccucauguccaucaucuccaccuuccaccucuccauccccaacuucaaccaguacgaggccauguccugcgacuucaacgacggcaagaucuccguccaguacaaccucucccacaccuacgccggcgacaccgccaaccacugcggcaccgucgccaacggcguccuccagaccuucaugcgcauggccuggggcggcuccuacaucgcccucgacuccggccgcggcggcugggacugcaucaugaccuccuaccaguaccucaucauccagaacaccaccugggaggaccacugccaguucucccgccccucccccaucggcuaccucggccuccucucccagcgcacccgcgacaucuacaucucccgccgccuccucggcaccuucaccuggacccucuccgacuccgagggcaaggacacccccggcggcuacugccucacccgcuggaugcucaucgaggccgagcucaagugcuucggcaacaccgccgucgccaagugcaacgagaagcacgacgaggaguucugcgacaugcuccgccucuucgacuucaacaagcaggccauccagcgccucaaggccgaggcccagauguccauccagcucaucaacaaggccgucaacgcccucaucaacgaccagcucaucaugaagaaccaccuccgcgacaucaugggcauccccuacugcaacuacuccaaguacugguaccucaaccacaccgucaccggcaagaccucccuccccaagugcuggcucgucuccaacggcuccuaccucaacgagacccacuucuccgacgacaucgagcagcaggccgacaacaugaucaccgagaugcuccagaaggaguacauggagcgccagggcaagaccccccucggccucgucgaccucuucgucuucuccaccuccuucuaccucaucuccaucuuccuccaccucgucaagauccccacccaccgccacgucgucggcaagcccugccccaagccccaccgccucaaccacaugggcaucugcuccugcggcuucuacaagcagcccggcguccccguccgcuggaagcgcugaggacuagugcaucacauuuaaaagcaucucagccuaccaugagaauaagagaaagaaaaugaagaucaauagcuuauucaucucuuuuucuuuuucguugguguaaagccaacacccugucuaaaaaacauaaauuucuuuaaucauuuugccucuuuucucugugcuucaauuaauaaaaaauggaaagaaccuagaucuaaaaaaaaaaaaaaaaaaaaaaaaaaaaaaaaaaaaaaaaaaaaaaaaaaaaaaaaaaaaaaaaugcaucccccccccccccccccccccccccccccccaaaggcucuuuucagagccaccagaauu

SEQ ID NO: 3150 - RNA, 1858 nt, Artificial Sequence
  mRNA product Design i-2 comprising derived and/or modified sequence from LASV(Z0947-SLE-2011;Clade IV)__AIT17840__GPC (opt2)
ggggcgcugccuacggagguggcagccaucuccuucucggcaucaagcuuaccaugggccagaucgucaccuucuuccaggaggucccccacgucaucgaggaggucaugaacaucguccucaucgcccucuccauccucgccguccucaagggccucuacaacuucgccaccugcggccucgucggccucgucaccuuccuccuccucugcggccgcuccugcaccaucucccucuacaagggcgucuacgagcuccagacccucgagcucaacauggagacccucaacaugaccaugccccucuccugcaccaagaacaacucccaccacuacaucauggucggcaacgagaccggccucgagcucacccucaccaacaccuccaucaucaaccacaaguucugcaaccucuccgacgcccacaagaagaaccucuacgaccacgcccucauguccaucaucuccaccuuccaccucuccauccccaacuucaaccaguacgaggccauguccugcgacuucaacggcggcaagaucuccguccaguacaaccucucccacuccuacgccggcgacgccgccaaccacugcggcaccgucgccaacggcguccuccagaccuucaugcgcauggccuggggcggcuccuacaucgcccucgacuccggccgcgaccgcugggacugcaucaugaccuccuaccaguaccucaucauccagaacaccaccugggaggaccacugccaguucucccgccccucccccaucggcuaccucggccuccucucccagcgcacccgcgacaucuacaucucccgccgccuccucggcaccuucaccuggacccucuccgacuccgagggcaaggacacccccggcggcuacugccucacccgcuggaugcucaucgaggccgagcucaagugcuucggcaacaccgccgucgccaagugcaacgagaagcacgacgaggaguucugcgacaugcuccgccucuucgacuucaacaagcaggccauccagcgccucaaggccgaggcccagauguccauccagcucaucaacaaggccgucaacgcccucaucaacgaccagcucaucaugaagaaccaccuccgcgacaucaugggcauccccuacugcaacuacuccaaguacugguaccucaaccacaccaccaccggcaagaccucccuccccaagugcuggcucgucuccaacggcuccuaccucaacgagacccacuucuccgacgacaucgagcagcaggccgacaacaugaucaccgagaugcuccagaaggaguacauggagcgccagggcaagaccccccucggccucgucgaccucuucgucuucuccaccuccuucuaccucaucuccaucuuccuccaccucgucaagauccccacccaccgccacaucgucggcaagcccugccccaagccccaccgccucaaccacaugggcaucugcuccugcggccucuacaagcagcccggcguccccgucaaguggaagcgcugaggacuagugcaucacauuuaaaagcaucucagccuaccaugagaauaagagaaagaaaaugaagaucaauagcuuauucaucucuuuuucuuuuucguugguguaaagccaacacccugucuaaaaaacauaaauuucuuuaaucauuuugccucuuuucucugugcuucaauuaauaaaaaauggaaagaaccuagaucuaaaaaaaaaaaaaaaaaaaaaaaaaaaaaaaaaaaaaaaaaaaaaaaaaaaaaaaaaaaaaaaaugcaucccccccccccccccccccccccccccccccaaaggcucuuuucagagccaccagaauu

SEQ ID NO: 3151 - RNA, 1858 nt, Artificial Sequence
  mRNA product Design i-2 comprising derived and/or modified sequence from LASV(Josiah;Clade IV)__NP_694870__GPC (opt3)
ggggcgcugccuacggagguggcagccaucuccuucucggcaucaagcuuaccaugggccagaucgugaccuucuuucaagaggucccccacguuauugaagaggugaugaacauaguacugaucgcccucagcgugcuugcuguccugaagggguuguacaauuucgcaacaugcggauuagugggucugguuacuuuucuacuccuguguggcagauccugcacgaccucucuuuauaaagggguguacgaacugcagacauuggagcucaacauggaaacucugaauaugaccaugccucugucauguacaaagaacaauagucaucacuauauuauggucggaaacgagaccggccucgaguuaacucugacaaauaccagcaucauuaaccauaaauucugcaaucuuuccgacgcccacaagaaaaacuuguacgaucaugcgcugaugucuaucauaucgacguuucaccuaucaaucccaaauuucaaccaguaugaagcuaugagcugugacuuuaauggugggaagauuagugugcaguacaaccucucccacucuuaugccggagaugcagccaaucauugcggcacuguagcuaacggcguucugcaaaccuucaugaggauggcauggggagggagcuacaucgcccuugacuccggucggggcaacugggauuguauuaugacaucauaccaguaucugaucauacagaauacuaccugggaggaccacugccaguuuagucgcccgagccccauuggguacuugggacuccugucucaacgaacacgugauaucuauauuuccagaagguuacugggcaccuucacguggacucucucagacagcgaagguaaggauacaccugggggauacugucuuacccgguggaugcugaucgaggcugaguugaaaugcuuuggcaacacugccguggcgaaguguaaugaaaaacaugacgaggaguucugcgauaugcuacgccuguuugacuucaacaagcaggcaauccagagacucaaagccgaagcucagaugaguauucaacugauaaauaaggccgucaacgcacuuaucaaugaucagcugauuaugaagaaccacuugagggacaucaugggcauaccauauugcaauuacucuaaauauugguaccucaaccacacaaccacggggcggaccucccugcccaaguguugguuagugagcaauggaucguaccugaacgaaacacauuucucugacgauauugagcagcaagcugacaauaugaucacugagaugcuacagaaagaauauauggagcgccaggguaagaccccucucggccugguggaucuuuuugucuucuccacaucauuuuacuugaucaguauuuuccugcaccucguuaaaaucccaacucaucgacacauugugggaaagagcugccccaaaccucauagacugaaccacauggggauauguuccugcggccuuuauaagcagccagguguaccggugaaguggaaaaggugaggacuagugcaucacauuuaaaagcaucucagccuaccaugagaauaagagaaagaaaaugaagaucaauagcuuauucaucucuuuuucuuuuucguugguguaaagccaacacccugucuaaaaaacauaaauuucuuuaaucauuuugccucuuuucucugugcuucaauuaauaaaaaauggaaagaaccuagaucuaaaaaaaaaaaaaaaaaaaaaaaaaaaaaaaaaaaaaaaaaaaaaaaaaaaaaaaaaaaaaaaaugcaucccccccccccccccccccccccccccccccaaaggcucuuuucagagccaccagaauu

SEQ ID NO: 3152 - RNA, 1855 nt, Artificial Sequence
  mRNA product Design i-2 comprising derived and/or modified sequence from LASV(LP;Clade I)__AAF86701__GPC (opt3)
ggggcgcugccuacggagguggcagccaucuccuucucggcaucaagcuuaccaugggccagaucauuaccuucuuucaagaggugccccacgucauagaagagguuaugaacaucgugcugauugcccucagccuucuggcuaucuugaagggguuauacaauauugcaacaugcggaaucauaggucugguagccuuccuauuucucuguggcaaauccugcucucugacucuuaaagggggauaugaacugcagacguuggagcucaacauggaaacccugaauaugacaaugccucugucauguacuaagaacaguagccaucacuacaucagagugggcaaugagaccggucucgaguuaacacugaccaacacuuccauuaucaaucauaaguucugcaaccuuucugacgcgcacaaaaagaauuuguaugaucaugcucugaugucgauuaucucaacauuucaccuaagcauaccaaacuucaaucaguacgaagccaugaguugugacuuuaacgggggaaagauuuccguccaguauaaucucucucacagcuacgcaggcgaugccgcugagcauugcggcaccguggcaaacgggguucugcaaacguucaugaggauggccuggggaggucgguauaucgcucuugacuccggcaaagggaauugggauuguauuaugacuucauaccaguaccugaucauccagaacaccacaugggaagaccacugccaguuuagucgcccgagccccauuggauauuugggccuccugucucaacgaacucgugauauauacaucuccagaagguuacuggguaccuucacauggacccucucagacagcgaggggaacgagacgccuggaggcuauugucuuacucgguggaugcugauugaagccgaguugaagugcuuuggcaauacagcgguggcaaaauguaacgaaaagcaugaugaggaguucugcgacaugcuacgccuguuugauuucaauaaacaggccaucagaaggcucaaggcugaagcccagaugaguauacagcugauuaacaaggcagucaaugcucuuaucaacgaccaacugaucaugaaaaaucacuugcgggauauuauggggaucccauacugcaacuauucuaaguacugguaucucaaucacaccuccagcggacgcacuucgcugcccaaauguugguuaauuucuaacgguuccuaccugaaugagacacaguucucagacgacauagaacagcaagccgauaacaugaucaccgagaugcuacagaaggaauacauugagcgacagggcaaaacgccucucgggcugguggacaucuuuaucuucaguaccagcuuuuaucuuauuuccauauucuugcaucugaucaagauuccaacacacagacauaucguaggaaaacccugcccuaagccacacaggcucaaucauaugggcguuuguucuugcggucuguacaagcacccgggggugcccacuaaauggaagcggugaggacuagugcaucacauuuaaaagcaucucagccuaccaugagaauaagagaaagaaaaugaagaucaauagcuuauucaucucuuuuucuuuuucguugguguaaagccaacacccugucuaaaaaacauaaauuucuuuaaucauuuugccucuuuucucugugcuucaauuaauaaaaaauggaaagaaccuagaucuaaaaaaaaaaaaaaaaaaaaaaaaaaaaaaaaaaaaaaaaaaaaaaaaaaaaaaaaaaaaaaaaugcaucccccccccccccccccccccccccccccccaaaggcucuuuucagagccaccagaauu

SEQ ID NO: 3153 - RNA, 1855 nt, Artificial Sequence
  mRNA product Design i-2 comprising derived and/or modified sequence from LASV(803213;Clade II)__AAF86703__GPC (opt3)
ggggcgcugccuacggagguggcagccaucuccuucucggcaucaagcuuaccaugggccagaucauuaccuucuuucaagaggugccccacgucauagaagagguuaugaacaucgugcugauugcccucagccuucuggcuaucuugaaggggauuuacaauguagcaacaugcggauuauucggucugaucuccuuucuacuccuguguggcagaucuugcucagugacuuauaaaggggucuacgaacuucagacgcuggaguugaacauggccaaucucaacaugaccaugccucugaguuguacaaagaauaacagccaucacuauauaauggugggaaaugaaacuggccuggagcucaccuuaacaaacaccuccaucauuaaucauaaauucugcaaccugucugacgcgcacaagaaaaaucuuuacgaucaugcuuugaugucgaucauuucaacuuuucaccugagcaucccaaacuucaaucaguaugaggccaugaguugugacuuuaacggugggaagauauccguucaguacaaucuaucucacagcuucgcaguggaugccgcuaaccauugcggaacaauugcaaacggcguccuccaaaccuuuaugaggauggccuggggcggguccuauaucgcucuggacucaggaaaggguaauugggauuguauuaugacgaguuaccaguaccuuaucauccagaacacuaccugggaagaccacugccaguucagccggccgucucccauuggcuaucugggguugcucucccaacgcacacgagauauauacaucucacguagacuguuaggaacuuuuaccuggacacugagcgacagugagggcaaugaagccccugguggguauugucucaccagguggaugcuuauugaggcggagcugaaaugcuucggaaacacggcaguggccaaguguaaugaaaaacaugaugaggaauuuugcgacauguugcggcuauucgauuucaacaagcaggcuaucaaacgccugaagacugaggcccagaugucuauacagcucauuaauaaggcaguaaacgcucugaucaaugaccaacuuaucaugaaaaaccaccugagagauauuaugggcaucccauacugcaauuauuccagguacugguauuugaaccacacaguuaccggcaagacuagccucccccgguguuggcuggugucgaaugggucuuacuuaaacgaaacacauuuuuccgacgacauugagcagcaggccgauaauaugauaaccgagaugcugcaaaaagaauacauggaccgccagggaaagacgccucuaggucucgucgaucuguucguguuuucaaccaguuucuaucuuaucagcaucuuuuugcaccuggugaaaauuccaacacaucgacacaucgucggcaagcccugcccuaaaccacauagacucaaccacauggggauuuguuccugcggacuguacaagcacccgggcguucccgugaaguggaaaaggugaggacuagugcaucacauuuaaaagcaucucagccuaccaugagaauaagagaaagaaaaugaagaucaauagcuuauucaucucuuuuucuuuuucguugguguaaagccaacacccugucuaaaaaacauaaauuucuuuaaucauuuugccucuuuucucugugcuucaauuaauaaaaaauggaaagaaccuagaucuaaaaaaaaaaaaaaaaaaaaaaaaaaaaaaaaaaaaaaaaaaaaaaaaaaaaaaaaaaaaaaaaugcaucccccccccccccccccccccccccccccccaaaggcucuuuucagagccaccagaauu

SEQ ID NO: 3154 - RNA, 1855 nt, Artificial Sequence
  mRNA product Design i-2 comprising derived and/or modified sequence from LASV(GA391;Clade III)__CAA36645__GPC (opt3)
ggggcgcugccuacggagguggcagccaucuccuucucggcaucaagcuuaccaugggccagaucgugaccuucuuucaagaggucccccacguuauugaagaggugaugaacauaguacugaucgcccucagcauucuugcuauccugaagggguuguacaauguggcaacaugcggauuaauuggucuggucacuuuccuacuccuguccggcagaucuuguucacuuaucuauaaagggacguacgaacugcagaccuuggagcucaacauggaaacacugaauaugacuaugccucugaguugcaccaagaacaauagccaucacuauauaagggugggaaacgagacaggccucgaguuaacccugacuaauacauccauccuuaaccauaaauuuuguaauuugucugacgcccacaagcggaaccuguacgaucauucgcuaaugucaauuaucagcaccuuccaccucaguauuccaaauuuuaaccaguaugaagcgauguccugcgacuucaauggugggaaaaucacgguucaguacaaccugucucacagcuuugcuguggaugccgcaggacauuguggcacucuugccaauggcguccugcaaaccuucaugcgcauggcuuggggaggguccuauauagcauuggacucaggucgaggcaacugggauugcauuaugacaaguuaccaguaccucaucauucagaacacuaccugggacgaucacugucaguuuagccguccgucucccaucggguaucugggauuacugucccaaagaacaagggacaucuacauuucacggcgccuccuuggcaccuucacguggacucugagcgauagugaggguaaugaaacaccugggggauauugcuugaccagauggaugcuaauagaggccgagcugaaguguuuuggcaacacugcuguggccaagugcaaugaaaaacaugacgaggaguucugugauaugcucaggcuguuugacuucaacaagcaggcgauccggcgccuuaaaacagaagcacagaugucuauucagcugaucaauaaggccguaaacgcuuugauaaaugaucaacucauuaugaaaaaccaucugcgagacaucaugggcaucccauacugcaauuauuccagauacugguauuuaaaccacaccagcacggggaagaccucgcugcccaggugcuggcuaauuucuaauggauccuaccucaacgaaacaaaguucucagacgauaucgagcagcaggccgacaauaugauuacugagaugcugcaaaaagaauacauagaucggcaggguaagaccccucuuggcuugguugaccuguuuguguucaguacuagcuuuuaucucaucuccauuuuccugcaccuugucaaaaucccaacacaccgucauaucguggggaagcccuguccuaaaccacaccgccugaaccauaugggaauuugcucuuguggcuuguacaagcagccgggugugcccgucagauggaaaaggugaggacuagugcaucacauuuaaaagcaucucagccuaccaugagaauaagagaaagaaaaugaagaucaauagcuuauucaucucuuuuucuuuuucguugguguaaagccaacacccugucuaaaaaacauaaauuucuuuaaucauuuugccucuuuucucugugcuucaauuaauaaaaaauggaaagaaccuagaucuaaaaaaaaaaaaaaaaaaaaaaaaaaaaaaaaaaaaaaaaaaaaaaaaaaaaaaaaaaaaaaaaugcaucccccccccccccccccccccccccccccccaaaggcucuuuucagagccaccagaauu

SEQ ID NO: 3155 - RNA, 1858 nt, Artificial Sequence
  mRNA product Design i-2 comprising derived and/or modified sequence from LASV(AV;Clade V)__CCA30314__GPC (opt3)
ggggcgcugccuacggagguggcagccaucuccuucucggcaucaagcuuaccaugggccagaucgugaccuucuuucaagaggucccccacguuauugaagaggugaugaacauaguacugaucgcccucagcauucuugcugugcugaagggguuguacaauaucgcaacaugcggauuaauuggucugaucacuuuccuacuccuguguggcagauccugcagcucaaaccuuuauaaaggggucuacgaacugcagaguuuggaccucaauauggagacgcugaacaugaccaugccucugagcuguacaaagaauaacucccaucacuauauaagggugggaaaugauacuggccucgaauuaacccugacaaacaccucuauccuuaaucauaaauuuugcaacuugucggacgcccacaagaaagaucuguacgaccaugcgcuaaugucaauuaucagcacuuuccaccucaguauuccaaauuuuaaccaguaugaggcuauguccugugauuucaauggugggaagaucucuguucaguacaaccugagccacuccuaugccauagacgcagccaaucauugcggaacaguggcuaacggcauucuucaaaccuuuaugcggauggcauggggcgggucauacaucgcccuggauaguggacgcgguaacugggacuguauuaugacgagcuaccaguauuugaucauccagaauacuaccugggagaaccacugccaguucucucgaccgucccccauuggcuaccucgggcuguuaucacaacguacaagagauauauauaucagcaggcggcugcucggaacuuuuaccuggacacuuagugacucugaaggcaaugcuaccccugguggguacugucugacgcgcuggauguugauugaggccgaacuaaagugcuucggaaacacugcggucgcaaaauguaaugagaagcaugaugaggaauuuugcgacaugcugagacucuucgauuuuaacaaacaggccaucuccaggcugaagucugaggcucagaugucgauacagcuuauuaauaaagccgugaacgcacugaucaaugaccaauugaucaugaagaaccaccuccgggacauuaugggcaucccauauugcaauuacucuaaguauugguaccugaaccacacaauuaccggcaaaacuuccuuacccaaguguuggcugguaucaaaugggaguuaccuaaacgaaacacauuucagcgaugacauagagcagcaggcugauaauaugaucaccgaaaugcuccaaaaagaguauauggagcgccagggaaagacgccucugggucuuguugacuuguucguguuuuccaccucuuucuaccugauuagcaucuuucuccgacuggucaaaaucccaacacacagacauauugugggcaagcccugcccuaaaccacacaggcuuaaccauauggggauauguucaugcggacuguauaagcagccgggcgugcccguccgguggaagcguugaggacuagugcaucacauuuaaaagcaucucagccuaccaugagaauaagagaaagaaaaugaagaucaauagcuuauucaucucuuuuucuuuuucguugguguaaagccaacacccugucuaaaaaacauaaauuucuuuaaucauuuugccucuuuucucugugcuucaauuaauaaaaaauggaaagaaccuagaucuaaaaaaaaaaaaaaaaaaaaaaaaaaaaaaaaaaaaaaaaaaaaaaaaaaaaaaaaaaaaaaaaugcaucccccccccccccccccccccccccccccccaaaggcucuuuucagagccaccagaauu

SEQ ID NO: 3156 - RNA, 1855 nt, Artificial Sequence
  mRNA product Design i-2 comprising derived and/or modified sequence from LASV(Togo/2016/7082;Clade VI)__AMR44577__GPC (opt3)
ggggcgcugccuacggagguggcagccaucuccuucucggcaucaagcuuaccaugggccagaucauuaccuucuuucaagaggugccccacgucauagaagagguuaugaacaucgugcugauugcccucagccuucuggcuaucuugaaggggguauacaauguggcaacaugcggaauuaucgguuuagucacuuuccuguuucuauguggcagauccugcucucucauauauaaagggucauacgaacugcagacgcuugagcugaacauggaaaccuugaauaugacaaugccucucaguuguacuaagaacagcucccaucacuauaucagggugggaaaugagaccggccuggagcugacacucaccaacacuucuauuaucaaucauaaauucugcaacuuaucggacgcccacaagcggaaucuguacgaucaugcgcuuaugucaauuuugagcacauuucaccugaguaucccaaacuucaaucaguaugaagcuauguccugugacuuuaacggugggaaaauaucuguucaguacaaucuaagccacgccuaugcaguggaugccgcugagcauugcggaaccgucgcaaacggcgugcuccaaacguucaugcgcauggccuggggcggguccuacauugcucuggacucaggacgagguaauugggauuguaucaugaccaguuaccaguaucuuauuauccagaacacuacaugggaagaccacugccaguuuagccguccgucucccaucggcuaccugggguugcucucccaaagaacuagggauauuuauauaucacggcgccuguuaggaaccuucacauggacccugagcgacagugagggcaacgagacgccugguggguacugucucacuagauggaugcuuaucgaagccgagcugaagugcuuuggaaauacagcgguagcaaaguguaacgaaaaacaugaugaggaguucugcgacauguugaggcuauuugauuucaauaagcaggccauucagcggcugaaaucugaagcucagauguccauccaacucauaaacaaggccguuaaugcacugauuaacgaccagcuuaucaugaaaaaucaucugcgcgauaugaugggcaucccauauugcaacuacagcaaguauugguacuugaaucacaccucgucuggccgaacuucccuccccaaguguuggcuggugucaaacgggaguuacuuaaaugagacacacuucagcgacgacauugaacagcaagcugauaacaugaucaccgagaugcugcagaaagaauauauugacagacagggaaagacgccucuaggucucgucgaucuguuuguguucuccaccucuuuuuaccuuauaagcaucuucuugcaccugauuaaaaucccaacacauaggcacaucgugggcaagcccugcccuaaaccacaucggcucaaucacauggggauuuguucaugcggacuguauaagcagccgggcguccccacucguuggaaacgcugaggacuagugcaucacauuuaaaagcaucucagccuaccaugagaauaagagaaagaaaaugaagaucaauagcuuauucaucucuuuuucuuuuucguugguguaaagccaacacccugucuaaaaaacauaaauuucuuuaaucauuuugccucuuuucucugugcuucaauuaauaaaaaauggaaagaaccuagaucuaaaaaaaaaaaaaaaaaaaaaaaaaaaaaaaaaaaaaaaaaaaaaaaaaaaaaaaaaaaaaaaaugcaucccccccccccccccccccccccccccccccaaaggcucuuuucagagccaccagaauu

SEQ ID NO: 3157 - RNA, 1855 nt, Artificial Sequence
  mRNA product Design i-2 comprising derived and/or modified sequence from LASV(KAK-428;Clade n.d. (VII))__ANH09740__GPC (opt3)
ggggcgcugccuacggagguggcagccaucuccuucucggcaucaagcuuaccaugggccagaucgugaccuucuuucaagaggucccccacguuauugaagaggugaugaacauaguacugaucgcccucagccuucuggcuauuuugaagggguuauacaauuucgcaacaugcggagugaucggucugauuacuuuucuacuccuguguggcagauccugcucugccacguauaaagggcaguacgaacuucagacccuggaguugaacauggaaucacucaauaugacaaugccucugaguuguacuaagaacaauagccaucacuauaucagggcgggaaacaauaccggccuggagcucacauuaaccaacacuuccauaaucucucauaaauucugcaaucugucggacgcucacaagaaaaaccuuuacgaucauacauugaugucaauuaucaccacguuucaccugagcauuccaaauuucaaccaguaugaggccaugaguugugacuuuaauggugggaagaucuccauacaauacaaccuaucucacagcuaugcaggagaugccgcucagcauugcggcacugucgcaaauggcgugcuccagaccuucaugcggauggccuggggaggguccuaccuggcucuugacucaggucgccgaggcugggauuguauuaucaguagcuaccaguaucugauuauccaaaacacaacuugggacgaucacugccaguuuucucguccgucccccaucggguacuugggauucguuucacagaagaccagagacauuuauauaagcaggcggcuccugggcacauuuaccuggacguuaagugauucugaaggucaugacaugccugggggauacugucugacucgcuggaugcucaucgaggccgaucuuaaaugcuucggcaacacagcgguggcaaaguguaaugaaaaacacgacgaggaguuuugcgauauguggagacuguucgacuucaacaagcaggccauucaaagguugaaagcugaagcccagaugaauauccagcuaauaaacaaggcagucaaugcucugauuaacgaccaacucaugaugaagaaucaucugcgggauaucaugggcaucccauauugcaacuacuccaaauuuugguaucuuaauaacaccacuacagggcgcaccagccugccccgauguugguugauuucgaauggaucuuaccucaacgagacgcacuucuccgacgauaucgaacagcaggccgacaauaugauuaccgagaugcugcagaaggaauacauggauagacaagguaaaacaccuuuaggccugguggaccuauuuguauucucaaccaguuuuuaucucauaacuaucuuccugcaccuuguuaagauuccaacacauaggcacaucguggggaaacccugcccuaagccacaucgguugaaccacaugggaaucuguagcugcggccuguacaaacagccggguguccccgugcguuggaagcgcugaggacuagugcaucacauuuaaaagcaucucagccuaccaugagaauaagagaaagaaaaugaagaucaauagcuuauucaucucuuuuucuuuuucguugguguaaagccaacacccugucuaaaaaacauaaauuucuuuaaucauuuugccucuuuucucugugcuucaauuaauaaaaaauggaaagaaccuagaucuaaaaaaaaaaaaaaaaaaaaaaaaaaaaaaaaaaaaaaaaaaaaaaaaaaaaaaaaaaaaaaaaugcaucccccccccccccccccccccccccccccccaaaggcucuuuucagagccaccagaauu

SEQ ID NO: 3158 - RNA, 1855 nt, Artificial Sequence; identical to SEQ ID NO: 3152
  mRNA product Design i-2 comprising derived and/or modified sequence from LASV(Pinneo-NIG-1969;Clade I)__AIT17836__GPC (opt3)

SEQ ID NO: 3159 - RNA, 1855 nt, Artificial Sequence
  mRNA product Design i-2 comprising derived and/or modified sequence from LASV(ISTH0009-NIG-2011;Clade II)__AIT17404__GPC (opt3)
ggggcgcugccuacggagguggcagccaucuccuucucggcaucaagcuuaccaugggccagaucauuaccuucuuucaagaggugccccacgucauagaagagguuaugaacaucgugcugauugcccucagccuucuggcuaucuugaaggggauuuacaauguagcaacaugcggauuauucggucugguguccuuucuacuccuguguggcagaucuugcucaacuacguauaaaggggucuacgaacuucagacccuggaguuggacauggccagucucaacaugacaaugccucugagcuguacuaagaauaacucccaucacuauaucauggugggaaaugaaaccggccuggagcucacauuaaccaacacuucuauaaucaaucauaaauucugcaaccugucggaugcgcacaagaaaaaucuuuacgaccaugcuuugaugucaauuaucagcacauuucaccugaguauuccaaacuucaaucaguaugaggccauguccugugauuuuaacggugggaagaucucuguucaguacaaucuaagccacgcauaugccguggacgcugcaaaccauugcggaaccauagccaauggcguccuccaaacguucaugaggauggcuuggggcggguccuacauugcccuggauucaggaaaggguaguugggacuguaucaugacuagcuaccaguaucuuauuauccagaacaccacaugggaagaucacugccaguuuucucggccgucccccaucggcuaccugggguugcucucacaacgcacucgagacauuuauauaagccguagacuguuaggaaccuucacauggacccugagugauucugagggcaacgaaacgccugguggguacugucucacuagguggaugcuuaucgaggcggagcugaaaugcuuuggaaauacagcaguggccaaguguaacgaaaaacaugacgaggaguucugcgauauguugcggcuauuugacuucaauaagcaggcuauucgcagacugaaaaccgaagcccagauguccauccagcucauaaacaaggcaguaaaugcucugauuaacgaucaacuuaucaugaagaaucaccugagggacaucaugggcauuccauauugcaacuacagcaaauauugguacuugaaucacacuguuacaggcaagaccucgcucccccgguguuggcuggugucuaacggguccuacuuaaaugaaacgcauuucucagacgauaucgagcagcaggccgacaacaugauuaccgagcugcuacaaaaagaauauauggaucgccagggaaagacaccucucggucuggucgaccuuuuuguguucaguacuagcuuuuacuugauauccaucuuccugcaccucauuaaaaucccaacccaucgacacaucacaggcaagcccugcccuaaaccacauagacugaaucacauggggauuuguucuugcggacuuuauaagcacccgggcgugcccgucaaguggaaaaggugaggacuagugcaucacauuuaaaagcaucucagccuaccaugagaauaagagaaagaaaaugaagaucaauagcuuauucaucucuuuuucuuuuucguugguguaaagccaacacccugucuaaaaaacauaaauuucuuuaaucauuuugccucuuuucucugugcuucaauuaauaaaaaauggaaagaaccuagaucuaaaaaaaaaaaaaaaaaaaaaaaaaaaaaaaaaaaaaaaaaaaaaaaaaaaaaaaaaaaaaaaaugcaucccccccccccccccccccccccccccccccaaaggcucuuuucagagccaccagaauu

SEQ ID NO: 3160 - RNA, 1855 nt, Artificial Sequence
  mRNA product Design i-2 comprising derived and/or modified sequence from LASV(ISTH2010-NIG-2012;Clade II)__AIT17482__GPC (opt3)
ggggcgcugccuacggagguggcagccaucuccuucucggcaucaagcuuaccaugggccagaucauuaccuucuuucaagaggugccccacgucauagaagagguuaugaacaucgugcugauugcccucagccuucuggcuaucuugaaggggauuuacaauguagcaacaugcggauuauucggucugguguccuuucuacuccuguguggcagaucuugcucaacuacguauaaaggggucuacgaacuucagacccuggaguuggacauggccagucucaacaugacaaugccucugagcuguacuaagaauaacucccaucacuauaucauggugggaaaugaaaccggccuggagcucacauuaaccaacacuucuauaaucaaucauaaauucugcaaccugucggaugcgcacaagaaaaaucuuuacgaccaugcuuugaugucaauuaucagcacauuucaccugaguauuccaaacuucaaucaguaugaggccauguccugugauuuuaacggugggaagaucucuguucaguacaaucuaagccacgcauaugccguggacgcugcaaaccauugcggaaccauagccaauggcguccuccaaacguucaugaggauggcuuggggcggguccuacauugcccuggauucaggaaaggguaguugggacuguaucaugacuagcuaccaguaucuuauuauccagaacaucaccugggaagaucacugccaguuuucucggccgucccccauuggcuaccugggguugcucucacaacgcacacgagacauauauaucagccguagacuguuaggaacuuucaccuggacacugagugauucugagggcaacgaaaccccugguggguacugucucacgagguggaugcuuauugaggcggagcugaaaugcuuuggaaauacugcaguggccaaguguaacgaaaaacaugacgaggaguucugcgauauguugcggcuauuugacuucaauaagcaggcuauccgcagacugaaaacagaagcccagauguccauacagcucauuaacaaggcaguaaaugcucugaucaacgaucaacuuaucaugaagaaucaccugagggacauuaugggcaucccauauugcaacuacagcaaauauugguacuugaaucacaccguuacuggcaagacaucgcucccccgguguuggcuggugucuaacggguccuacuuaaaugaaacccauuucucagacgauauugagcagcaggccgacaacaugauaacggagcugcuacaaaaagaauauaucgaucgccagggaaagaccccucucggucuggucgaccuuuuuguguucaguacuagcuuuuacuugauuuccaucuuccugcaccucgugaaaaucccaacacaucgacacgucguuggcaagcccugcccuaaaccacauagacugaaucacauggggauuuguucuugcggacuuuauaagcacccgggcgugcccguaaaguggaaaaggugaggacuagugcaucacauuuaaaagcaucucagccuaccaugagaauaagagaaagaaaaugaagaucaauagcuuauucaucucuuuuucuuuuucguugguguaaagccaacacccugucuaaaaaacauaaauuucuuuaaucauuuugccucuuuucucugugcuucaauuaauaaaaaauggaaagaaccuagaucuaaaaaaaaaaaaaaaaaaaaaaaaaaaaaaaaaaaaaaaaaaaaaaaaaaaaaaaaaaaaaaaaugcaucccccccccccccccccccccccccccccccaaaggcucuuuucagagccaccagaauu

SEQ ID NO: 3161 - RNA, 1855 nt, Artificial Sequence
  mRNA product Design i-2 comprising derived and/or modified sequence from LASV(Lassa virus/H.sapiens-wt/NGA/2015/ISTH_0543;Clade II)__AVO03639__GPC (opt3)
ggggcgcugccuacggagguggcagccaucuccuucucggcaucaagcuuaccaugggccagaucauuaccuucuuucaagaggugccccacgucauagaagagguuaugaacaucgugcugauugcccucagccuucuggcuaucuugaaggggauuuacaauguagcaacaugcggauuauucggucugguguccuuucuacuccuguguggcagaucuugcucaacuacguauaaaggggucuacgaacuucagacccuggaguuggacauggccaaccucaauaugacaaugccucugaguuguacuaagaacaauagccaucacuauaucauggugggaaacgaaaccggccuggagcucacauuaaccaauacuuccauaaucaaccauaaauucugcaaucugucugaugcgcacaagaaaaaccuuuacgaccaugcuuugaugucgauuaucucaacauuucaccugagcauuccaaauuucaaccaguaugaggccaugaguugugauuuuaauggugggaagaucuccguucaguacaaccuaucucacaccuaugcaguggacgccgcuaaucauugcggaacgauagcaaacggcguccuccaaacuuucaugaggauggccuggggcgggagcuacauugcucuggauuccggaaaggguucaugggacuguaucaugaccaguuaccaguaucuugugauucagaacacaacuugggaagaucacugccaguuuagccggccgucucccaucggcuaccugggguugcucucccaacgcacccgagacaucuauauuucacguagacuguuaggaacauucaccuggacgcugagcgauagugagggcaaugaaacuccugguggguacugucucacaagguggaugcuuauagaggccgagcugaaaugcuuuggaaacaccgcgguagcaaaguguaaugaaaaacaugacgaggaguucugcgauauguugcggcuauuugacuucaacaagcaggccauccgcagacugaaaacugaagcucagaugucuauucagcucaucaauaaggccguuaacgcacugauaaaugaucaacuuauuaugaagaaccaccugagggacaucaugggcaucccauauugcaauuacuccaaauauugguacuugaaccacacagugaccggcaagacgagccucccccgguguuggcuggucucgaaugggucuuacuuaaacgaaacccauuucuccgacgauauugagcagcaggcugacaauaugaucacagagcugcuacaaaaagaauauauugaucgccagggaaagacuccucucggucugguggaccuuuuuguguucucaaccaguuuuuacuugauaagcaucuuccugcaccucgucaaaauuccaacacaucgacacaucacuggcaagcccugcccuaaaccacauagacugaaccacauggggaucuguuccugcggacuuuauaagcacccgggcguucccgugaaguggaaaaggugaggacuagugcaucacauuuaaaagcaucucagccuaccaugagaauaagagaaagaaaaugaagaucaauagcuuauucaucucuuuuucuuuuucguugguguaaagccaacacccugucuaaaaaacauaaauuucuuuaaucauuuugccucuuuucucugugcuucaauuaauaaaaaauggaaagaaccuagaucuaaaaaaaaaaaaaaaaaaaaaaaaaaaaaaaaaaaaaaaaaaaaaaaaaaaaaaaaaaaaaaaaugcaucccccccccccccccccccccccccccccccaaaggcucuuuucagagccaccagaauu

SEQ ID NO: 3162 - RNA, 1855 nt, Artificial Sequence
  mRNA product Design i-2 comprising derived and/or modified sequence from LASV(Lassa virus/H.sapiens-wt/NGA/2016/ISTH_0009;Clade II)__AVO03571__GPC (opt3)
ggggcgcugccuacggagguggcagccaucuccuucucggcaucaagcuuaccaugggccagaucauuaccuucuuucaagaggugccccacgucauagaagagguuaugaacaucgugcugauugcccucagccuucuggcuaucuugaaggggauuuacaauguagcaacaugcggauuacugggucuaguguccuuccuccugcuuuguggcagaucuugcucaacuacguauaaaggggucuacgaacugcagaccuuggagcucgacauggccagucugaacaugacaaugccucugagcuguacuaagaauaacucccaucacuauaucauggugggaaaugaaaccggccucgaguuaacacugaccaacacuucuauaaucaaucauaaauuuugcaaccuuucggaugcgcacaagaaaaauuuguacgaccaugcucugaugucaauuaucagcacauuccaccuaaguauuccaaacuuuaaucaguaugaggccauguccugugauuucaacggugggaggaucucuguucaguacaaucucagccacuccuaugcaguggacgccgcuaaccauugcggaaccauagcaaauggcguccugcaaacguuuaugcggauggccuggggcgggucauacauugcucuugauaguggaaaggguagcugggacuguaucaugacuucuuaccaguaucugauuauccagaacaccacaugggaagaucacugccaguucucccgcccgucacccaucggcuacuuggggcuccugagccaacgaacucgugacauuuauauaaguagaagguuacugggaaccuuuacauggacccucucugauuccgagggcaacgaaacgccugguggguacugucuuacucgguggaugcugaucgaggccgaguugaagugcuucggaaauacagcgguggcaaaauguaacgaaaagcaugacgaggaauuuugcgauaugcuacgccuguucgacuuuaauaaacaggccauuagaaggcucaagaccgaggcucagaugagcauccagcugauaaacaaagccguaaaugcacuuauuaacgaucaacugaucaugaagaaucacuugcgggacaucaugggcauuccauauugcaacuacucgaaguauugguaccucaaucacacuguuacaggcaaaaccucucugccccgcuguugguuaguguccaacgggucauaccugaaugaaacgcauuucagugacgauaucgagcagcaggcugacaacaugauuaccgagcuacuccaaaaggaauauauagaucgacagggaaaaacaccucugggucuugucgacuuguucguguuuagcacuuccuucuaccugaucucuauuuuucuccaccuggugaagaucccaacccauagacacaucacaggcaaacccugcccuaagccacauaggcuuaaucacauggggauuuguagcugcggacuguauaaccacccgggcguccccguuaaauggaagcggugaggacuagugcaucacauuuaaaagcaucucagccuaccaugagaauaagagaaagaaaaugaagaucaauagcuuauucaucucuuuuucuuuuucguugguguaaagccaacacccugucuaaaaaacauaaauuucuuuaaucauuuugccucuuuucucugugcuucaauuaauaaaaaauggaaagaaccuagaucuaaaaaaaaaaaaaaaaaaaaaaaaaaaaaaaaaaaaaaaaaaaaaaaaaaaaaaaaaaaaaaaaugcaucccccccccccccccccccccccccccccccaaaggcucuuuucagagccaccagaauu

SEQ ID NO: 3163 - RNA, 1855 nt, Artificial Sequence
  mRNA product Design i-2 comprising derived and/or modified sequence from LASV(Lassa virus/H.sapiens-wt/NGA/2016/ISTH_0017;Clade II)__AVO03567__GPC (opt3)
ggggcgcugccuacggagguggcagccaucuccuucucggcaucaagcuuaccaugggccagaucauuaccuucuuucaagaggugccccacgucauagaagagguuaugaacaucgugcugauugcccucagccuucuggcuaucuugaaggggauuuacaauguagcaacaugcggauuauucggucugguguccuuucuacuccuguguggcagaucuugcucaacuacguauaaaggggucuacgaacuucagacccuggaguuggacauggccagucucaacaugacaaugccucugagcuguacuaagaauaacucccaucacuauaucauggugggaaaugaaaccggccuggagcucacauuaaccaacacuucuauaaucaaucauaaauucugcaaccugucggaugcgcacaagaaaaaucuuuacgaccaugcuuugaugucaauuaucagcacauuucaccugaguauuccaaacuucaaucaguaugaggccauguccugugauuuuaacggugggaagaucucuguucaguacaaucuaagccacaccuaugcaauagacgccgcuaaccauugcggaacgauugcaaauggcgugcuccaaacuuucaugaggauggccuggggcggguccuacaucgcucuggauucaggaaaggguaguugggacuguauuaugaccagcuaccaguaucuuaucauccagaacacaacuugggaagaucacugccaguuuucucggccgucccccauuggcuaccugggguugcucucacaacgcacccgagacauauauaucagccguagacuguuaggaacauucaccuggacgcugagugauucugagggcaacgaaacuccugguggguacugucucacaagguggaugcuuauugaggccgagcugaaaugcuuuggaaauaccgcggucgcaaaguguaacgaaaaacaugacgaggaguucugcgauauguugcggcuauuugacuucaauaagcaggccauccgcagacugaaaacugaagcucagauguccauacagcucauuaacaaggccgugaaugcacugaucaacgaucaacuuaucaugaagaaucaccugagggacauuaugggcaucccauauugcaacuacagcaaauauugguacuugaaucacacaguaaccggcaagacgucgcucccccgguguuggcugguuucuaacggguccuacuuaaaugaaacccauuucucagacgauauugagcagcaggcugacaacaugauaacagagcugcuacaaaaagaauauauggaucgccagggaaagacuccucucggucugguggaccuuuuugucuucaguaccagcuuuuacuugaucuccauuuuccugcaccucgugcgaaucccaacacauagacacgugaucggcaaacccugcccuaagccacauaggcugaaucacauggggauuuguucuugcggacuuuauaaacacccgggcguccccguuaaguggaagcggugaggacuagugcaucacauuuaaaagcaucucagccuaccaugagaauaagagaaagaaaaugaagaucaauagcuuauucaucucuuuuucuuuuucguugguguaaagccaacacccugucuaaaaaacauaaauuucuuuaaucauuuugccucuuuucucugugcuucaauuaauaaaaaauggaaagaaccuagaucuaaaaaaaaaaaaaaaaaaaaaaaaaaaaaaaaaaaaaaaaaaaaaaaaaaaaaaaaaaaaaaaaugcaucccccccccccccccccccccccccccccccaaaggcucuuuucagagccaccagaauu

SEQ ID NO: 3164 - RNA, 1855 nt, Artificial Sequence
  mRNA product Design i-2 comprising derived and/or modified sequence from LASV(Lassa virus/H.sapiens-wt/NGA/2018/ISTH_0959;Clade II)__AVV65099__GPC (opt3)
ggggcgcugccuacggagguggcagccaucuccuucucggcaucaagcuuaccaugggccagaucauuaccuucuuucaagaggugccccacgucauagaagagguuaugaacaucgugcugauugcccucagccuucuggcuaucuugaaggggauuuacaauguagugacaugcggauuauucggucuggucuccuuucuacuccuguguggcagaucuugcucaacuacguauaaagggguguacgaacuucagacccuggaguuggacauggcaagucucaacaugacaaugccucugagcuguacuaagaauaacucccaucacuauaucaugguuggaaaugaaaccggccuggagcucacauuaaccaacacuucuauaaucaaucauaaauucugcaaccugucggaugcccacaagaaaaaucuuuacgaccaugcguugaugucaauuaucagcacauuucaccugaguauuccaaacuucaaucaguaugaggcuauguccugugauuuuaacggugggaagaucucugugcaguacaaucuaagccacgccuaugcaauagacgccgcuaaccauugcggaaccauugcaaauggcguccuccaaacguucaugaggauggccuggggcggguccuacaucgcucuggauucaggaaaggguaguugggacuguauuaugacuagcuaccaguaucuuaucauccagaacaccacaugggaagaucacugccaguuuucucggccgucccccauuggcuaccugggguugcucucacaacgcacucgagacauauauaucagccguagacuguuaggaaccuucacauggacccugagugauucugagggcaacgaaacgccugguggguacugucucacuagguggaugcuuauugaggccgagcugaaaugcuuuggaaauacagcgguggcaaaguguaacgaaaaacaugacgaggaguucugcgauauguugcggcuauuugacuucaauaagcaggccauccgcagacugaaaaccgaagcucagauguccauacagcucauuaacaaggccguaaaugcacugaucaacgaucaacuuaucaugaagaaucaccugagggacauuaugggcaucccauauugcaacuacagcaaauauugguacuugaaucacacuguuacaggcaagaccucgcucccccgguguuggcuggugucuaacggguccuacuuaaaugaaacgcauuucucagacgauauugagcagcaggcugacaacaugauaaccgagcugcuacaaaaagaauauaucgaucgccagggaaagacaccucucggucuggucgaccuuuuuguguucaguacuagcuuuuacuugauuuccaucuuccugcaccucgugaaaaucccaacccaucgacacgucauuggcaagcccugcccuaaaccacauagacugaaucacauggggauauguucuugcggacuuuauaagcacccgggcguucccgugaaguggaaaaggugaggacuagugcaucacauuuaaaagcaucucagccuaccaugagaauaagagaaagaaaaugaagaucaauagcuuauucaucucuuuuucuuuuucguugguguaaagccaacacccugucuaaaaaacauaaauuucuuuaaucauuuugccucuuuucucugugcuucaauuaauaaaaaauggaaagaaccuagaucuaaaaaaaaaaaaaaaaaaaaaaaaaaaaaaaaaaaaaaaaaaaaaaaaaaaaaaaaaaaaaaaaugcaucccccccccccccccccccccccccccccccaaaggcucuuuucagagccaccagaauu

SEQ ID NO: 3165 - RNA, 1855 nt, Artificial Sequence
  mRNA product Design i-2 comprising derived and/or modified sequence from LASV(LASV003-NIG-2008;Clade II)__AIT17580__GPC (opt3)
ggggcgcugccuacggagguggcagccaucuccuucucggcaucaagcuuaccaugggccagaucauuaccuucuuucaagaggugccccacgucauagaagagguuaugaacaucgugcugauugcccucagccuucuggcuaucuugaaggggauuuacaauguagcaacaugcggauuauucggucugguguccuuucuacuccuguguggcagaucuugcucaacuacguauaaaggggucuacgaacuucagacccuggaguuggacauggccagucucaacaugacaaugccucugagcuguacuaagaauaacucccaucacuauaucauggugggaaaugaaaccggccuggagcucacauuaaccaacacuucuauaaucaaucauaaauucugcaaccugucggaugcgcacaagaaaaaucuuuacgaccaugcuuugaugucaauuaucagcacauuucaccugaguauuccaaacuucaaucaguaugaggccauguccugugauuuuaacggugggaagaucucuguucaguacaaucuaagccacaccuaugcaguggacgccgcuaaccauugcggaacgauagcaaauggcguccuccaaacuuucaugaggauggccuggggcggguccuacauugcucuggauucaggaaaggguaguugggacuguaucaugaccagcuaccaguaucuuauuauccagaacacaacuugggaagaucacugccaguuuucucggccgucccccaucggcuaccugggguugcucucacaacgcacccgagacauuuauauaagccguagacuguuaggaacauucaccuggacgcugagugauucugaguccaacgaaacuccuggcgguuacugucucacaagguggaugcuuaucgaggccgagcugaaaugcuuugggaauaccgcgguggcaaaguguaacgaaaaacaugacgaggaguucugcgauauguugcggcuauuugacuucaauaagcaggccauucgcagacugaaagcugaagcccagaugagcauccagcucauaaacaaggcaguaaaugcucugauuaacgaucaacuuaucaugaagaaucaccugagggacaucaugggcauuccauauugcaacuacucgaaauauugguacuugaaucacacuguuacaggacggaccucucucccccgcuguuggcugguguccaacggcucauacuuaaaugaaacgcauuucagugacgauaucgagcagcaggccgacaacaugauuaccgagcugcuacaaaaggaauauauggaucgacaggggaaaacaccucucggacuggucgaccuuuuuguguucagcacuuccuuuuacuugauaucuaucuuccugcaccucgugaagauuccaacccauagacacgucaucgguaaacccugcccuaagccacauaggcugaaucacaugggcaucuguagcugcgggcuuuauaaacacccgggaguucccgugaaguggaagcggugaggacuagugcaucacauuuaaaagcaucucagccuaccaugagaauaagagaaagaaaaugaagaucaauagcuuauucaucucuuuuucuuuuucguugguguaaagccaacacccugucuaaaaaacauaaauuucuuuaaucauuuugccucuuuucucugugcuucaauuaauaaaaaauggaaagaaccuagaucuaaaaaaaaaaaaaaaaaaaaaaaaaaaaaaaaaaaaaaaaaaaaaaaaaaaaaaaaaaaaaaaaugcaucccccccccccccccccccccccccccccccaaaggcucuuuucagagccaccagaauu

SEQ ID NO: 3166 - RNA, 1855 nt, Artificial Sequence
  mRNA product Design i-2 comprising derived and/or modified sequence from LASV(LASV035-NIG-2009;Clade II)__AIT17588__GPC (opt3)
ggggcgcugccuacggagguggcagccaucuccuucucggcaucaagcuuaccaugggccagaucauuaccuucuuucaagaggugccccacgucauagaagagguuaugaacaucgugcugauugcccucagccuucuggcuaucuugaaggggauuuacaauguagcaacaugcggauuauucggucugguguccuuucuacuccuguguggcagaucuugcucaacuacguauaaaggggucuacgaacuucagacccuggaguuggacauggccagucucaacaugacaaugccucugagcuguacuaagaauaacucccaucacuauaucauggugggaaaugaaaccggccuggagcucacauuaaccaacacuucuauaaucaaucauaaauucugcaaccugucggaugcgcacaagaaaaaucuuuacgaccaugcuuugaugucaauuaucagcacauuucaccugaguauuccaaacuucaaucaguaugaggccauguccugugauuuuaacggugggaagaucucuguucaguacaaucuaagccacgcauaugccguggacgcugcaaaccauugcggaaccauagccaauggcguccuccaaacguucaugaggauggcuuggggcggguccuacauugcccuggauucaggaaaggguaguugggacuguaucaugacuagcuaccaguaucuuauuauccagaacaccacaugggaagaucacugccaguuuucucggccgucccccaucggcuaccugggguugcucucacaacgcacucgagacauuuauauaagccguagacuguuaggaaccuucacauggacccugagugauucugagggcaacgaaacgccugguggguacugucucacuagguggaugcuuaucgaggcggagcugaaaugcuuuggaaauacagcaguggccaaguguaacgaaaaacaugacgaggaguucugcgauauguugcggcuauuugacuucaauaagcaggcuauucgcagacugaaagccgaagcacagauguccauccagcucauaaacaaggcuguaaaugcccugauuaacgaucaacuuaucaugaagaaucaccugagggacaucaugggcauuccauauugcaacuacagcaaauauugguacuugaaucacaccguuacuggcaagacaucgcucccccgguguuggcuggugucuaacggguccuacuuaaaugaaacccauuucucagacgauaucgagcagcaggcggacaacaugauuacggagcugcuacaaaaagaauauauagaucgccagggaaagaccccucucggucuggucgaccuuuuuguguucaguacuagcuuuuacuugaucuccauuuuccugcaccucgugaaaaucccaacacaucgacacgucaucggcaagcccugcccuaaaccacauagacugaaucacauggggauuuguucuugcggacuuuauaagcacccgggcguucccgugaaguggaaaaggugaggacuagugcaucacauuuaaaagcaucucagccuaccaugagaauaagagaaagaaaaugaagaucaauagcuuauucaucucuuuuucuuuuucguugguguaaagccaacacccugucuaaaaaacauaaauuucuuuaaucauuuugccucuuuucucugugcuucaauuaauaaaaaauggaaagaaccuagaucuaaaaaaaaaaaaaaaaaaaaaaaaaaaaaaaaaaaaaaaaaaaaaaaaaaaaaaaaaaaaaaaaugcaucccccccccccccccccccccccccccccccaaaggcucuuuucagagccaccagaauu

SEQ ID NO: 3167 - RNA, 1855 nt, Artificial Sequence
  mRNA product Design i-2 comprising derived and/or modified sequence from LASV(LASV1000-NIG-2009;Clade II)__AIT17782__GPC (opt3)
ggggcgcugccuacggagguggcagccaucuccuucucggcaucaagcuuaccaugggccagaucauuaccuucuuucaagaggugccccacgucauagaagagguuaugaacaucgugcugauugcccucagccuucuggcuaucuugaaggggauuuacaauguagcaacaugcggauuauucggucugguguccuuucuacuccuguguggcagaucuugcucaacuacguauaaaggggucuacgaacuucagacccuggaguuggacauggccagucucaacaugacaaugccucugagcuguacuaagaauaacucccaucacuauaucauggugggaaaugaaaccggccuggagcucacauuaaccaacacuucuauaaucaaucauaaauucugcaaccugucggaugcgcacaagaaaaaucuuuacgaccaugcuuugaugucaauuaucagcacauuucaccugaguauuccaaacuucaaucaguaugaggccauguccugugauuuuaacggugggaagaucucuguucaguacaaucuaagccacaccuaugcaguggacgccgcuaaccauugcggaacgauagcaaauggcguccuccaaacuuucaugaggauggccuggggcggguccuacauugcucuggauucaggaaaggguaguugggacuguaucaugaccagcuaccaguaucuuauuauccagaacacaacuugggaagaucacugccaguuuucucggccgucccccaucggcuaccugggguugcucucacaacgcacccgagacauuuauauaagccguagacuguuaggaacauucaccuggacgcugagugauucugagggcaacgaaacuccugguggguacugucucacaagguggaugcuuaucgaggccgagcugaaaugcuuuggaaauaccgcgguggcaaaguguaacgaaaaacaugacgaggaguucugcgauauguugcggcuauuugacuucaauaagcaggccauuaaacgccugaagacugaagcucagauguccauccagcucauaaacaaggccguaaaugcacugauuaacgaucaacuuaucaugaaaaaucaccugagagacaucaugggcauuccauauugcaacuacagcaaguauugguacuugaaucacacaguuaccggcaaaacgucgcuccccagguguuggcuggugucuaacggguccuacuuaaaugaaacccauuucucagacgauaucgagcagcaggcugacaacaugauuacagagcugcuacaaaaggaauauauagaucggcagggaaaaacuccucucggucuggucgaccuuuuuguguucaguaccagcuuuuacuugaucuccauuuuccugcaccucgugaagaucccaacacaucgccacgucguuggcaaacccugcccuaagccacaucgacugaaucacauggggaucuguucuugcggacuuuauaagcacccgggcgugcccguaaaauggaagagaugaggacuagugcaucacauuuaaaagcaucucagccuaccaugagaauaagagaaagaaaaugaagaucaauagcuuauucaucucuuuuucuuuuucguugguguaaagccaacacccugucuaaaaaacauaaauuucuuuaaucauuuugccucuuuucucugugcuucaauuaauaaaaaauggaaagaaccuagaucuaaaaaaaaaaaaaaaaaaaaaaaaaaaaaaaaaaaaaaaaaaaaaaaaaaaaaaaaaaaaaaaaugcaucccccccccccccccccccccccccccccccaaaggcucuuuucagagccaccagaauu

SEQ ID NO: 3168 - RNA, 1855 nt, Artificial Sequence
  mRNA product Design i-2 comprising derived and/or modified sequence from LASV(LASV221-NIG-2010;Clade II)__AIT17624__GPC (opt3)
ggggcgcugccuacggagguggcagccaucuccuucucggcaucaagcuuaccaugggccagaucauuaccuucuuucaagaggugccccacgucauagaagagguuaugaacaucgugcugauugcccucagccuucuggcuaucuugaaggggauuuacaauguagcaacaugcggauuauucggucugguguccuuucuacuccuguguggcagaucuugcucaacuacguauaaaggggucuacgaacuucagacccuggaguuggacauggccagucucaacaugacaaugccucugagcuguacuaagaauaacucccaucacuauaucauggugggaaaugaaaccggccuggagcucacauuaaccaacacuucuauaaucaaucauaaauucugcaaccugucggaugcgcacaagaaaaaucuuuacgaccaugcuuugaugucaauuaucagcacauuucaccugaguauuccaaacuucaaucaguaugaggccauguccugugauuuuaacggugggaagaucucuguucaguacaaucuaagccacaccuaugcaauagacgccgcuaaccauugcggaacgauugcaaauggcgugcuccaaacuuucaugaggauggccuggggcggguccuacaucgcucuggauucaggaaaggguaguugggacuguauuaugaccagcuaccaguaucuuaucauccagaacacaacuugggaagaucacugccaguuuucucggccgucccccauuggcuaccugggguugcucucacaacgcacccgagacauauauaucagccguagacuguuaggaacauucaccuggacgcugagugauucugagggcaacgaaacuccugguggguacugucucacaagguggaugcuuauugaggccgagcugaaaugcuuuggaaauaccgcggucgcaaaguguaacgaaaaacaugacgaggaguucugcgauauguugcggcuauuugacuucaauaagcaggccauccgcagacugaaaacugaagcucagauguccauacagcucauuaacaaggccgugaaugcacugaucaacgaucaacuuaucaugaagaaucaccugagggacauuaugggcaucccauauugcaacuacagcaaauauugguacuugaaucacacaguaaccggcaagacgucgcucccccgguguuggcugguuucuaacggguccuacuuaaaugaaacccauuucucagacgauauugagcagcaggcugacaacaugauaacagagaugcugcaaaaagaauauauggaucgccagggaaagacuccucuaggucucguggaccuguuugucuucaguaccagcuuuuaccuuaucuccauuuucuugcaccuggugaaaaucccaacacaucgacacgugaucggcaagcccugcccuaaaccacauagacucaaucacauggggauuuguucuugcggacuguauaagcacccgggcguccccguuaaguggaaaaggugaggacuagugcaucacauuuaaaagcaucucagccuaccaugagaauaagagaaagaaaaugaagaucaauagcuuauucaucucuuuuucuuuuucguugguguaaagccaacacccugucuaaaaaacauaaauuucuuuaaucauuuugccucuuuucucugugcuucaauuaauaaaaaauggaaagaaccuagaucuaaaaaaaaaaaaaaaaaaaaaaaaaaaaaaaaaaaaaaaaaaaaaaaaaaaaaaaaaaaaaaaaugcaucccccccccccccccccccccccccccccccaaaggcucuuuucagagccaccagaauu

SEQ ID NO: 3169 - RNA, 1855 nt, Artificial Sequence
  mRNA product Design i-2 comprising derived and/or modified sequence from LASV(LASV237-NIG-2010;Clade II)__AIT17638__GPC (opt3)
ggggcgcugccuacggagguggcagccaucuccuucucggcaucaagcuuaccaugggccagaucauuaccuucuuucaagaggugccccacgucauagaagagguuaugaacaucgugcugauugcccucagccuucuggcuaucuugaaggggauuuacaauguagcaacaugcggauuauucggucugguguccuuucuacuccuguguggcagaucuugcucaacuacguauaaaggggucuacgaacuucagacccuggaguuggacauggccagucucaacaugacaaugccucugagcuguacuaagaauaacucccaucacuauaucauggugggaaaugaaaccggccuggagcucacauuaaccaacacuucuauaaucaaucauaaauucugcaaccugucggaugcgcacaagaaagaccuuuacgaucaugcuuugaugucaauuaucagcacauuucaccugaguauuccaaauuucaaccaguaugaggccauguccugugacuuuaauggugggaagaucucuguucaguacaaccuaagccacaccuaugcaguggaugccgcuaaucauugcggaacgauagcaaacggcguccuccaaacuuucaugaggauggccuggggcggguccuacauugcucuggacucaggaaaggguaguugggauuguaucaugaccagcuaccaguaucuuauuauccagaauacaacuugggaagaccacugccaguuuucucggccgucccccaucggcuaccugggguugcucucacaacgcacccgagauauuuauauaagccguagacuguuaggaacauucaccuggacgcugagugacucugagggcaacgaaacuccugguggguacugucucacaagguggaugcuuaucgaggccgagcugaaaugcuuuggaaacaccgcgguggcaaaguguaaugaaaaacaugaugaggaguucugcgacauguugcggcuauuugauuucaacaagcaggccauucgcagacugaaaacugaagcucagauguccauccagcucauaaauaaggccguaaacgcacugauuaaugaccaacuuaucaugaagaaccaccugagggacaucaugggcauuccauauugcaauuacagcaaauauugguacuugaaccacacaguuaccggcaagacgucgcucccccgguguuggcuggugucuaauggguccuacuuaaacgaaacccauuucucagaugacaucgagcagcaggcugauaauaugauuacagagcugcuacaaaaagaauauauggaccgccagggaaagacuccucucggucuggucgaucuuuuuguguucaguaccagcuuuuacuugauauccaucuuccugcaccucauuaaaaucccaacacaucgacacaucacuggcaagcccugcccuaaaccacauagacugaaccacauggggauuuguucuugcggacuuuauaagcacccgggcgugcccgucaaguggaaaaggugaggacuagugcaucacauuuaaaagcaucucagccuaccaugagaauaagagaaagaaaaugaagaucaauagcuuauucaucucuuuuucuuuuucguugguguaaagccaacacccugucuaaaaaacauaaauuucuuuaaucauuuugccucuuuucucugugcuucaauuaauaaaaaauggaaagaaccuagaucuaaaaaaaaaaaaaaaaaaaaaaaaaaaaaaaaaaaaaaaaaaaaaaaaaaaaaaaaaaaaaaaaugcaucccccccccccccccccccccccccccccccaaaggcucuuuucagagccaccagaauu

SEQ ID NO: 3170 - RNA, 1855 nt, Artificial Sequence
  mRNA product Design i-2 comprising derived and/or modified sequence from LASV(LASV253-NIG-2011;Clade II)__AIT17670__GPC (opt3)
ggggcgcugccuacggagguggcagccaucuccuucucggcaucaagcuuaccaugggccagaucauuaccuucuuucaagaggugccccacgucauagaagagguuaugaacaucgugcugauugcccucagccuucuggcuaucuugaaggggauuuacaauguagcaacaugcggauuauucggucugguguccuuucuacuccuguguggcagaucuugcucaacuacguauaaaggggucuacgaacuucagacccuggaguuggacauggccagucucaacaugacaaugccucugagcuguacuaagaauaacucccaucacuauaucauggugggaaaugaaaccggccuggagcucacauuaaccaacacuucuauaaucaaucauaaauucugcaaccugucggaugcgcacaagaaaaaucuuuacgaccaugcuuugaugucaauuaucagcacauuucaccugaguauuccaaacuucaaucaguaugaggccauguccugugauuuuaacggugggaagaucucuguucaguacaaucuaagccacaccuaugcaguggacgccgcuaaccauugcggaacgauagcaaauggcguccuccaaacuuucaugaggauggccuggggcggguccuacauugcucuggauucaggaaaggguaguugggacuguaucaugaccagcuaccaguaucuuauuauccagaacacaacuugggaagaucacugccaguuuucucggccgucccccaucggcuaccugggguugcucucacaacgcacccgagacauuuauauaagccguagacuguuaggaacauucaccuggacgcugagugauucugagggcaacgaaacuccugguggguacugucucacaagguggaugcuuaucgaggccgagcugaaaugcuuuggaaauaccgcgguggcaaaguguaacgaaaaacaugacgaggaguucugcgauauguugcggcuauuugacuucaauaagcaggccauucgcagacugaaagcugaagcccagauguccauccagcucauaaacaaggcaguaaaugcucugauuaacgaucaacuuaucaugaagaaucaccugagggacaucaugggcauuccauauugcaacuacagcaaauauugguacuugaaucacacuguuacaggccggaccucgcucccccgcuguuggcuggugucuaacggguccuacuuaaaugaaacgcauuucucagacgauaucgagcagcaggccgacaacaugauuaccgagcugcuacaaaaggaauauauagaucgacagggaaaaacaccucucggucuggucgaccuuuuuguguucaguacuagcuuuuacuugaucuccauuuuccugcaccucgugaagaucccaacccauagacacaucauuggcaaacccugcccuaagccacauaggcugaaucacauggggauauguucuugcggacuuuauaaacacccgggcguccccguuaaguggaagcggugaggacuagugcaucacauuuaaaagcaucucagccuaccaugagaauaagagaaagaaaaugaagaucaauagcuuauucaucucuuuuucuuuuucguugguguaaagccaacacccugucuaaaaaacauaaauuucuuuaaucauuuugccucuuuucucugugcuucaauuaauaaaaaauggaaagaaccuagaucuaaaaaaaaaaaaaaaaaaaaaaaaaaaaaaaaaaaaaaaaaaaaaaaaaaaaaaaaaaaaaaaaugcaucccccccccccccccccccccccccccccccaaaggcucuuuucagagccaccagaauu

SEQ ID NO: 3171 - RNA, 1855 nt, Artificial Sequence
  mRNA product Design i-2 comprising derived and/or modified sequence from LASV(LASV254-NIG-2011;Clade II)__AIT17674__GPC (opt3)
ggggcgcugccuacggagguggcagccaucuccuucucggcaucaagcuuaccaugggccagaucauuaccuucuuucaagaggugccccacgucauagaagagguuaugaacaucgugcugauugcccucagccuucuggcuaucuugaaggggauuuacaauguagcaacaugcggauuauucggucugguguccuuucuacuccuguguggcagaucuugcucaacuacguauaaaggggucuacgaacuucagacccuggaguuggacaugacaaaccucaauaugacuaugccucugaguuguaccaagaacaauagccaucacuauaucauggugggaaacgaaacaggccuggagcucaccuuaacuaauacauccauaaucaaccauaaauucugcaaucugucugaugcccacaagaaaaaccuuuacaaucaugcguugaugucgauuaucucaaccuuucaccugagcauuccaaacuucaaucaguaugaggcuaugaguugugacuuuaacggugggaagaucuccguucaguacaaucuaucucacagcuaugccguggaugcagccaaccauugcggaacgauagcuaacggcguccuccaaacuuucaugaggauggcauggggcggguccuacauugcccuggacucaggaaaggguaauugggauuguaucaugaccaguuaccaguaucuuauuauccagaacacaacuugggaagaccacugccaguuuagccggccgucucccaucggcuaccugggguugcucucccaacgcacccgagauauuuauauaucacguagacuguuaggaacauucaccuggacgcugagcgacagugagggcaaugaaacuccugguggguacugucucacaagguggaugcuuaucgaggcugagcugaaaugcuuuggaaacaccgccguggcgaaguguaaugaaaaacaugaugaggaguucugcgacauguugcggcuauuugauuucaacaagcaggcaauucgcagacugaaaacugaagcccaggcuaauauccagcucauaaacaaggccguaaaugcacugauuaacgaccaacuuaucaugaagaaucaccugagggauaucaugggcauuccauauugcaacuacucuaaauauugguacuugaaucacacaguuaccggcaagacgucccucccccgguguuggcuggugagcaacgggucguacuuaaaugaaacccauuucucugacgacaucgagcagcaggcugauaacaugauuacagagcugcuacaaaaagaauauauggaccgccagggaaagacuccucucggucuggucgaucuuuuuguguucuccaccucauuuuacuugauaaguaucuuccugcaccucgugaaaauuccaacacaucgacacgucaucggcaagcccugcccuaaaccacauagacugaaccacauggggaucuguagcugcggacuuuauaagcacccgggcguucccgugaaguggaaaaggugaggacuagugcaucacauuuaaaagcaucucagccuaccaugagaauaagagaaagaaaaugaagaucaauagcuuauucaucucuuuuucuuuuucguugguguaaagccaacacccugucuaaaaaacauaaauuucuuuaaucauuuugccucuuuucucugugcuucaauuaauaaaaaauggaaagaaccuagaucuaaaaaaaaaaaaaaaaaaaaaaaaaaaaaaaaaaaaaaaaaaaaaaaaaaaaaaaaaaaaaaaaugcaucccccccccccccccccccccccccccccccaaaggcucuuuucagagccaccagaauu

SEQ ID NO: 3172 - RNA, 1855 nt, Artificial Sequence
  mRNA product Design i-2 comprising derived and/or modified sequence from LASV(Nig08-A19;Clade III)__ADU56618__GPC (opt3)
ggggcgcugccuacggagguggcagccaucuccuucucggcaucaagcuuaccaugggccagaucgugaccuucuuucaagaggucccccacguuauugaagaggugaugaacauaguacugaucgcccucagcauucuugcuauccugaagggguuguacaauauugcaacaugcggauuaaucggucuggugacuuuccuacuccuguccggcagaucuuguucaaugacguauaaaggggucuacgaacuucagacccuggaguugaacaugaauacacucaacaugacuaugccucugaguugcaccaagaauaacagccaucacuauauaauggugggaaaugaaacaggccuggagcucaccuuaacuaacacaucccugcuucaucacaaauuuuguaauuugucugacgcccauaagaaaaaccuguacgaucacacccuaaugucgaucauuucaacguuccaccucagcaucccaaauuuuaaccaguaugaggcgaugaguugcgacuucaauggugggaagauuacuguucaguacaaccugucccauucuuaugcuaucgaugccgcaaaucacuguggaaccguggccaacggcguccuucaaacauuuaugaggauggcuuggggcgggagcuacauagcacuggacuccggacgggguaagugggauugcauuaugacuucauaccaguauuugaucauucagaacaccacaugggaagaccauugucaguucagucgcccgagccccaucggcuaccucgggcuguuaucucaacgaacccgugauaucuauauuuccagaaggcugcucggaacguuuacuuggacacuuucagacagcgagggcaaugaaaccccugguggguacugccugacucgguggauguugauagaggccgagcuaaaauguuucggaaacacagcuguggccaagugcaaugaaaaacacgaugaggaauuuugugacaugcugcgccucuucgauuuuaacaagcaggcgaucagaaggcugaaagcagaggcccagaugaguauucagcuuaucaauaaggcuguaaacgcccugauaaaugaccaauugauuaugaagaaccaccuccgggauaucaugggcaucccauauugcaauuacucuaaauauugguaccugaaccauaccuccacgggccgcaccagcuuaccccgaugcuggcugguuucgaaugggucuuaccuaaacgaaacacacuucuccgacgacauugagcagcaggcagauaauaugaucacugagaugcuccaaaaggaauaucuggacagacagggaaaaaccccucuugguuugguggaucuguucgucuuuucaacaaguuucuaccucauuagcauauuucugcaucuugugaagaucccaacucacaggcauauugugggcaaacccuguccuaagccacaccggcugaaccacauggggaucugcuccuguggauuguauaaacagccgggcguccccguucguuggaagcgcugaggacuagugcaucacauuuaaaagcaucucagccuaccaugagaauaagagaaagaaaaugaagaucaauagcuuauucaucucuuuuucuuuuucguugguguaaagccaacacccugucuaaaaaacauaaauuucuuuaaucauuuugccucuuuucucugugcuucaauuaauaaaaaauggaaagaaccuagaucuaaaaaaaaaaaaaaaaaaaaaaaaaaaaaaaaaaaaaaaaaaaaaaaaaaaaaaaaaaaaaaaaugcaucccccccccccccccccccccccccccccccaaaggcucuuuucagagccaccagaauu

SEQ ID NO: 3173 - RNA, 1858 nt, Artificial Sequence
  mRNA product Design i-2 comprising derived and/or modified sequence from LASV(G1180-SLE-2010;Clade IV)__AIT17168__GPC (opt3)
ggggcgcugccuacggagguggcagccaucuccuucucggcaucaagcuuaccaugggccagaucgugaccuucuuucaagaggucccccacguuauugaagaggugaugaacauaguacugaucgcccucagcauucuugcugugcugaagggguuguacaauuucgcaacaugcggauuagucggucugcuaacuuuucuccugcuuuguggcagauccugcacggccucuagguauaaagggguguacgaacugcagaccuuggagcucaacauggaaacacugaauaugacuaugccucugucauguaccaagaacaauagucaucacuauaucaugguuggaaacgagacaggccucgaguuaacccugacuaauacaagcauuaucaaccauaaauucugcaaucuuuccgacgcgcacaagaaaaacuuguacgaucaugcucugaugucuauaaucucgaccuuucaccuaucaauuccaaauuucaaccaguaugaagccaugagcugugacuuuaauggugggaagaucagugugcaguacaaccucucccacucuuaugcaggagaugccgcuaaucauugcggcacggucgcaaacggcgugcugcaaacuuucaugcggauggccuggggagggagcuacauugcucuugacuccggucacggcucaugggauuguaucaugaccaguuaccaguaucugauaauucagaacacaacuugggaggaccauugccaguuuagccgcccgucucccaucggguacuugggacuccugucccaacgaacccgugauauuuauaucucaagaagguuacugggcacauucaccuggacgcucagcgacagugaagguaaggauacuccugggggauacugucuuacacgguggaugcugaucgaggccgaguugaaaugcuuuggcaauaccgcgguagcaaaguguaacgaaaaacacgacgaggaguucugcgauaugcuacgccuguuugacuucaauaagcaggccauucagagacucaaagcugaagcccagaugucuauacaacugaucaacaaggcaguuaaugcucuuauuaacgaucagcugaucaugaagaaucacuugagggacauaaugggcauuccauauugcaacuacuccaaauauugguaccucaaucauacuacaaccgggaagacgagccugcccaaauguugguuagugucgaacggaucuuaccugaaugaaacccacuucuccgacgauaucgagcagcaagccgacaacaugaucacagagaugcuacagaaggaauauauggagcggcaggguaaaacuccucucggccuggucgaucuuuuuguguucucaaccaguuuuuacuugauuagcaucuuccugcaucucgugaagauuccaacacaccgccauauagucgggaaauccugccccaagccucaccgacugaaucacaugggaaucuguucuugcggccuuuauaagcagccagguguuccggugaaauggaagagaugaggacuagugcaucacauuuaaaagcaucucagccuaccaugagaauaagagaaagaaaaugaagaucaauagcuuauucaucucuuuuucuuuuucguugguguaaagccaacacccugucuaaaaaacauaaauuucuuuaaucauuuugccucuuuucucugugcuucaauuaauaaaaaauggaaagaaccuagaucuaaaaaaaaaaaaaaaaaaaaaaaaaaaaaaaaaaaaaaaaaaaaaaaaaaaaaaaaaaaaaaaaugcaucccccccccccccccccccccccccccccccaaaggcucuuuucagagccaccagaauu

SEQ ID NO: 3174 - RNA, 1858 nt, Artificial Sequence
  mRNA product Design i-2 comprising derived and/or modified sequence from LASV(G1442-SLE-2011;Clade IV)__AIT17180__GPC (opt3)
ggggcgcugccuacggagguggcagccaucuccuucucggcaucaagcuuaccaugggccagaucgugaccuucuuucaagaggucccccacguuauugaagaggugaugaacauaguacugaucgcccucagcauucuugcugugcugaagggguuguacaaugucgcaacaugcggauuaaucggucuggugacuuuccuacuccuguguggcagauccugcacgaccacacuuuauaaagggguuuacgaacugcagacuuuggagcucaacauggaaacccugaauaugacaaugccucugucuuguaccaagaacaauucacaucacuauauuagggugggaaacgagacuggccucgaguuaacacugaccaauacgaguaucauaaaccauaaauuuugcaaucuuagcgacgcccacaagaaaaacuuguacgaucaugcgcugauguccaucauuucuacuuuccaccuaucgaucccaaauuuuaaccaguaugaagcuaugucaugugacuucaauggugggaagauuagcguccaguacaaccucagucacuccuaugccggagaugcagccaaucauugcggcaccguggcuaacggcguacugcaaacauuuaugcggauggcauggggagggucuuacaucgcccuugacagcggucgcggcaacugggauuguauaaugacuuccuaccaguaucugauuauccagaauaccacaugggacgaucacugccaguucucacgaccgagucccauuggguacuugggacuccugagccaacguaccagagacguuuauaucucuaggcgguuacugggcacguuuacuuggacacucuccgauucagaggguaaggacaccccugggggauacugucuuacucgcuggaugcugaucgaagcugaguugaaaugcuucggcaacacagccguggcgaaguguaaugagaaacaugaugaagaguuuugcgacaugcuaagacuguucgauuuuaacaagcaggcaauucagaggcucaaagccgaagcucagaugagcauacaacugaucaauaaggccgucaacgcacuuauuaaugaccagcugaucaugaagaaccacuugcgggacauaaugggcauuccauauugcaauuacaguaaauauugguaccucaacaauaccgcuacggggaagaccucucugcccaaauguugguuaaucuccaacggaagcuaccugaaugagacacacuucucggaugacaucgaacaggaggccgauaacaugauuacugagaugcuacaaaaggaauauauggagcgccaggguaaaaccccucucggccugguggaccuuuucguguuuucuacauccuucuacuugaucucaauuuuucugcaucucgucaagauaccaacucaccgacauaucguugggaaaaguugccccaagccucacagacugaaucauaugggaauuuguagcugcggccuuuauaagcagccaggugugccgguaagguggaaacggugaggacuagugcaucacauuuaaaagcaucucagccuaccaugagaauaagagaaagaaaaugaagaucaauagcuuauucaucucuuuuucuuuuucguugguguaaagccaacacccugucuaaaaaacauaaauuucuuuaaucauuuugccucuuuucucugugcuucaauuaauaaaaaauggaaagaaccuagaucuaaaaaaaaaaaaaaaaaaaaaaaaaaaaaaaaaaaaaaaaaaaaaaaaaaaaaaaaaaaaaaaaugcaucccccccccccccccccccccccccccccccaaaggcucuuuucagagccaccagaauu

SEQ ID NO: 3175 - RNA, 1858 nt, Artificial Sequence
  mRNA product Design i-2 comprising derived and/or modified sequence from LASV(G3010-SLE-2013;Clade IV)__AIT17344__GPC (opt3)
ggggcgcugccuacggagguggcagccaucuccuucucggcaucaagcuuaccaugggccagaucgugaccuucuuucaagaggucccccacguuauugaagaggugaugaacauaguacugaucgcccucagcauucuugcugugcugaagggguuguacaauuucgcaacaugcggauuagucggucuggugacuuuucuacuccuguguggcagauccugcacgaccucucuuuauaaagggguuuacgaacugcagacauuggagcucaacauggaaacucugaauaugaccaugccucugucauguacaaagaacaauagucaucacuauaucauggugggaaacgagaccggccucgaguuaacucugacaaauaccagcauuaucaaccauaaauucugcaaucuuuccgacgcccacaagaaaaacuuguacaaucaugcgcugaugucuauaaucucgacguuucaccuaucaauuccaaacuucaaucaguaugaagcuaugagcugugauuuuaacggugggaagaucaguguccaguacaaucucucccacucuuaugccggagacgcagccagccauugcggcacuguggcuaacggcguacugcaaaccuucaugaggauggcauggggaggguccuacauugcccuugauucagguuacggcaagugggacuguaucaugacaaguuaucaguaccugauaauucagaacacuaccugggaggaucacugccaguuuagccggccgucucccaucggguauuugggacuccugucccaacgcacacgagacauuuacaucucacguagauuacugggcaccuucacguggacucucagcgauagugaagguaaagacacaccugggggauauugucuuaccagguggaugcugaucgaggcugaguugaagugcuuuggcaauacugccguugcgaaauguaacgaaaagcaugaugaggaguucugcgacaugcuacggcuguuugauuucaauaaacaggcaauucagcgccucaagacagaagcccagaugucuauacaacugaucaacaaggcugugaaugcccuuauuaacgaccagcugaucaugaaaaaucacuugagagauauaaugggcauuccauacugcaacuauuccaaguacugguaccucaaucacaccacgaccgggaaaacaagccugcccaaguguugguuagucucgaacggaucuuaucugaaugaaacucauuucuccgacgacaucgagcagcaagcagauaacaugaucaccgagaugcuacagaaagaauacauggagaggcaggguaagacaccucucggccugguggaccuuuuuguguucucaaccaguuuuuauuugauuagcaucuuccugcaccucgucaaaauuccaacucaucggcacauaguugggaaguccugccccaagccucaucgccugaaucacaugggaaucuguucuugcggccuuuacaaacagccaggugugccgguacgauggaagagaugaggacuagugcaucacauuuaaaagcaucucagccuaccaugagaauaagagaaagaaaaugaagaucaauagcuuauucaucucuuuuucuuuuucguugguguaaagccaacacccugucuaaaaaacauaaauuucuuuaaucauuuugccucuuuucucugugcuucaauuaauaaaaaauggaaagaaccuagaucuaaaaaaaaaaaaaaaaaaaaaaaaaaaaaaaaaaaaaaaaaaaaaaaaaaaaaaaaaaaaaaaaugcaucccccccccccccccccccccccccccccccaaaggcucuuuucagagccaccagaauu

SEQ ID NO: 3176 - RNA, 1858 nt, Artificial Sequence
  mRNA product Design i-2 comprising derived and/or modified sequence from LASV(G502-SLE-2009;Clade IV)__AIT17126__GPC (opt3)
ggggcgcugccuacggagguggcagccaucuccuucucggcaucaagcuuaccaugggccagaucgugaccuucuuucaagaggucccccacguuauugaagaggugaugaacauaguacugaucgcccucagcauucuugcugugcugaagggguuguacaauuucgcaacaugcggauuagucggucugcuaacuuuucuccugcuuuguggcagauccugcacgaccgggcuguauaaaggaguguacgaauugcagacacucgagcugaacauggaaacucugaauaugaccaugccucucucuuguacaaagaacaauucacaucacuauaucaugguuggcaacgagaccgguuuagagcugacucuuacaaauaccaguauuaucaaccauaaauucugcaauuugagcgacgcccacaagaaaaaccuguacgaucaugcgcuaauguccauaaucucuacguuucaccucucgauuccaaauuucaaccaguaugaagcuaugucaugugacuuuaaugggggaaagaucagcgugcaguacaaccugagucacuccuaugccggcgaugcagccgaccauugcggcacugucgcuaauggggugcuucaaaccuucaugaggauggcauggggagguucuuacauugcccuggauagcggccgggggcgcugggacuguaucaugacauccuaccaguauuugauaauucagaacacuaccugggaggaucacugccaguuuucacgaccgagucccaucggauaccucggccuguuaagccaacguacaagagacauuuauaucucuaggcggcugcucgguaccuucacguggacucuuuccgauucagaagggaaggacacaccuggaggcuacugucugacccgcuggauguugaucgaggcugagcuaaaaugcuuuggcaacacugccguagcgaaguguaaugaaaaacaugaugaggaguucugcgacaugcugagacucuuugauuucaacaagcaggcaauucagaggcugaaagccgaagcucagaugagcauacaacuuaucaauaaggccguuaacgcacugauuaaugaccaguuggugaugaagaaccaccuccgggacaucauggggauaccauauugcaauuacagucgcuauugguaccugaaccacacaaccacgggacgaaccucuuuacccaaauguuggcuggucuccaaugguagcuaccuaaacgaaacacauuucucggaugacauugagcagcaagcugauaauaugaucacugagaugcuccagaaggaauauauggagagacagggcaaaaccccucuggggcuuguggacuuguuuguguucucuacauccuuuuaccugaucucaauuuuccuccaccuggucaagaucccaacucauaggcacauuguuggaaaaaguugccccaagccucaucggcuuaaccacaugggcauauguagcugcggucuguauaaacagccaggggugccgguaaaguggaagcguugaggacuagugcaucacauuuaaaagcaucucagccuaccaugagaauaagagaaagaaaaugaagaucaauagcuuauucaucucuuuuucuuuuucguugguguaaagccaacacccugucuaaaaaacauaaauuucuuuaaucauuuugccucuuuucucugugcuucaauuaauaaaaaauggaaagaaccuagaucuaaaaaaaaaaaaaaaaaaaaaaaaaaaaaaaaaaaaaaaaaaaaaaaaaaaaaaaaaaaaaaaaugcaucccccccccccccccccccccccccccccccaaaggcucuuuucagagccaccagaauu

SEQ ID NO: 3177 - RNA, 1858 nt, Artificial Sequence
  mRNA product Design i-2 comprising derived and/or modified sequence from LASV(G733-SLE-2010;Clade IV)__AIT17154__GPC (opt3)
ggggcgcugccuacggagguggcagccaucuccuucucggcaucaagcuuaccaugggccagaucgugaccuucuuucaagaggucccccacguuauugaagaggugaugaacauaguacugaucgcccucagcauucuugcugugcugaagggguuguacaauuucgcaacaugcggaaucgucgguuuaguguccuuucugcuacucuguggcagaucuugcacuacgucacuguauaaagggguuuacgaacuucagacccuggaguugaacauggaaacacucaauaugacuaugccucugaguuguaccaagaacaauagccaucacuauauuauggugggaaacgagacaggccuggagcucaccuuaacuaauacauccaucauaaaccauaaauucugcaaucugucugacgcccacaagaaaaaccuuuacgaucaugcguugaugucgaucauuucaaccuuucaccugagcaucccaaauuucaaccaguaugaagcuaugaguugugacuuuaauggugggaagauuuccguccaguacaaccuaucucacagcuaugccggagaugcagccaaucauugcggcacgaucgcuaacggcgugcuccaaacuuucaugaggauggcauggggaggguccuacauagcccuggacucaggucgggaucgcugggacuguauuaugaccaguuaccaguaucuuaucauucagaacacaacuugggaggaucacugccaguuuagccgaccgucucccaucggcuaccugggguugcucucccaacguaccagagacaucuauauuucaaggcggcuguuaggaacauucaccuggacgcugagcgauagugaaggcaaggacacuccugguggguacugucucacacgcuggaugcuuauagaggcugagcugaaaugcuuuggaaauaccgccguagcgaaguguaacgaaaaacaugaugaggaguucugcgacauguugagacuauuugauuucaauaagcaggcaauccagaggcugaaagccgaagcucagaugucuauucaacucaucaacaaggccguuaaugcacugauaaacgaccagcuuauuaugaagaaucaucugcgggacaucaugggcaucccauauugcaacuacuccaaauauugguacuugaaucacacuacaaccggcaagacgagccuccccaaauguuggcuggugucgaacgggucuuacuuaaaugaaacccacuucuccgaugacauugagcagcaagcugauaacaugaucacagagaugcugcagaaggaauauauggagcgccagggaaaaacuccucuaggucucgucgaccuguuuguguucucaaccaguuuuuaccuuauuagcauauucuugcaccuggugaagaucccaacacaucgacacgucguuggcaaauccugccccaagccucauagacucaaucacauggggauuuguucuugcggacuguauggccagccaggugugccgguaaaguggaaaaggugaggacuagugcaucacauuuaaaagcaucucagccuaccaugagaauaagagaaagaaaaugaagaucaauagcuuauucaucucuuuuucuuuuucguugguguaaagccaacacccugucuaaaaaacauaaauuucuuuaaucauuuugccucuuuucucugugcuucaauuaauaaaaaauggaaagaaccuagaucuaaaaaaaaaaaaaaaaaaaaaaaaaaaaaaaaaaaaaaaaaaaaaaaaaaaaaaaaaaaaaaaaugcaucccccccccccccccccccccccccccccccaaaggcucuuuucagagccaccagaauu

SEQ ID NO: 3178 - RNA, 1858 nt, Artificial Sequence
  mRNA product Design i-2 comprising derived and/or modified sequence from MOPV/LASV reassortant(IGS-1;Clade IV)__AFY05576__GPC (opt3)
ggggcgcugccuacggagguggcagccaucuccuucucggcaucaagcuuaccaugggccagaucgugaccuucuuucaagaggucccccacguuauugaagaggugaugaacauaguacugaucgcccucagcgugcuugcuguccugaagggguuguacaauuucgcaacaugcggauuagugggucugguuacuuuucuacuccuguguggcagauccugcacgaccucucuuuauaaagggguguacgaacugcagacauuggagcucaacauggaaacucugaauaugaccaugccucugucauguacaaagaacaauagucaucacuauauuauggucggaaacgagaccggccucgaguuaacucugacaaauaccagcaucauuaaccauaaauucugcaaucuuuccgacgcccacaagaaaaacuuguacgaucaugcgcugaugucuaucauaucgacguuucaccuaucaaucccaaauuucaaccaguaugaagcuaugagcugugacuuuaauggugggaagauuagugugcaguacaaccucucccacucuuaugccggagaugcagccaaucauugcggcacuguagcuaacggcguucugcaaaccuucaugaggauggcauggggagggagcuacaucgcccuugacuccggucggggcaacugggauuguauuaugacaucauaccaguaucugaucauacagaauacuaccugggaggaccacugccaguuuagucgcccgagccccauuggguacuugggacuccugucucaacgaacacgugauaucuauauuuccagaagguuacugggcaccuucacguggacucucucagacagcgaaggugaggauacaccugggggauacugucuuacccgguggaugcugaucgaggcugaauugaagugcuuuggcaacacugccguggcgaaauguaaugagaagcaugacgaagaguucugcgauaugcuacgccuguuugacuucaacaaacaggcaauccagagacucaaggccgaagcucagaugaguauucaacugauaaauaaagccgucaacgcacuuaucaaugaucagcugauuaugaagaaccacuugagggacaucaugggcauaccauauugcaauuacucuaaguauugguaccucaaccacacaaccacggggcggaccucccugcccaaauguugguuagugagcaauggaucguaccugaacgagacacauuucucugacgauauugagcagcaagcugacaauaugaucacugaaaugcuacagaaggaguauauggaacgccaggguaaaaccccucucggccugguggaucuuuuugucuucuccacaucauuuuacuugaucaguauuuuccugcaccucguuaagaucccaacucaucgacacauuguggggaaaagcugccccaagccucauagacugaaccacaugggaauauguuccugcggccuuuauaaacagccagguguaccggugaaguggaagaggugaggacuagugcaucacauuuaaaagcaucucagccuaccaugagaauaagagaaagaaaaugaagaucaauagcuuauucaucucuuuuucuuuuucguugguguaaagccaacacccugucuaaaaaacauaaauuucuuuaaucauuuugccucuuuucucugugcuucaauuaauaaaaaauggaaagaaccuagaucuaaaaaaaaaaaaaaaaaaaaaaaaaaaaaaaaaaaaaaaaaaaaaaaaaaaaaaaaaaaaaaaaugcaucccccccccccccccccccccccccccccccaaaggcucuuuucagagccaccagaauu

SEQ ID NO: 3179 - RNA, 1858 nt, Artificial Sequence
  mRNA product Design i-2 comprising derived and/or modified sequence from LASV(LM765-SLE-2012;Clade IV)__AIT17814__GPC (opt3)
ggggcgcugccuacggagguggcagccaucuccuucucggcaucaagcuuaccaugggccagaucgugaccuucuuucaagaggucccccacguuauugaagaggugaugaacauaguacugaucgcccucagcauucuugcugugcugaagggguuguacaauuucgcaacaugcggauuagucggucuggugacuuuucuacuccuguguggcagauccugcacgaccucucuuuauaaagggguuuacgaacugcagacauuggagcucaacauggaaacucugaauaugaccaugccucugucauguacaaagaacaauagucaucacuauaucauggugggaaacgagaccggccucgaguuaacucugacaaauaccagcauuaucgaccauaaauucugcaaccuuuccgaugcccacaggaagaauuuguacgaccaugcgcugaugucuauaaucucgacguuucaccuaucaauuccaaacuucaaucaguaugaagcuaugagcugugauuuuaacggugggaaaaucaguguccaguacaaucucucccacucuuaugccaaggacgcagccgaucauugcggaacuguggcuaacggcguacugcaaaccuucaugcggauggcauggggcgggagcuacauugcccuugacuccggacgcggucgaugggauuguaucaugacaucauaccaguaucugauaauucagaauacuaccugggaggaccacugccaguuuagucguccgagccccaucggcuacuuggggcuccugucucaaagaacaagggauauuuauaucucccggcgcuuacugggaaccuucacguggacucucucagacagcgaaggcaaggauacaccugguggguacugucuuaccagauggaugcugaucgaggcugaguugaaaugcuuuggaaacacugccguugcgaaguguaacgaaaaacaugacgaggaguucugcgauaugcuaaggcuguuugacuucaauaagcaggcaauucagcggcucaaagccgaagcucagaugaguauacaacugaucaacaaggccgugaaugcacuuauuaacgaccagcugaucaugaagaaucacuugcgcgauauaaugggcauuccauauugcaacuacucuaaauauugguaccucaaucacacaaccacgggcaagaccucccugcccaaauguugguuagucagcaacgggucguaccugaaugaaacacauuucucugacgauaucgagcagcaagcugacaacaugaucacugagaugcuacagaaggaauauauggagcgacagggaaaaaccccucucggucugguggaucuuuuuguguucuccacaucauuuuacuugauuaguaucuuccugcaccucgucaagauuccaacucauagacacauaguuggcaaacccugcccuaagccacauaggcugaaucacauggggaucuguagcugcggacuuuauaagcagccgggcgugcccguaaaauggaagcggugaggacuagugcaucacauuuaaaagcaucucagccuaccaugagaauaagagaaagaaaaugaagaucaauagcuuauucaucucuuuuucuuuuucguugguguaaagccaacacccugucuaaaaaacauaaauuucuuuaaucauuuugccucuuuucucugugcuucaauuaauaaaaaauggaaagaaccuagaucuaaaaaaaaaaaaaaaaaaaaaaaaaaaaaaaaaaaaaaaaaaaaaaaaaaaaaaaaaaaaaaaaugcaucccccccccccccccccccccccccccccccaaaggcucuuuucagagccaccagaauu

SEQ ID NO: 3180 - RNA, 1858 nt, Artificial Sequence
  mRNA product Design i-2 comprising derived and/or modified sequence from LASV(LM776-SLE-2012;Clade IV)__AIT17824__GPC (opt3)
ggggcgcugccuacggagguggcagccaucuccuucucggcaucaagcuuaccaugggccagaucgugaccuucuuucaagaggucccccacguuauugaagaggugaugaacauaguacugaucgcccucagcauucuugcugugcugaagggguuguacaauuucgcaacaugcggauuagucggucuggugacuuuucuacuccuguguggcagauccugcacgaccucuguuuauaaagggguguacgaacuucagacacuggaguugaacauggaaacucucaauaugaccaugccucugucauguacaaagaacaauagucaucacuauaucauggucggaaacgagaccggccuggagcucacuuuaacaaauaccagcauuaucaaccauaaauucugcaaucuguccgacgcccacaagaaaaaccuuuacgaucaugcguugaugucuauaaucucgacguuucaccugucaauuccaaauuucaaccaguaugaagcuaugagcugugacuuuaauggugggaagaucagugugcaguacaaccuaucccacucuuaugccggagaugcagccaaucauugcggcacuguagcuaacggcguucuccaaaccuucaugaggauggcauggggagggagcuacauugcccuggacuccggucacggcaagugggauuguaucaugacaucauaccaguaucuuauaauucagaacacuaccugggaggaccauugccaguuuagucggccgagccccaucggguaccugggauugcucucucaacgcacacgagauauuuauaucucccguagacuguuaggcaccuucacguggacucugucagacagcgaagguaaagauacaccugggggauacugucucaccagguggaugcuuaucgaggcugagcugaagugcuuuggcaauacugccguggcgaaauguaacgaaaagcacgacgaggaguucugcgauauguugcggcuauuugacuucaauaaacaggcaauucagcgccugaaggccgaagcucagaugaguauacaacucaucaacaaggccgucaaugcacugauuaacgaucagcuuaucaugaaaaaucaccugagagacauaaugggcauuccauauugcaacuacucuaaguauugguacuugaaucauacaaccacggggaaaaccucccuccccaaguguuggcuggugagcaacggaucguacuuaaaugaaacacacuucucugacgauaucgagcagcaagcugacaacaugaucacugagaugcugcagaaagaauauauggagaggcaggguaagaccccucuaggccucguggaucuguuugucuucuccacaucauuuuaccuuauuaguaucuucuugcaucugguuaaaauuccaacucaccggcauauagugggaaagagcugccccaagccucaccgccucaaucacauggggaucuguuccugcggccuguauaaacagccagguguaccggugcgauggaagagaugaggacuagugcaucacauuuaaaagcaucucagccuaccaugagaauaagagaaagaaaaugaagaucaauagcuuauucaucucuuuuucuuuuucguugguguaaagccaacacccugucuaaaaaacauaaauuucuuuaaucauuuugccucuuuucucugugcuucaauuaauaaaaaauggaaagaaccuagaucuaaaaaaaaaaaaaaaaaaaaaaaaaaaaaaaaaaaaaaaaaaaaaaaaaaaaaaaaaaaaaaaaugcaucccccccccccccccccccccccccccccccaaaggcucuuuucagagccaccagaauu

SEQ ID NO: 3181 - RNA, 1858 nt, Artificial Sequence
  mRNA product Design i-2 comprising derived and/or modified sequence from LASV(Mad39;Clade IV)__ANH09722__GPC (opt3)
ggggcgcugccuacggagguggcagccaucuccuucucggcaucaagcuuaccaugggccagaucgugaccuucuuucaagaggucccccacguuauugaagaggugaugaacauaguacugaucgcccucagcauucuugcugugcugaagggguuguacaaugucgcaacaugcggauuaaucggucuggugacuuuccuacuccuguguggcagauccugcacgaccacacuuuauaaagggguuuacgaacugcaggccuuggagcucaacauggaaacucugaauaugaccaugccucugucuuguacaaagaacaauucacaucacuauauuagggugggaaacgagaccggccucgaguuaacucugacaaauaccagucuuaucaaccauaaauuuugcaauuugagcgacgcgcacaagaaaaaccuguacgaucaugcucuaauguccauaaucucuacguuccaccucucgauuccaaauuuuaaccaguaugaagccaugucaugugacuucaaugaugguaagaucagcguccaguacaaccugagucacacuuaugcaggggacaccgccaaucauugcggaacaguggcuaacggcguacuucaaacuuuuaugcggauggcauggggcggguccuacauugcccuggauucuggacgcgguggcugggacuguaucaugaccagcuaccaguauuugauaauucagaacacaaccugggaggaucacugccaguucucccgaccgucacccaucggguaccucggacuguuaagucaacguacgagagacauuuauaucagcaggcggcugcucggcacuuuuacauggacccuuucugauuccgaagguaaggacacuccugggggauacugucugacacgcuggauguugaucgaggcugagcuaaaaugcuucggcaauaccgccguugcgaaguguaacgaaaaacaugaugaggaauuuugcgacaugcugagacucuucgauuuuaauaagcaggcaauucagaggcugaaagccgaggcucagaugucaauacaacuuaucaacaaggccgugaaugcacugauuaacgaccaguugaucaugaagaaucaccuccgggacauaaugggcauuccauauugcaacuacagcaaauauugguaccugaaucacacggucaccgggaagacaaguuuacccaaauguuggcuggugucuaacggauccuaccuaaaugaaacucauuucagcgaugacaucgagcagcaagcugauaacaugaucaccgagaugcuccagaaggaauauauggagcgccaggguaaaacaccucugggccuuguggacuuguucgucuuuucgacuucuuucuaccugauuuccaucuuucuccaccugguuaagauuccaacccaucgacacgugguagggaaacccugcccuaagccacauagacuuaaucacaugggaauauguucaugcggcuucuauaagcagccgggugugcccgucagguggaaacggugaggacuagugcaucacauuuaaaagcaucucagccuaccaugagaauaagagaaagaaaaugaagaucaauagcuuauucaucucuuuuucuuuuucguugguguaaagccaacacccugucuaaaaaacauaaauuucuuuaaucauuuugccucuuuucucugugcuucaauuaauaaaaaauggaaagaaccuagaucuaaaaaaaaaaaaaaaaaaaaaaaaaaaaaaaaaaaaaaaaaaaaaaaaaaaaaaaaaaaaaaaaugcaucccccccccccccccccccccccccccccccaaaggcucuuuucagagccaccagaauu

SEQ ID NO: 3182 - RNA, 1858 nt, Artificial Sequence
  mRNA product Design i-2 comprising derived and/or modified sequence from LASV(Z0947-SLE-2011;Clade IV)__AIT17840__GPC (opt3)
ggggcgcugccuacggagguggcagccaucuccuucucggcaucaagcuuaccaugggccagaucgugaccuucuuucaagaggucccccacguuauugaagaggugaugaacauaguacugaucgcccucagcauucuugcugugcugaagggguuguacaauuucgcaacaugcggauuagucggucuggugacuuuucuacuccuguguggcagauccugcacgaucucucuuuauaaagggguuuacgaacugcagaccuuggagcucaacauggaaacacugaauaugacuaugccucugucauguaccaagaacaauagucaucacuauauuauggugggaaacgagacaggccucgaguuaacccugacuaauacaagcaucauaaaccauaaauucugcaaucuuuccgacgcccacaagaaaaacuuguacgaucaugcgcugaugucuaucauuucgaccuuucaccuaucaaucccaaauuucaaccaguaugaagcuaugagcugugacuuuaauggugggaagauuaguguccaguacaaccucucccacucuuaugccggagaugcagccaaucauugcggcacgguggcuaacggcguacugcaaacuuucaugaggauggcauggggagggagcuacaucgcccuugacuccggucgggaucgcugggacuguauaaugaccucauaccaguaucugauuauccagaacacaacuugggaggaucacugccaguuuagucgaccgagccccauuggcuacuuggggcuccugucucaacguaccagagacaucuauaucuccaggcgguuacugggaacauucaccuggacgcucucagauagcgaaggcaaggacacuccugguggguacugucuuacacgcuggaugcugauugaggcugaguugaaaugcuuuggaaauaccgccguugcgaaguguaacgaaaaacaugaugaggaguucugcgacaugcuaagacuguuugauuucaauaagcaggcaauacagaggcucaaagccgaagcucagaugaguauccaacugauuaacaaggccgugaaugcacuuaucaacgaccagcugauaaugaagaaucacuugcgggacauuaugggcaucccauauugcaacuacucuaaauauugguaccucaaucacacuacaaccggcaagacgucccugcccaaauguugguuagucagcaacgggucguaccugaaugaaacccauuucucugaugacaucgagcagcaagcugauaacaugauuacagagaugcuacagaaggaauauauggagcgccagggaaaaacuccucucggucugguggaccuuuuuguguucuccaccucauuuuacuugaucaguauuuuccugcaccucgucaagauaccaacacaucgacacaucguuggcaaacccugcccuaagccacauagacugaaucacauggggauuuguagcugcggacuuuauaagcagccgggcgugcccguaaaauggaagaggugaggacuagugcaucacauuuaaaagcaucucagccuaccaugagaauaagagaaagaaaaugaagaucaauagcuuauucaucucuuuuucuuuuucguugguguaaagccaacacccugucuaaaaaacauaaauuucuuuaaucauuuugccucuuuucucugugcuucaauuaauaaaaaauggaaagaaccuagaucuaaaaaaaaaaaaaaaaaaaaaaaaaaaaaaaaaaaaaaaaaaaaaaaaaaaaaaaaaaaaaaaaugcaucccccccccccccccccccccccccccccccaaaggcucuuuucagagccaccagaauu

SEQ ID NO: 3183 - RNA, 1858 nt, Artificial Sequence
  mRNA product Design i-2 comprising derived and/or modified sequence from LASV(Josiah;Clade IV)__NP_694870__GPC (opt4)
ggggcgcugccuacggagguggcagccaucuccuucucggcaucaagcuuaccaugggccagaucgugaccuucuuccaggaggugccccacgugaucgaggaggugaugaacaucgugcugaucgcccugagcgugcuggccgugcugaagggccuguacaacuucgccaccugcggccuggugggccuggugaccuuccugcugcugugcggcagaagcugcaccaccagccuguacaagggcguguacgagcugcagacccuggagcugaacauggagacccugaacaugaccaugccccugagcugcaccaagaacaacagccaccacuacaucauggugggcaacgagaccggccuggagcugacccugaccaacaccagcaucaucaaccacaaguucugcaaccugagcgacgcccacaagaagaaccuguacgaccacgcccugaugagcaucaucagcaccuuccaccugagcauccccaacuucaaccaguacgaggccaugagcugcgacuucaacggcggcaagaucagcgugcaguacaaccugagccacagcuacgccggcgacgccgccaaccacugcggcaccguggccaacggcgugcugcagaccuucaugagaauggccuggggcggcagcuacaucgcccuggacagcggcagaggcaacugggacugcaucaugaccagcuaccaguaccugaucauccagaacaccaccugggaggaccacugccaguucagcagacccagccccaucggcuaccugggccugcugagccagagaaccagagacaucuacaucagcagaagacugcugggcaccuucaccuggacccugagcgacagcgagggcaaggacacccccggcggcuacugccugaccagauggaugcugaucgaggccgagcugaagugcuucggcaacaccgccguggccaagugcaacgagaagcacgacgaggaguucugcgacaugcugagacuguucgacuucaacaagcaggccauccagagacugaaggccgaggcccagaugagcauccagcugaucaacaaggccgugaacgcccugaucaacgaccagcugaucaugaagaaccaccugagagacaucaugggcauccccuacugcaacuacagcaaguacugguaccugaaccacaccaccaccggcagaaccagccugcccaagugcuggcuggugagcaacggcagcuaccugaacgagacccacuucagcgacgacaucgagcagcaggccgacaacaugaucaccgagaugcugcagaaggaguacauggagagacagggcaagaccccccugggccugguggaccuguucguguucagcaccagcuucuaccugaucagcaucuuccugcaccuggugaagauccccacccacagacacaucgugggcaagagcugccccaagccccacagacugaaccacaugggcaucugcagcugcggccuguacaagcagcccggcgugcccgugaaguggaagagaugaggacuagugcaucacauuuaaaagcaucucagccuaccaugagaauaagagaaagaaaaugaagaucaauagcuuauucaucucuuuuucuuuuucguugguguaaagccaacacccugucuaaaaaacauaaauuucuuuaaucauuuugccucuuuucucugugcuucaauuaauaaaaaauggaaagaaccuagaucuaaaaaaaaaaaaaaaaaaaaaaaaaaaaaaaaaaaaaaaaaaaaaaaaaaaaaaaaaaaaaaaaugcaucccccccccccccccccccccccccccccccaaaggcucuuuucagagccaccagaauu

SEQ ID NO: 3184 - RNA, 1855 nt, Artificial Sequence
  mRNA product Design i-2 comprising derived and/or modified sequence from LASV(LP;Clade I)__AAF86701__GPC (opt4)
ggggcgcugccuacggagguggcagccaucuccuucucggcaucaagcuuaccaugggccagaucaucaccuucuuccaggaggugccccacgugaucgaggaggugaugaacaucgugcugaucgcccugagccugcuggccauccugaagggccuguacaacaucgccaccugcggcaucaucggccugguggccuuccuguuccugugcggcaagagcugcagccugacccugaagggcggcuacgagcugcagacccuggagcugaacauggagacccugaacaugaccaugccccugagcugcaccaagaacagcagccaccacuacaucagagugggcaacgagaccggccuggagcugacccugaccaacaccagcaucaucaaccacaaguucugcaaccugagcgacgcccacaagaagaaccuguacgaccacgcccugaugagcaucaucagcaccuuccaccugagcauccccaacuucaaccaguacgaggccaugagcugcgacuucaacggcggcaagaucagcgugcaguacaaccugagccacagcuacgccggcgacgccgccgagcacugcggcaccguggccaacggcgugcugcagaccuucaugagaauggccuggggcggcagauacaucgcccuggacagcggcaagggcaacugggacugcaucaugaccagcuaccaguaccugaucauccagaacaccaccugggaggaccacugccaguucagcagacccagccccaucggcuaccugggccugcugagccagagaaccagagacaucuacaucagcagaagacugcugggcaccuucaccuggacccugagcgacagcgagggcaacgagacccccggcggcuacugccugaccagauggaugcugaucgaggccgagcugaagugcuucggcaacaccgccguggccaagugcaacgagaagcacgacgaggaguucugcgacaugcugagacuguucgacuucaacaagcaggccaucagaagacugaaggccgaggcccagaugagcauccagcugaucaacaaggccgugaacgcccugaucaacgaccagcugaucaugaagaaccaccugagagacaucaugggcauccccuacugcaacuacagcaaguacugguaccugaaccacaccagcagcggcagaaccagccugcccaagugcuggcugaucagcaacggcagcuaccugaacgagacccaguucagcgacgacaucgagcagcaggccgacaacaugaucaccgagaugcugcagaaggaguacaucgagagacagggcaagaccccccugggccugguggacaucuucaucuucagcaccagcuucuaccugaucagcaucuuccugcaccugaucaagauccccacccacagacacaucgugggcaagcccugccccaagccccacagacugaaccacaugggcgugugcagcugcggccuguacaagcaccccggcgugcccaccaaguggaagagaugaggacuagugcaucacauuuaaaagcaucucagccuaccaugagaauaagagaaagaaaaugaagaucaauagcuuauucaucucuuuuucuuuuucguugguguaaagccaacacccugucuaaaaaacauaaauuucuuuaaucauuuugccucuuuucucugugcuucaauuaauaaaaaauggaaagaaccuagaucuaaaaaaaaaaaaaaaaaaaaaaaaaaaaaaaaaaaaaaaaaaaaaaaaaaaaaaaaaaaaaaaaugcaucccccccccccccccccccccccccccccccaaaggcucuuuucagagccaccagaauu

SEQ ID NO: 3185 - RNA, 1855 nt, Artificial Sequence
  mRNA product Design i-2 comprising derived and/or modified sequence from LASV(803213;Clade II)__AAF86703__GPC (opt4)
ggggcgcugccuacggagguggcagccaucuccuucucggcaucaagcuuaccaugggccagaucaucaccuucuuccaggaggugccccacgugaucgaggaggugaugaacaucgugcugaucgcccugagccugcuggccauccugaagggcaucuacaacguggccaccugcggccuguucggccugaucagcuuccugcugcugugcggcagaagcugcagcgugaccuacaagggcguguacgagcugcagacccuggagcugaacauggccaaccugaacaugaccaugccccugagcugcaccaagaacaacagccaccacuacaucauggugggcaacgagaccggccuggagcugacccugaccaacaccagcaucaucaaccacaaguucugcaaccugagcgacgcccacaagaagaaccuguacgaccacgcccugaugagcaucaucagcaccuuccaccugagcauccccaacuucaaccaguacgaggccaugagcugcgacuucaacggcggcaagaucagcgugcaguacaaccugagccacagcuucgccguggacgccgccaaccacugcggcaccaucgccaacggcgugcugcagaccuucaugagaauggccuggggcggcagcuacaucgcccuggacagcggcaagggcaacugggacugcaucaugaccagcuaccaguaccugaucauccagaacaccaccugggaggaccacugccaguucagcagacccagccccaucggcuaccugggccugcugagccagagaaccagagacaucuacaucagcagaagacugcugggcaccuucaccuggacccugagcgacagcgagggcaacgaggcccccggcggcuacugccugaccagauggaugcugaucgaggccgagcugaagugcuucggcaacaccgccguggccaagugcaacgagaagcacgacgaggaguucugcgacaugcugagacuguucgacuucaacaagcaggccaucaagagacugaagaccgaggcccagaugagcauccagcugaucaacaaggccgugaacgcccugaucaacgaccagcugaucaugaagaaccaccugagagacaucaugggcauccccuacugcaacuacagcagauacugguaccugaaccacaccgugaccggcaagaccagccugcccagaugcuggcuggugagcaacggcagcuaccugaacgagacccacuucagcgacgacaucgagcagcaggccgacaacaugaucaccgagaugcugcagaaggaguacauggacagacagggcaagaccccccugggccugguggaccuguucguguucagcaccagcuucuaccugaucagcaucuuccugcaccuggugaagauccccacccacagacacaucgugggcaagcccugccccaagccccacagacugaaccacaugggcaucugcagcugcggccuguacaagcaccccggcgugcccgugaaguggaagagaugaggacuagugcaucacauuuaaaagcaucucagccuaccaugagaauaagagaaagaaaaugaagaucaauagcuuauucaucucuuuuucuuuuucguugguguaaagccaacacccugucuaaaaaacauaaauuucuuuaaucauuuugccucuuuucucugugcuucaauuaauaaaaaauggaaagaaccuagaucuaaaaaaaaaaaaaaaaaaaaaaaaaaaaaaaaaaaaaaaaaaaaaaaaaaaaaaaaaaaaaaaaugcaucccccccccccccccccccccccccccccccaaaggcucuuuucagagccaccagaauu

SEQ ID NO: 3186 - RNA, 1855 nt, Artificial Sequence
  mRNA product Design i-2 comprising derived and/or modified sequence from LASV(GA391;Clade III)__CAA36645__GPC (opt4)
ggggcgcugccuacggagguggcagccaucuccuucucggcaucaagcuuaccaugggccagaucgugaccuucuuccaggaggugccccacgugaucgaggaggugaugaacaucgugcugaucgcccugagcauccuggccauccugaagggccuguacaacguggccaccugcggccugaucggccuggugaccuuccugcugcugagcggcagaagcugcagccugaucuacaagggcaccuacgagcugcagacccuggagcugaacauggagacccugaacaugaccaugccccugagcugcaccaagaacaacagccaccacuacaucagagugggcaacgagaccggccuggagcugacccugaccaacaccagcauccugaaccacaaguucugcaaccugagcgacgcccacaagagaaaccuguacgaccacagccugaugagcaucaucagcaccuuccaccugagcauccccaacuucaaccaguacgaggccaugagcugcgacuucaacggcggcaagaucaccgugcaguacaaccugagccacagcuucgccguggacgccgccggccacugcggcacccuggccaacggcgugcugcagaccuucaugagaauggccuggggcggcagcuacaucgcccuggacagcggcagaggcaacugggacugcaucaugaccagcuaccaguaccugaucauccagaacaccaccugggacgaccacugccaguucagcagacccagccccaucggcuaccugggccugcugagccagagaaccagagacaucuacaucagcagaagacugcugggcaccuucaccuggacccugagcgacagcgagggcaacgagacccccggcggcuacugccugaccagauggaugcugaucgaggccgagcugaagugcuucggcaacaccgccguggccaagugcaacgagaagcacgacgaggaguucugcgacaugcugagacuguucgacuucaacaagcaggccaucagaagacugaagaccgaggcccagaugagcauccagcugaucaacaaggccgugaacgcccugaucaacgaccagcugaucaugaagaaccaccugagagacaucaugggcauccccuacugcaacuacagcagauacugguaccugaaccacaccagcaccggcaagaccagccugcccagaugcuggcugaucagcaacggcagcuaccugaacgagaccaaguucagcgacgacaucgagcagcaggccgacaacaugaucaccgagaugcugcagaaggaguacaucgacagacagggcaagaccccccugggccugguggaccuguucguguucagcaccagcuucuaccugaucagcaucuuccugcaccuggugaagauccccacccacagacacaucgugggcaagcccugccccaagccccacagacugaaccacaugggcaucugcagcugcggccuguacaagcagcccggcgugcccgugagauggaagagaugaggacuagugcaucacauuuaaaagcaucucagccuaccaugagaauaagagaaagaaaaugaagaucaauagcuuauucaucucuuuuucuuuuucguugguguaaagccaacacccugucuaaaaaacauaaauuucuuuaaucauuuugccucuuuucucugugcuucaauuaauaaaaaauggaaagaaccuagaucuaaaaaaaaaaaaaaaaaaaaaaaaaaaaaaaaaaaaaaaaaaaaaaaaaaaaaaaaaaaaaaaaugcaucccccccccccccccccccccccccccccccaaaggcucuuuucagagccaccagaauu

SEQ ID NO: 3187 - RNA, 1858 nt, Artificial Sequence
  mRNA product Design i-2 comprising derived and/or modified sequence from LASV(AV;Clade V)__CCA30314__GPC (opt4)
ggggcgcugccuacggagguggcagccaucuccuucucggcaucaagcuuaccaugggccagaucgugaccuucuuccaggaggugccccacgugaucgaggaggugaugaacaucgugcugaucgcccugagcauccuggccgugcugaagggccuguacaacaucgccaccugcggccugaucggccugaucaccuuccugcugcugugcggcagaagcugcagcagcaaccuguacaagggcguguacgagcugcagagccuggaccugaacauggagacccugaacaugaccaugccccugagcugcaccaagaacaacagccaccacuacaucagagugggcaacgacaccggccuggagcugacccugaccaacaccagcauccugaaccacaaguucugcaaccugagcgacgcccacaagaaggaccuguacgaccacgcccugaugagcaucaucagcaccuuccaccugagcauccccaacuucaaccaguacgaggccaugagcugcgacuucaacggcggcaagaucagcgugcaguacaaccugagccacagcuacgccaucgacgccgccaaccacugcggcaccguggccaacggcauccugcagaccuucaugagaauggccuggggcggcagcuacaucgcccuggacagcggcagaggcaacugggacugcaucaugaccagcuaccaguaccugaucauccagaacaccaccugggagaaccacugccaguucagcagacccagccccaucggcuaccugggccugcugagccagagaaccagagacaucuacaucagcagaagacugcugggcaccuucaccuggacccugagcgacagcgagggcaacgccacccccggcggcuacugccugaccagauggaugcugaucgaggccgagcugaagugcuucggcaacaccgccguggccaagugcaacgagaagcacgacgaggaguucugcgacaugcugagacuguucgacuucaacaagcaggccaucagcagacugaagagcgaggcccagaugagcauccagcugaucaacaaggccgugaacgcccugaucaacgaccagcugaucaugaagaaccaccugagagacaucaugggcauccccuacugcaacuacagcaaguacugguaccugaaccacaccaucaccggcaagaccagccugcccaagugcuggcuggugagcaacggcagcuaccugaacgagacccacuucagcgacgacaucgagcagcaggccgacaacaugaucaccgagaugcugcagaaggaguacauggagagacagggcaagaccccccugggccugguggaccuguucguguucagcaccagcuucuaccugaucagcaucuuccugagacuggugaagauccccacccacagacacaucgugggcaagcccugccccaagccccacagacugaaccacaugggcaucugcagcugcggccuguacaagcagcccggcgugcccgugagauggaagagaugaggacuagugcaucacauuuaaaagcaucucagccuaccaugagaauaagagaaagaaaaugaagaucaauagcuuauucaucucuuuuucuuuuucguugguguaaagccaacacccugucuaaaaaacauaaauuucuuuaaucauuuugccucuuuucucugugcuucaauuaauaaaaaauggaaagaaccuagaucuaaaaaaaaaaaaaaaaaaaaaaaaaaaaaaaaaaaaaaaaaaaaaaaaaaaaaaaaaaaaaaaaugcaucccccccccccccccccccccccccccccccaaaggcucuuuucagagccaccagaauu

SEQ ID NO: 3188 - RNA, 1855 nt, Artificial Sequence
  mRNA product Design i-2 comprising derived and/or modified sequence from LASV(Togo/2016/7082;Clade VI)__AMR44577__GPC (opt4)
ggggcgcugccuacggagguggcagccaucuccuucucggcaucaagcuuaccaugggccagaucaucaccuucuuccaggaggugccccacgugaucgaggaggugaugaacaucgugcugaucgcccugagccugcuggccauccugaagggcguguacaacguggccaccugcggcaucaucggccuggugaccuuccuguuccugugcggcagaagcugcagccugaucuacaagggcagcuacgagcugcagacccuggagcugaacauggagacccugaacaugaccaugccccugagcugcaccaagaacagcagccaccacuacaucagagugggcaacgagaccggccuggagcugacccugaccaacaccagcaucaucaaccacaaguucugcaaccugagcgacgcccacaagagaaaccuguacgaccacgcccugaugagcauccugagcaccuuccaccugagcauccccaacuucaaccaguacgaggccaugagcugcgacuucaacggcggcaagaucagcgugcaguacaaccugagccacgccuacgccguggacgccgccgagcacugcggcaccguggccaacggcgugcugcagaccuucaugagaauggccuggggcggcagcuacaucgcccuggacagcggcagaggcaacugggacugcaucaugaccagcuaccaguaccugaucauccagaacaccaccugggaggaccacugccaguucagcagacccagccccaucggcuaccugggccugcugagccagagaaccagagacaucuacaucagcagaagacugcugggcaccuucaccuggacccugagcgacagcgagggcaacgagacccccggcggcuacugccugaccagauggaugcugaucgaggccgagcugaagugcuucggcaacaccgccguggccaagugcaacgagaagcacgacgaggaguucugcgacaugcugagacuguucgacuucaacaagcaggccauccagagacugaagagcgaggcccagaugagcauccagcugaucaacaaggccgugaacgcccugaucaacgaccagcugaucaugaagaaccaccugagagacaugaugggcauccccuacugcaacuacagcaaguacugguaccugaaccacaccagcagcggcagaaccagccugcccaagugcuggcuggugagcaacggcagcuaccugaacgagacccacuucagcgacgacaucgagcagcaggccgacaacaugaucaccgagaugcugcagaaggaguacaucgacagacagggcaagaccccccugggccugguggaccuguucguguucagcaccagcuucuaccugaucagcaucuuccugcaccugaucaagauccccacccacagacacaucgugggcaagcccugccccaagccccacagacugaaccacaugggcaucugcagcugcggccuguacaagcagcccggcgugcccaccagauggaagagaugaggacuagugcaucacauuuaaaagcaucucagccuaccaugagaauaagagaaagaaaaugaagaucaauagcuuauucaucucuuuuucuuuuucguugguguaaagccaacacccugucuaaaaaacauaaauuucuuuaaucauuuugccucuuuucucugugcuucaauuaauaaaaaauggaaagaaccuagaucuaaaaaaaaaaaaaaaaaaaaaaaaaaaaaaaaaaaaaaaaaaaaaaaaaaaaaaaaaaaaaaaaugcaucccccccccccccccccccccccccccccccaaaggcucuuuucagagccaccagaauu

SEQ ID NO: 3189 - RNA, 1855 nt, Artificial Sequence
  mRNA product Design i-2 comprising derived and/or modified sequence from LASV(KAK-428;Clade n.d. (VII))__ANH09740__GPC (opt4)
ggggcgcugccuacggagguggcagccaucuccuucucggcaucaagcuuaccaugggccagaucgugaccuucuuccaggaggugccccacgugaucgaggaggugaugaacaucgugcugaucgcccugagccugcuggccauccugaagggccuguacaacuucgccaccugcggcgugaucggccugaucaccuuccugcugcugugcggcagaagcugcagcgccaccuacaagggccaguacgagcugcagacccuggagcugaacauggagagccugaacaugaccaugccccugagcugcaccaagaacaacagccaccacuacaucagagccggcaacaacaccggccuggagcugacccugaccaacaccagcaucaucagccacaaguucugcaaccugagcgacgcccacaagaagaaccuguacgaccacacccugaugagcaucaucaccaccuuccaccugagcauccccaacuucaaccaguacgaggccaugagcugcgacuucaacggcggcaagaucagcauccaguacaaccugagccacagcuacgccggcgacgccgcccagcacugcggcaccguggccaacggcgugcugcagaccuucaugagaauggccuggggcggcagcuaccuggcccuggacagcggcagaagaggcugggacugcaucaucagcagcuaccaguaccugaucauccagaacaccaccugggacgaccacugccaguucagcagacccagccccaucggcuaccugggcuucgugagccagaagaccagagacaucuacaucagcagaagacugcugggcaccuucaccuggacccugagcgacagcgagggccacgacaugcccggcggcuacugccugaccagauggaugcugaucgaggccgaccugaagugcuucggcaacaccgccguggccaagugcaacgagaagcacgacgaggaguucugcgacauguggagacuguucgacuucaacaagcaggccauccagagacugaaggccgaggcccagaugaacauccagcugaucaacaaggccgugaacgcccugaucaacgaccagcugaugaugaagaaccaccugagagacaucaugggcauccccuacugcaacuacagcaaguucugguaccugaacaacaccaccaccggcagaaccagccugcccagaugcuggcugaucagcaacggcagcuaccugaacgagacccacuucagcgacgacaucgagcagcaggccgacaacaugaucaccgagaugcugcagaaggaguacauggacagacagggcaagaccccccugggccugguggaccuguucguguucagcaccagcuucuaccugaucaccaucuuccugcaccuggugaagauccccacccacagacacaucgugggcaagcccugccccaagccccacagacugaaccacaugggcaucugcagcugcggccuguacaagcagcccggcgugcccgugagauggaagagaugaggacuagugcaucacauuuaaaagcaucucagccuaccaugagaauaagagaaagaaaaugaagaucaauagcuuauucaucucuuuuucuuuuucguugguguaaagccaacacccugucuaaaaaacauaaauuucuuuaaucauuuugccucuuuucucugugcuucaauuaauaaaaaauggaaagaaccuagaucuaaaaaaaaaaaaaaaaaaaaaaaaaaaaaaaaaaaaaaaaaaaaaaaaaaaaaaaaaaaaaaaaugcaucccccccccccccccccccccccccccccccaaaggcucuuuucagagccaccagaauu

SEQ ID NO: 3190 - RNA, 1855 nt, Artificial Sequence; identical to SEQ ID NO: 3184
  mRNA product Design i-2 comprising derived and/or modified sequence from LASV(Pinneo-NIG-1969;Clade I)__AIT17836__GPC (opt4)

SEQ ID NO: 3191 - RNA, 1855 nt, Artificial Sequence
  mRNA product Design i-2 comprising derived and/or modified sequence from LASV(ISTH0009-NIG-2011;Clade II)__AIT17404__GPC (opt4)
ggggcgcugccuacggagguggcagccaucuccuucucggcaucaagcuuaccaugggccagaucaucaccuucuuccaggaggugccccacgugaucgaggaggugaugaacaucgugcugaucgcccugagccugcuggccauccugaagggcaucuacaacguggccaccugcggccuguucggccuggugagcuuccugcugcugugcggcagaagcugcagcaccaccuacaagggcguguacgagcugcagacccuggagcuggacauggccagccugaacaugaccaugccccugagcugcaccaagaacaacagccaccacuacaucauggugggcaacgagaccggccuggagcugacccugaccaacaccagcaucaucaaccacaaguucugcaaccugagcgacgcccacaagaagaaccuguacgaccacgcccugaugagcaucaucagcaccuuccaccugagcauccccaacuucaaccaguacgaggccaugagcugcgacuucaacggcggcaagaucagcgugcaguacaaccugagccacgccuacgccguggacgccgccaaccacugcggcaccaucgccaacggcgugcugcagaccuucaugagaauggccuggggcggcagcuacaucgcccuggacagcggcaagggcagcugggacugcaucaugaccagcuaccaguaccugaucauccagaacaccaccugggaggaccacugccaguucagcagacccagccccaucggcuaccugggccugcugagccagagaaccagagacaucuacaucagcagaagacugcugggcaccuucaccuggacccugagcgacagcgagggcaacgagacccccggcggcuacugccugaccagauggaugcugaucgaggccgagcugaagugcuucggcaacaccgccguggccaagugcaacgagaagcacgacgaggaguucugcgacaugcugagacuguucgacuucaacaagcaggccaucagaagacugaagaccgaggcccagaugagcauccagcugaucaacaaggccgugaacgcccugaucaacgaccagcugaucaugaagaaccaccugagagacaucaugggcauccccuacugcaacuacagcaaguacugguaccugaaccacaccgugaccggcaagaccagccugcccagaugcuggcuggugagcaacggcagcuaccugaacgagacccacuucagcgacgacaucgagcagcaggccgacaacaugaucaccgagcugcugcagaaggaguacauggacagacagggcaagaccccccugggccugguggaccuguucguguucagcaccagcuucuaccugaucagcaucuuccugcaccugaucaagauccccacccacagacacaucaccggcaagcccugccccaagccccacagacugaaccacaugggcaucugcagcugcggccuguacaagcaccccggcgugcccgugaaguggaagagaugaggacuagugcaucacauuuaaaagcaucucagccuaccaugagaauaagagaaagaaaaugaagaucaauagcuuauucaucucuuuuucuuuuucguugguguaaagccaacacccugucuaaaaaacauaaauuucuuuaaucauuuugccucuuuucucugugcuucaauuaauaaaaaauggaaagaaccuagaucuaaaaaaaaaaaaaaaaaaaaaaaaaaaaaaaaaaaaaaaaaaaaaaaaaaaaaaaaaaaaaaaaugcaucccccccccccccccccccccccccccccccaaaggcucuuuucagagccaccagaauu

SEQ ID NO: 3192 - RNA, 1855 nt, Artificial Sequence
  mRNA product Design i-2 comprising derived and/or modified sequence from LASV(ISTH2010-NIG-2012;Clade II)__AIT17482__GPC (opt4)
ggggcgcugccuacggagguggcagccaucuccuucucggcaucaagcuuaccaugggccagaucaucaccuucuuccaggaggugccccacgugaucgaggaggugaugaacaucgugcugaucgcccugagccugcuggccauccugaagggcaucuacaacguggccaccugcggccuguucggccuggugagcuuccugcugcugugcggcagaagcugcagcaccaccuacaagggcguguacgagcugcagacccuggagcuggacauggccagccugaacaugaccaugccccugagcugcaccaagaacaacagccaccacuacaucauggugggcaacgagaccggccuggagcugacccugaccaacaccagcaucaucaaccacaaguucugcaaccugagcgacgcccacaagaagaaccuguacgaccacgcccugaugagcaucaucagcaccuuccaccugagcauccccaacuucaaccaguacgaggccaugagcugcgacuucaacggcggcaagaucagcgugcaguacaaccugagccacgccuacgccguggacgccgccaaccacugcggcaccaucgccaacggcgugcugcagaccuucaugagaauggccuggggcggcagcuacaucgcccuggacagcggcaagggcagcugggacugcaucaugaccagcuaccaguaccugaucauccagaacaucaccugggaggaccacugccaguucagcagacccagccccaucggcuaccugggccugcugagccagagaaccagagacaucuacaucagcagaagacugcugggcaccuucaccuggacccugagcgacagcgagggcaacgagacccccggcggcuacugccugaccagauggaugcugaucgaggccgagcugaagugcuucggcaacaccgccguggccaagugcaacgagaagcacgacgaggaguucugcgacaugcugagacuguucgacuucaacaagcaggccaucagaagacugaagaccgaggcccagaugagcauccagcugaucaacaaggccgugaacgcccugaucaacgaccagcugaucaugaagaaccaccugagagacaucaugggcauccccuacugcaacuacagcaaguacugguaccugaaccacaccgugaccggcaagaccagccugcccagaugcuggcuggugagcaacggcagcuaccugaacgagacccacuucagcgacgacaucgagcagcaggccgacaacaugaucaccgagcugcugcagaaggaguacaucgacagacagggcaagaccccccugggccugguggaccuguucguguucagcaccagcuucuaccugaucagcaucuuccugcaccuggugaagauccccacccacagacacguggugggcaagcccugccccaagccccacagacugaaccacaugggcaucugcagcugcggccuguacaagcaccccggcgugcccgugaaguggaagagaugaggacuagugcaucacauuuaaaagcaucucagccuaccaugagaauaagagaaagaaaaugaagaucaauagcuuauucaucucuuuuucuuuuucguugguguaaagccaacacccugucuaaaaaacauaaauuucuuuaaucauuuugccucuuuucucugugcuucaauuaauaaaaaauggaaagaaccuagaucuaaaaaaaaaaaaaaaaaaaaaaaaaaaaaaaaaaaaaaaaaaaaaaaaaaaaaaaaaaaaaaaaugcaucccccccccccccccccccccccccccccccaaaggcucuuuucagagccaccagaauu

SEQ ID NO: 3193 - RNA, 1855 nt, Artificial Sequence
  mRNA product Design i-2 comprising derived and/or modified sequence from LASV(Lassa virus/H.sapiens-wt/NGA/2015/ISTH_0543;Clade II)__AVO03639__GPC (opt4)
ggggcgcugccuacggagguggcagccaucuccuucucggcaucaagcuuaccaugggccagaucaucaccuucuuccaggaggugccccacgugaucgaggaggugaugaacaucgugcugaucgcccugagccugcuggccauccugaagggcaucuacaacguggccaccugcggccuguucggccuggugagcuuccugcugcugugcggcagaagcugcagcaccaccuacaagggcguguacgagcugcagacccuggagcuggacauggccaaccugaacaugaccaugccccugagcugcaccaagaacaacagccaccacuacaucauggugggcaacgagaccggccuggagcugacccugaccaacaccagcaucaucaaccacaaguucugcaaccugagcgacgcccacaagaagaaccuguacgaccacgcccugaugagcaucaucagcaccuuccaccugagcauccccaacuucaaccaguacgaggccaugagcugcgacuucaacggcggcaagaucagcgugcaguacaaccugagccacaccuacgccguggacgccgccaaccacugcggcaccaucgccaacggcgugcugcagaccuucaugagaauggccuggggcggcagcuacaucgcccuggacagcggcaagggcagcugggacugcaucaugaccagcuaccaguaccuggugauccagaacaccaccugggaggaccacugccaguucagcagacccagccccaucggcuaccugggccugcugagccagagaaccagagacaucuacaucagcagaagacugcugggcaccuucaccuggacccugagcgacagcgagggcaacgagacccccggcggcuacugccugaccagauggaugcugaucgaggccgagcugaagugcuucggcaacaccgccguggccaagugcaacgagaagcacgacgaggaguucugcgacaugcugagacuguucgacuucaacaagcaggccaucagaagacugaagaccgaggcccagaugagcauccagcugaucaacaaggccgugaacgcccugaucaacgaccagcugaucaugaagaaccaccugagagacaucaugggcauccccuacugcaacuacagcaaguacugguaccugaaccacaccgugaccggcaagaccagccugcccagaugcuggcuggugagcaacggcagcuaccugaacgagacccacuucagcgacgacaucgagcagcaggccgacaacaugaucaccgagcugcugcagaaggaguacaucgacagacagggcaagaccccccugggccugguggaccuguucguguucagcaccagcuucuaccugaucagcaucuuccugcaccuggugaagauccccacccacagacacaucaccggcaagcccugccccaagccccacagacugaaccacaugggcaucugcagcugcggccuguacaagcaccccggcgugcccgugaaguggaagagaugaggacuagugcaucacauuuaaaagcaucucagccuaccaugagaauaagagaaagaaaaugaagaucaauagcuuauucaucucuuuuucuuuuucguugguguaaagccaacacccugucuaaaaaacauaaauuucuuuaaucauuuugccucuuuucucugugcuucaauuaauaaaaaauggaaagaaccuagaucuaaaaaaaaaaaaaaaaaaaaaaaaaaaaaaaaaaaaaaaaaaaaaaaaaaaaaaaaaaaaaaaaugcaucccccccccccccccccccccccccccccccaaaggcucuuuucagagccaccagaauu

SEQ ID NO: 3194 - RNA, 1855 nt, Artificial Sequence
  mRNA product Design i-2 comprising derived and/or modified sequence from LASV(Lassa virus/H.sapiens-wt/NGA/2016/ISTH_0009;Clade II)__AVO03571__GPC (opt4)
ggggcgcugccuacggagguggcagccaucuccuucucggcaucaagcuuaccaugggccagaucaucaccuucuuccaggaggugccccacgugaucgaggaggugaugaacaucgugcugaucgcccugagccugcuggccauccugaagggcaucuacaacguggccaccugcggccugcugggccuggugagcuuccugcugcugugcggcagaagcugcagcaccaccuacaagggcguguacgagcugcagacccuggagcuggacauggccagccugaacaugaccaugccccugagcugcaccaagaacaacagccaccacuacaucauggugggcaacgagaccggccuggagcugacccugaccaacaccagcaucaucaaccacaaguucugcaaccugagcgacgcccacaagaagaaccuguacgaccacgcccugaugagcaucaucagcaccuuccaccugagcauccccaacuucaaccaguacgaggccaugagcugcgacuucaacggcggcagaaucagcgugcaguacaaccugagccacagcuacgccguggacgccgccaaccacugcggcaccaucgccaacggcgugcugcagaccuucaugagaauggccuggggcggcagcuacaucgcccuggacagcggcaagggcagcugggacugcaucaugaccagcuaccaguaccugaucauccagaacaccaccugggaggaccacugccaguucagcagacccagccccaucggcuaccugggccugcugagccagagaaccagagacaucuacaucagcagaagacugcugggcaccuucaccuggacccugagcgacagcgagggcaacgagacccccggcggcuacugccugaccagauggaugcugaucgaggccgagcugaagugcuucggcaacaccgccguggccaagugcaacgagaagcacgacgaggaguucugcgacaugcugagacuguucgacuucaacaagcaggccaucagaagacugaagaccgaggcccagaugagcauccagcugaucaacaaggccgugaacgcccugaucaacgaccagcugaucaugaagaaccaccugagagacaucaugggcauccccuacugcaacuacagcaaguacugguaccugaaccacaccgugaccggcaagaccagccugcccagaugcuggcuggugagcaacggcagcuaccugaacgagacccacuucagcgacgacaucgagcagcaggccgacaacaugaucaccgagcugcugcagaaggaguacaucgacagacagggcaagaccccccugggccugguggaccuguucguguucagcaccagcuucuaccugaucagcaucuuccugcaccuggugaagauccccacccacagacacaucaccggcaagcccugccccaagccccacagacugaaccacaugggcaucugcagcugcggccuguacaaccaccccggcgugcccgugaaguggaagagaugaggacuagugcaucacauuuaaaagcaucucagccuaccaugagaauaagagaaagaaaaugaagaucaauagcuuauucaucucuuuuucuuuuucguugguguaaagccaacacccugucuaaaaaacauaaauuucuuuaaucauuuugccucuuuucucugugcuucaauuaauaaaaaauggaaagaaccuagaucuaaaaaaaaaaaaaaaaaaaaaaaaaaaaaaaaaaaaaaaaaaaaaaaaaaaaaaaaaaaaaaaaugcaucccccccccccccccccccccccccccccccaaaggcucuuuucagagccaccagaauu

SEQ ID NO: 3195 - RNA, 1855 nt, Artificial Sequence
  mRNA product Design i-2 comprising derived and/or modified sequence from LASV(Lassa virus/H.sapiens-wt/NGA/2016/ISTH_0017;Clade II)__AVO03567__GPC (opt4)
ggggcgcugccuacggagguggcagccaucuccuucucggcaucaagcuuaccaugggccagaucaucaccuucuuccaggaggugccccacgugaucgaggaggugaugaacaucgugcugaucgcccugagccugcuggccauccugaagggcaucuacaacguggccaccugcggccuguucggccuggugagcuuccugcugcugugcggcagaagcugcagcaccaccuacaagggcguguacgagcugcagacccuggagcuggacauggccagccugaacaugaccaugccccugagcugcaccaagaacaacagccaccacuacaucauggugggcaacgagaccggccuggagcugacccugaccaacaccagcaucaucaaccacaaguucugcaaccugagcgacgcccacaagaagaaccuguacgaccacgcccugaugagcaucaucagcaccuuccaccugagcauccccaacuucaaccaguacgaggccaugagcugcgacuucaacggcggcaagaucagcgugcaguacaaccugagccacaccuacgccaucgacgccgccaaccacugcggcaccaucgccaacggcgugcugcagaccuucaugagaauggccuggggcggcagcuacaucgcccuggacagcggcaagggcagcugggacugcaucaugaccagcuaccaguaccugaucauccagaacaccaccugggaggaccacugccaguucagcagacccagccccaucggcuaccugggccugcugagccagagaaccagagacaucuacaucagcagaagacugcugggcaccuucaccuggacccugagcgacagcgagggcaacgagacccccggcggcuacugccugaccagauggaugcugaucgaggccgagcugaagugcuucggcaacaccgccguggccaagugcaacgagaagcacgacgaggaguucugcgacaugcugagacuguucgacuucaacaagcaggccaucagaagacugaagaccgaggcccagaugagcauccagcugaucaacaaggccgugaacgcccugaucaacgaccagcugaucaugaagaaccaccugagagacaucaugggcauccccuacugcaacuacagcaaguacugguaccugaaccacaccgugaccggcaagaccagccugcccagaugcuggcuggugagcaacggcagcuaccugaacgagacccacuucagcgacgacaucgagcagcaggccgacaacaugaucaccgagcugcugcagaaggaguacauggacagacagggcaagaccccccugggccugguggaccuguucguguucagcaccagcuucuaccugaucagcaucuuccugcaccuggugagaauccccacccacagacacgugaucggcaagcccugccccaagccccacagacugaaccacaugggcaucugcagcugcggccuguacaagcaccccggcgugcccgugaaguggaagagaugaggacuagugcaucacauuuaaaagcaucucagccuaccaugagaauaagagaaagaaaaugaagaucaauagcuuauucaucucuuuuucuuuuucguugguguaaagccaacacccugucuaaaaaacauaaauuucuuuaaucauuuugccucuuuucucugugcuucaauuaauaaaaaauggaaagaaccuagaucuaaaaaaaaaaaaaaaaaaaaaaaaaaaaaaaaaaaaaaaaaaaaaaaaaaaaaaaaaaaaaaaaugcaucccccccccccccccccccccccccccccccaaaggcucuuuucagagccaccagaauu

SEQ ID NO: 3196 - RNA, 1855 nt, Artificial Sequence
  mRNA product Design i-2 comprising derived and/or modified sequence from LASV(Lassa virus/H.sapiens-wt/NGA/2018/ISTH_0959;Clade II)__AVV65099__GPC (opt4)
ggggcgcugccuacggagguggcagccaucuccuucucggcaucaagcuuaccaugggccagaucaucaccuucuuccaggaggugccccacgugaucgaggaggugaugaacaucgugcugaucgcccugagccugcuggccauccugaagggcaucuacaacguggugaccugcggccuguucggccuggugagcuuccugcugcugugcggcagaagcugcagcaccaccuacaagggcguguacgagcugcagacccuggagcuggacauggccagccugaacaugaccaugccccugagcugcaccaagaacaacagccaccacuacaucauggugggcaacgagaccggccuggagcugacccugaccaacaccagcaucaucaaccacaaguucugcaaccugagcgacgcccacaagaagaaccuguacgaccacgcccugaugagcaucaucagcaccuuccaccugagcauccccaacuucaaccaguacgaggccaugagcugcgacuucaacggcggcaagaucagcgugcaguacaaccugagccacgccuacgccaucgacgccgccaaccacugcggcaccaucgccaacggcgugcugcagaccuucaugagaauggccuggggcggcagcuacaucgcccuggacagcggcaagggcagcugggacugcaucaugaccagcuaccaguaccugaucauccagaacaccaccugggaggaccacugccaguucagcagacccagccccaucggcuaccugggccugcugagccagagaaccagagacaucuacaucagcagaagacugcugggcaccuucaccuggacccugagcgacagcgagggcaacgagacccccggcggcuacugccugaccagauggaugcugaucgaggccgagcugaagugcuucggcaacaccgccguggccaagugcaacgagaagcacgacgaggaguucugcgacaugcugagacuguucgacuucaacaagcaggccaucagaagacugaagaccgaggcccagaugagcauccagcugaucaacaaggccgugaacgcccugaucaacgaccagcugaucaugaagaaccaccugagagacaucaugggcauccccuacugcaacuacagcaaguacugguaccugaaccacaccgugaccggcaagaccagccugcccagaugcuggcuggugagcaacggcagcuaccugaacgagacccacuucagcgacgacaucgagcagcaggccgacaacaugaucaccgagcugcugcagaaggaguacaucgacagacagggcaagaccccccugggccugguggaccuguucguguucagcaccagcuucuaccugaucagcaucuuccugcaccuggugaagauccccacccacagacacgugaucggcaagcccugccccaagccccacagacugaaccacaugggcaucugcagcugcggccuguacaagcaccccggcgugcccgugaaguggaagagaugaggacuagugcaucacauuuaaaagcaucucagccuaccaugagaauaagagaaagaaaaugaagaucaauagcuuauucaucucuuuuucuuuuucguugguguaaagccaacacccugucuaaaaaacauaaauuucuuuaaucauuuugccucuuuucucugugcuucaauuaauaaaaaauggaaagaaccuagaucuaaaaaaaaaaaaaaaaaaaaaaaaaaaaaaaaaaaaaaaaaaaaaaaaaaaaaaaaaaaaaaaaugcaucccccccccccccccccccccccccccccccaaaggcucuuuucagagccaccagaauu

SEQ ID NO: 3197 - RNA, 1855 nt, Artificial Sequence
  mRNA product Design i-2 comprising derived and/or modified sequence from LASV(LASV003-NIG-2008;Clade II)__AIT17580__GPC (opt4)
ggggcgcugccuacggagguggcagccaucuccuucucggcaucaagcuuaccaugggccagaucaucaccuucuuccaggaggugccccacgugaucgaggaggugaugaacaucgugcugaucgcccugagccugcuggccauccugaagggcaucuacaacguggccaccugcggccuguucggccuggugagcuuccugcugcugugcggcagaagcugcagcaccaccuacaagggcguguacgagcugcagacccuggagcuggacauggccagccugaacaugaccaugccccugagcugcaccaagaacaacagccaccacuacaucauggugggcaacgagaccggccuggagcugacccugaccaacaccagcaucaucaaccacaaguucugcaaccugagcgacgcccacaagaagaaccuguacgaccacgcccugaugagcaucaucagcaccuuccaccugagcauccccaacuucaaccaguacgaggccaugagcugcgacuucaacggcggcaagaucagcgugcaguacaaccugagccacaccuacgccguggacgccgccaaccacugcggcaccaucgccaacggcgugcugcagaccuucaugagaauggccuggggcggcagcuacaucgcccuggacagcggcaagggcagcugggacugcaucaugaccagcuaccaguaccugaucauccagaacaccaccugggaggaccacugccaguucagcagacccagccccaucggcuaccugggccugcugagccagagaaccagagacaucuacaucagcagaagacugcugggcaccuucaccuggacccugagcgacagcgagagcaacgagacccccggcggcuacugccugaccagauggaugcugaucgaggccgagcugaagugcuucggcaacaccgccguggccaagugcaacgagaagcacgacgaggaguucugcgacaugcugagacuguucgacuucaacaagcaggccaucagaagacugaaggccgaggcccagaugagcauccagcugaucaacaaggccgugaacgcccugaucaacgaccagcugaucaugaagaaccaccugagagacaucaugggcauccccuacugcaacuacagcaaguacugguaccugaaccacaccgugaccggcagaaccagccugcccagaugcuggcuggugagcaacggcagcuaccugaacgagacccacuucagcgacgacaucgagcagcaggccgacaacaugaucaccgagcugcugcagaaggaguacauggacagacagggcaagaccccccugggccugguggaccuguucguguucagcaccagcuucuaccugaucagcaucuuccugcaccuggugaagauccccacccacagacacgugaucggcaagcccugccccaagccccacagacugaaccacaugggcaucugcagcugcggccuguacaagcaccccggcgugcccgugaaguggaagagaugaggacuagugcaucacauuuaaaagcaucucagccuaccaugagaauaagagaaagaaaaugaagaucaauagcuuauucaucucuuuuucuuuuucguugguguaaagccaacacccugucuaaaaaacauaaauuucuuuaaucauuuugccucuuuucucugugcuucaauuaauaaaaaauggaaagaaccuagaucuaaaaaaaaaaaaaaaaaaaaaaaaaaaaaaaaaaaaaaaaaaaaaaaaaaaaaaaaaaaaaaaaugcaucccccccccccccccccccccccccccccccaaaggcucuuuucagagccaccagaauu

SEQ ID NO: 3198 - RNA, 1855 nt, Artificial Sequence
  mRNA product Design i-2 comprising derived and/or modified sequence from LASV(LASV035-NIG-2009;Clade II)__AIT17588__GPC (opt4)
ggggcgcugccuacggagguggcagccaucuccuucucggcaucaagcuuaccaugggccagaucaucaccuucuuccaggaggugccccacgugaucgaggaggugaugaacaucgugcugaucgcccugagccugcuggccauccugaagggcaucuacaacguggccaccugcggccuguucggccuggugagcuuccugcugcugugcggcagaagcugcagcaccaccuacaagggcguguacgagcugcagacccuggagcuggacauggccagccugaacaugaccaugccccugagcugcaccaagaacaacagccaccacuacaucauggugggcaacgagaccggccuggagcugacccugaccaacaccagcaucaucaaccacaaguucugcaaccugagcgacgcccacaagaagaaccuguacgaccacgcccugaugagcaucaucagcaccuuccaccugagcauccccaacuucaaccaguacgaggccaugagcugcgacuucaacggcggcaagaucagcgugcaguacaaccugagccacgccuacgccguggacgccgccaaccacugcggcaccaucgccaacggcgugcugcagaccuucaugagaauggccuggggcggcagcuacaucgcccuggacagcggcaagggcagcugggacugcaucaugaccagcuaccaguaccugaucauccagaacaccaccugggaggaccacugccaguucagcagacccagccccaucggcuaccugggccugcugagccagagaaccagagacaucuacaucagcagaagacugcugggcaccuucaccuggacccugagcgacagcgagggcaacgagacccccggcggcuacugccugaccagauggaugcugaucgaggccgagcugaagugcuucggcaacaccgccguggccaagugcaacgagaagcacgacgaggaguucugcgacaugcugagacuguucgacuucaacaagcaggccaucagaagacugaaggccgaggcccagaugagcauccagcugaucaacaaggccgugaacgcccugaucaacgaccagcugaucaugaagaaccaccugagagacaucaugggcauccccuacugcaacuacagcaaguacugguaccugaaccacaccgugaccggcaagaccagccugcccagaugcuggcuggugagcaacggcagcuaccugaacgagacccacuucagcgacgacaucgagcagcaggccgacaacaugaucaccgagcugcugcagaaggaguacaucgacagacagggcaagaccccccugggccugguggaccuguucguguucagcaccagcuucuaccugaucagcaucuuccugcaccuggugaagauccccacccacagacacgugaucggcaagcccugccccaagccccacagacugaaccacaugggcaucugcagcugcggccuguacaagcaccccggcgugcccgugaaguggaagagaugaggacuagugcaucacauuuaaaagcaucucagccuaccaugagaauaagagaaagaaaaugaagaucaauagcuuauucaucucuuuuucuuuuucguugguguaaagccaacacccugucuaaaaaacauaaauuucuuuaaucauuuugccucuuuucucugugcuucaauuaauaaaaaauggaaagaaccuagaucuaaaaaaaaaaaaaaaaaaaaaaaaaaaaaaaaaaaaaaaaaaaaaaaaaaaaaaaaaaaaaaaaugcaucccccccccccccccccccccccccccccccaaaggcucuuuucagagccaccagaauu

SEQ ID NO: 3199 - RNA, 1855 nt, Artificial Sequence
  mRNA product Design i-2 comprising derived and/or modified sequence from LASV(LASV1000-NIG-2009;Clade II)__AIT17782__GPC (opt4)
ggggcgcugccuacggagguggcagccaucuccuucucggcaucaagcuuaccaugggccagaucaucaccuucuuccaggaggugccccacgugaucgaggaggugaugaacaucgugcugaucgcccugagccugcuggccauccugaagggcaucuacaacguggccaccugcggccuguucggccuggugagcuuccugcugcugugcggcagaagcugcagcaccaccuacaagggcguguacgagcugcagacccuggagcuggacauggccagccugaacaugaccaugccccugagcugcaccaagaacaacagccaccacuacaucauggugggcaacgagaccggccuggagcugacccugaccaacaccagcaucaucaaccacaaguucugcaaccugagcgacgcccacaagaagaaccuguacgaccacgcccugaugagcaucaucagcaccuuccaccugagcauccccaacuucaaccaguacgaggccaugagcugcgacuucaacggcggcaagaucagcgugcaguacaaccugagccacaccuacgccguggacgccgccaaccacugcggcaccaucgccaacggcgugcugcagaccuucaugagaauggccuggggcggcagcuacaucgcccuggacagcggcaagggcagcugggacugcaucaugaccagcuaccaguaccugaucauccagaacaccaccugggaggaccacugccaguucagcagacccagccccaucggcuaccugggccugcugagccagagaaccagagacaucuacaucagcagaagacugcugggcaccuucaccuggacccugagcgacagcgagggcaacgagacccccggcggcuacugccugaccagauggaugcugaucgaggccgagcugaagugcuucggcaacaccgccguggccaagugcaacgagaagcacgacgaggaguucugcgacaugcugagacuguucgacuucaacaagcaggccaucaagagacugaagaccgaggcccagaugagcauccagcugaucaacaaggccgugaacgcccugaucaacgaccagcugaucaugaagaaccaccugagagacaucaugggcauccccuacugcaacuacagcaaguacugguaccugaaccacaccgugaccggcaagaccagccugcccagaugcuggcuggugagcaacggcagcuaccugaacgagacccacuucagcgacgacaucgagcagcaggccgacaacaugaucaccgagcugcugcagaaggaguacaucgacagacagggcaagaccccccugggccugguggaccuguucguguucagcaccagcuucuaccugaucagcaucuuccugcaccuggugaagauccccacccacagacacguggugggcaagcccugccccaagccccacagacugaaccacaugggcaucugcagcugcggccuguacaagcaccccggcgugcccgugaaguggaagagaugaggacuagugcaucacauuuaaaagcaucucagccuaccaugagaauaagagaaagaaaaugaagaucaauagcuuauucaucucuuuuucuuuuucguugguguaaagccaacacccugucuaaaaaacauaaauuucuuuaaucauuuugccucuuuucucugugcuucaauuaauaaaaaauggaaagaaccuagaucuaaaaaaaaaaaaaaaaaaaaaaaaaaaaaaaaaaaaaaaaaaaaaaaaaaaaaaaaaaaaaaaaugcaucccccccccccccccccccccccccccccccaaaggcucuuuucagagccaccagaauu

SEQ ID NO: 3200 - RNA, 1855 nt, Artificial Sequence
  mRNA product Design i-2 comprising derived and/or modified sequence from LASV(LASV221-NIG-2010;Clade II)__AIT17624__GPC (opt4)
ggggcgcugccuacggagguggcagccaucuccuucucggcaucaagcuuaccaugggccagaucaucaccuucuuccaggaggugccccacgugaucgaggaggugaugaacaucgugcugaucgcccugagccugcuggccauccugaagggcaucuacaacguggccaccugcggccuguucggccuggugagcuuccugcugcugugcggcagaagcugcagcaccaccuacaagggcguguacgagcugcagacccuggagcuggacauggccagccugaacaugaccaugccccugagcugcaccaagaacaacagccaccacuacaucauggugggcaacgagaccggccuggagcugacccugaccaacaccagcaucaucaaccacaaguucugcaaccugagcgacgcccacaagaagaaccuguacgaccacgcccugaugagcaucaucagcaccuuccaccugagcauccccaacuucaaccaguacgaggccaugagcugcgacuucaacggcggcaagaucagcgugcaguacaaccugagccacaccuacgccaucgacgccgccaaccacugcggcaccaucgccaacggcgugcugcagaccuucaugagaauggccuggggcggcagcuacaucgcccuggacagcggcaagggcagcugggacugcaucaugaccagcuaccaguaccugaucauccagaacaccaccugggaggaccacugccaguucagcagacccagccccaucggcuaccugggccugcugagccagagaaccagagacaucuacaucagcagaagacugcugggcaccuucaccuggacccugagcgacagcgagggcaacgagacccccggcggcuacugccugaccagauggaugcugaucgaggccgagcugaagugcuucggcaacaccgccguggccaagugcaacgagaagcacgacgaggaguucugcgacaugcugagacuguucgacuucaacaagcaggccaucagaagacugaagaccgaggcccagaugagcauccagcugaucaacaaggccgugaacgcccugaucaacgaccagcugaucaugaagaaccaccugagagacaucaugggcauccccuacugcaacuacagcaaguacugguaccugaaccacaccgugaccggcaagaccagccugcccagaugcuggcuggugagcaacggcagcuaccugaacgagacccacuucagcgacgacaucgagcagcaggccgacaacaugaucaccgagaugcugcagaaggaguacauggacagacagggcaagaccccccugggccugguggaccuguucguguucagcaccagcuucuaccugaucagcaucuuccugcaccuggugaagauccccacccacagacacgugaucggcaagcccugccccaagccccacagacugaaccacaugggcaucugcagcugcggccuguacaagcaccccggcgugcccgugaaguggaagagaugaggacuagugcaucacauuuaaaagcaucucagccuaccaugagaauaagagaaagaaaaugaagaucaauagcuuauucaucucuuuuucuuuuucguugguguaaagccaacacccugucuaaaaaacauaaauuucuuuaaucauuuugccucuuuucucugugcuucaauuaauaaaaaauggaaagaaccuagaucuaaaaaaaaaaaaaaaaaaaaaaaaaaaaaaaaaaaaaaaaaaaaaaaaaaaaaaaaaaaaaaaaugcaucccccccccccccccccccccccccccccccaaaggcucuuuucagagccaccagaauu

SEQ ID NO: 3201 - RNA, 1855 nt, Artificial Sequence
  mRNA product Design i-2 comprising derived and/or modified sequence from LASV(LASV237-NIG-2010;Clade II)__AIT17638__GPC (opt4)
ggggcgcugccuacggagguggcagccaucuccuucucggcaucaagcuuaccaugggccagaucaucaccuucuuccaggaggugccccacgugaucgaggaggugaugaacaucgugcugaucgcccugagccugcuggccauccugaagggcaucuacaacguggccaccugcggccuguucggccuggugagcuuccugcugcugugcggcagaagcugcagcaccaccuacaagggcguguacgagcugcagacccuggagcuggacauggccagccugaacaugaccaugccccugagcugcaccaagaacaacagccaccacuacaucauggugggcaacgagaccggccuggagcugacccugaccaacaccagcaucaucaaccacaaguucugcaaccugagcgacgcccacaagaaggaccuguacgaccacgcccugaugagcaucaucagcaccuuccaccugagcauccccaacuucaaccaguacgaggccaugagcugcgacuucaacggcggcaagaucagcgugcaguacaaccugagccacaccuacgccguggacgccgccaaccacugcggcaccaucgccaacggcgugcugcagaccuucaugagaauggccuggggcggcagcuacaucgcccuggacagcggcaagggcagcugggacugcaucaugaccagcuaccaguaccugaucauccagaacaccaccugggaggaccacugccaguucagcagacccagccccaucggcuaccugggccugcugagccagagaaccagagacaucuacaucagcagaagacugcugggcaccuucaccuggacccugagcgacagcgagggcaacgagacccccggcggcuacugccugaccagauggaugcugaucgaggccgagcugaagugcuucggcaacaccgccguggccaagugcaacgagaagcacgacgaggaguucugcgacaugcugagacuguucgacuucaacaagcaggccaucagaagacugaagaccgaggcccagaugagcauccagcugaucaacaaggccgugaacgcccugaucaacgaccagcugaucaugaagaaccaccugagagacaucaugggcauccccuacugcaacuacagcaaguacugguaccugaaccacaccgugaccggcaagaccagccugcccagaugcuggcuggugagcaacggcagcuaccugaacgagacccacuucagcgacgacaucgagcagcaggccgacaacaugaucaccgagcugcugcagaaggaguacauggacagacagggcaagaccccccugggccugguggaccuguucguguucagcaccagcuucuaccugaucagcaucuuccugcaccugaucaagauccccacccacagacacaucaccggcaagcccugccccaagccccacagacugaaccacaugggcaucugcagcugcggccuguacaagcaccccggcgugcccgugaaguggaagagaugaggacuagugcaucacauuuaaaagcaucucagccuaccaugagaauaagagaaagaaaaugaagaucaauagcuuauucaucucuuuuucuuuuucguugguguaaagccaacacccugucuaaaaaacauaaauuucuuuaaucauuuugccucuuuucucugugcuucaauuaauaaaaaauggaaagaaccuagaucuaaaaaaaaaaaaaaaaaaaaaaaaaaaaaaaaaaaaaaaaaaaaaaaaaaaaaaaaaaaaaaaaugcaucccccccccccccccccccccccccccccccaaaggcucuuuucagagccaccagaauu

SEQ ID NO: 3202 - RNA, 1855 nt, Artificial Sequence
  mRNA product Design i-2 comprising derived and/or modified sequence from LASV(LASV253-NIG-2011;Clade II)__AIT17670__GPC (opt4)
ggggcgcugccuacggagguggcagccaucuccuucucggcaucaagcuuaccaugggccagaucaucaccuucuuccaggaggugccccacgugaucgaggaggugaugaacaucgugcugaucgcccugagccugcuggccauccugaagggcaucuacaacguggccaccugcggccuguucggccuggugagcuuccugcugcugugcggcagaagcugcagcaccaccuacaagggcguguacgagcugcagacccuggagcuggacauggccagccugaacaugaccaugccccugagcugcaccaagaacaacagccaccacuacaucauggugggcaacgagaccggccuggagcugacccugaccaacaccagcaucaucaaccacaaguucugcaaccugagcgacgcccacaagaagaaccuguacgaccacgcccugaugagcaucaucagcaccuuccaccugagcauccccaacuucaaccaguacgaggccaugagcugcgacuucaacggcggcaagaucagcgugcaguacaaccugagccacaccuacgccguggacgccgccaaccacugcggcaccaucgccaacggcgugcugcagaccuucaugagaauggccuggggcggcagcuacaucgcccuggacagcggcaagggcagcugggacugcaucaugaccagcuaccaguaccugaucauccagaacaccaccugggaggaccacugccaguucagcagacccagccccaucggcuaccugggccugcugagccagagaaccagagacaucuacaucagcagaagacugcugggcaccuucaccuggacccugagcgacagcgagggcaacgagacccccggcggcuacugccugaccagauggaugcugaucgaggccgagcugaagugcuucggcaacaccgccguggccaagugcaacgagaagcacgacgaggaguucugcgacaugcugagacuguucgacuucaacaagcaggccaucagaagacugaaggccgaggcccagaugagcauccagcugaucaacaaggccgugaacgcccugaucaacgaccagcugaucaugaagaaccaccugagagacaucaugggcauccccuacugcaacuacagcaaguacugguaccugaaccacaccgugaccggcagaaccagccugcccagaugcuggcuggugagcaacggcagcuaccugaacgagacccacuucagcgacgacaucgagcagcaggccgacaacaugaucaccgagcugcugcagaaggaguacaucgacagacagggcaagaccccccugggccugguggaccuguucguguucagcaccagcuucuaccugaucagcaucuuccugcaccuggugaagauccccacccacagacacaucaucggcaagcccugccccaagccccacagacugaaccacaugggcaucugcagcugcggccuguacaagcaccccggcgugcccgugaaguggaagagaugaggacuagugcaucacauuuaaaagcaucucagccuaccaugagaauaagagaaagaaaaugaagaucaauagcuuauucaucucuuuuucuuuuucguugguguaaagccaacacccugucuaaaaaacauaaauuucuuuaaucauuuugccucuuuucucugugcuucaauuaauaaaaaauggaaagaaccuagaucuaaaaaaaaaaaaaaaaaaaaaaaaaaaaaaaaaaaaaaaaaaaaaaaaaaaaaaaaaaaaaaaaugcaucccccccccccccccccccccccccccccccaaaggcucuuuucagagccaccagaauu

SEQ ID NO: 3203 - RNA, 1855 nt, Artificial Sequence
  mRNA product Design i-2 comprising derived and/or modified sequence from LASV(LASV254-NIG-2011;Clade II)__AIT17674__GPC (opt4)
ggggcgcugccuacggagguggcagccaucuccuucucggcaucaagcuuaccaugggccagaucaucaccuucuuccaggaggugccccacgugaucgaggaggugaugaacaucgugcugaucgcccugagccugcuggccauccugaagggcaucuacaacguggccaccugcggccuguucggccuggugagcuuccugcugcugugcggcagaagcugcagcaccaccuacaagggcguguacgagcugcagacccuggagcuggacaugaccaaccugaacaugaccaugccccugagcugcaccaagaacaacagccaccacuacaucauggugggcaacgagaccggccuggagcugacccugaccaacaccagcaucaucaaccacaaguucugcaaccugagcgacgcccacaagaagaaccuguacaaccacgcccugaugagcaucaucagcaccuuccaccugagcauccccaacuucaaccaguacgaggccaugagcugcgacuucaacggcggcaagaucagcgugcaguacaaccugagccacagcuacgccguggacgccgccaaccacugcggcaccaucgccaacggcgugcugcagaccuucaugagaauggccuggggcggcagcuacaucgcccuggacagcggcaagggcaacugggacugcaucaugaccagcuaccaguaccugaucauccagaacaccaccugggaggaccacugccaguucagcagacccagccccaucggcuaccugggccugcugagccagagaaccagagacaucuacaucagcagaagacugcugggcaccuucaccuggacccugagcgacagcgagggcaacgagacccccggcggcuacugccugaccagauggaugcugaucgaggccgagcugaagugcuucggcaacaccgccguggccaagugcaacgagaagcacgacgaggaguucugcgacaugcugagacuguucgacuucaacaagcaggccaucagaagacugaagaccgaggcccaggccaacauccagcugaucaacaaggccgugaacgcccugaucaacgaccagcugaucaugaagaaccaccugagagacaucaugggcauccccuacugcaacuacagcaaguacugguaccugaaccacaccgugaccggcaagaccagccugcccagaugcuggcuggugagcaacggcagcuaccugaacgagacccacuucagcgacgacaucgagcagcaggccgacaacaugaucaccgagcugcugcagaaggaguacauggacagacagggcaagaccccccugggccugguggaccuguucguguucagcaccagcuucuaccugaucagcaucuuccugcaccuggugaagauccccacccacagacacgugaucggcaagcccugccccaagccccacagacugaaccacaugggcaucugcagcugcggccuguacaagcaccccggcgugcccgugaaguggaagagaugaggacuagugcaucacauuuaaaagcaucucagccuaccaugagaauaagagaaagaaaaugaagaucaauagcuuauucaucucuuuuucuuuuucguugguguaaagccaacacccugucuaaaaaacauaaauuucuuuaaucauuuugccucuuuucucugugcuucaauuaauaaaaaauggaaagaaccuagaucuaaaaaaaaaaaaaaaaaaaaaaaaaaaaaaaaaaaaaaaaaaaaaaaaaaaaaaaaaaaaaaaaugcaucccccccccccccccccccccccccccccccaaaggcucuuuucagagccaccagaauu

SEQ ID NO: 3204 - RNA, 1855 nt, Artificial Sequence
  mRNA product Design i-2 comprising derived and/or modified sequence from LASV(Nig08-A19;Clade III)__ADU56618__GPC (opt4)
ggggcgcugccuacggagguggcagccaucuccuucucggcaucaagcuuaccaugggccagaucgugaccuucuuccaggaggugccccacgugaucgaggaggugaugaacaucgugcugaucgcccugagcauccuggccauccugaagggccuguacaacaucgccaccugcggccugaucggccuggugaccuuccugcugcugagcggcagaagcugcagcaugaccuacaagggcguguacgagcugcagacccuggagcugaacaugaacacccugaacaugaccaugccccugagcugcaccaagaacaacagccaccacuacaucauggugggcaacgagaccggccuggagcugacccugaccaacaccagccugcugcaccacaaguucugcaaccugagcgacgcccacaagaagaaccuguacgaccacacccugaugagcaucaucagcaccuuccaccugagcauccccaacuucaaccaguacgaggccaugagcugcgacuucaacggcggcaagaucaccgugcaguacaaccugagccacagcuacgccaucgacgccgccaaccacugcggcaccguggccaacggcgugcugcagaccuucaugagaauggccuggggcggcagcuacaucgcccuggacagcggcagaggcaagugggacugcaucaugaccagcuaccaguaccugaucauccagaacaccaccugggaggaccacugccaguucagcagacccagccccaucggcuaccugggccugcugagccagagaaccagagacaucuacaucagcagaagacugcugggcaccuucaccuggacccugagcgacagcgagggcaacgagacccccggcggcuacugccugaccagauggaugcugaucgaggccgagcugaagugcuucggcaacaccgccguggccaagugcaacgagaagcacgacgaggaguucugcgacaugcugagacuguucgacuucaacaagcaggccaucagaagacugaaggccgaggcccagaugagcauccagcugaucaacaaggccgugaacgcccugaucaacgaccagcugaucaugaagaaccaccugagagacaucaugggcauccccuacugcaacuacagcaaguacugguaccugaaccacaccagcaccggcagaaccagccugcccagaugcuggcuggugagcaacggcagcuaccugaacgagacccacuucagcgacgacaucgagcagcaggccgacaacaugaucaccgagaugcugcagaaggaguaccuggacagacagggcaagaccccccugggccugguggaccuguucguguucagcaccagcuucuaccugaucagcaucuuccugcaccuggugaagauccccacccacagacacaucgugggcaagcccugccccaagccccacagacugaaccacaugggcaucugcagcugcggccuguacaagcagcccggcgugcccgugagauggaagagaugaggacuagugcaucacauuuaaaagcaucucagccuaccaugagaauaagagaaagaaaaugaagaucaauagcuuauucaucucuuuuucuuuuucguugguguaaagccaacacccugucuaaaaaacauaaauuucuuuaaucauuuugccucuuuucucugugcuucaauuaauaaaaaauggaaagaaccuagaucuaaaaaaaaaaaaaaaaaaaaaaaaaaaaaaaaaaaaaaaaaaaaaaaaaaaaaaaaaaaaaaaaugcaucccccccccccccccccccccccccccccccaaaggcucuuuucagagccaccagaauu

SEQ ID NO: 3205 - RNA, 1858 nt, Artificial Sequence
  mRNA product Design i-2 comprising derived and/or modified sequence from LASV(G1180-SLE-2010;Clade IV)__AIT17168__GPC (opt4)
ggggcgcugccuacggagguggcagccaucuccuucucggcaucaagcuuaccaugggccagaucgugaccuucuuccaggaggugccccacgugaucgaggaggugaugaacaucgugcugaucgcccugagcauccuggccgugcugaagggccuguacaacuucgccaccugcggccuggugggccugcugaccuuccugcugcugugcggcagaagcugcaccgccagcagauacaagggcguguacgagcugcagacccuggagcugaacauggagacccugaacaugaccaugccccugagcugcaccaagaacaacagccaccacuacaucauggugggcaacgagaccggccuggagcugacccugaccaacaccagcaucaucaaccacaaguucugcaaccugagcgacgcccacaagaagaaccuguacgaccacgcccugaugagcaucaucagcaccuuccaccugagcauccccaacuucaaccaguacgaggccaugagcugcgacuucaacggcggcaagaucagcgugcaguacaaccugagccacagcuacgccggcgacgccgccaaccacugcggcaccguggccaacggcgugcugcagaccuucaugagaauggccuggggcggcagcuacaucgcccuggacagcggccacggcagcugggacugcaucaugaccagcuaccaguaccugaucauccagaacaccaccugggaggaccacugccaguucagcagacccagccccaucggcuaccugggccugcugagccagagaaccagagacaucuacaucagcagaagacugcugggcaccuucaccuggacccugagcgacagcgagggcaaggacacccccggcggcuacugccugaccagauggaugcugaucgaggccgagcugaagugcuucggcaacaccgccguggccaagugcaacgagaagcacgacgaggaguucugcgacaugcugagacuguucgacuucaacaagcaggccauccagagacugaaggccgaggcccagaugagcauccagcugaucaacaaggccgugaacgcccugaucaacgaccagcugaucaugaagaaccaccugagagacaucaugggcauccccuacugcaacuacagcaaguacugguaccugaaccacaccaccaccggcaagaccagccugcccaagugcuggcuggugagcaacggcagcuaccugaacgagacccacuucagcgacgacaucgagcagcaggccgacaacaugaucaccgagaugcugcagaaggaguacauggagagacagggcaagaccccccugggccugguggaccuguucguguucagcaccagcuucuaccugaucagcaucuuccugcaccuggugaagauccccacccacagacacaucgugggcaagagcugccccaagccccacagacugaaccacaugggcaucugcagcugcggccuguacaagcagcccggcgugcccgugaaguggaagagaugaggacuagugcaucacauuuaaaagcaucucagccuaccaugagaauaagagaaagaaaaugaagaucaauagcuuauucaucucuuuuucuuuuucguugguguaaagccaacacccugucuaaaaaacauaaauuucuuuaaucauuuugccucuuuucucugugcuucaauuaauaaaaaauggaaagaaccuagaucuaaaaaaaaaaaaaaaaaaaaaaaaaaaaaaaaaaaaaaaaaaaaaaaaaaaaaaaaaaaaaaaaugcaucccccccccccccccccccccccccccccccaaaggcucuuuucagagccaccagaauu

SEQ ID NO: 3206 - RNA, 1858 nt, Artificial Sequence
  mRNA product Design i-2 comprising derived and/or modified sequence from LASV(G1442-SLE-2011;Clade IV)__AIT17180__GPC (opt4)
ggggcgcugccuacggagguggcagccaucuccuucucggcaucaagcuuaccaugggccagaucgugaccuucuuccaggaggugccccacgugaucgaggaggugaugaacaucgugcugaucgcccugagcauccuggccgugcugaagggccuguacaacguggccaccugcggccugaucggccuggugaccuuccugcugcugugcggcagaagcugcaccaccacccuguacaagggcguguacgagcugcagacccuggagcugaacauggagacccugaacaugaccaugccccugagcugcaccaagaacaacagccaccacuacaucagagugggcaacgagaccggccuggagcugacccugaccaacaccagcaucaucaaccacaaguucugcaaccugagcgacgcccacaagaagaaccuguacgaccacgcccugaugagcaucaucagcaccuuccaccugagcauccccaacuucaaccaguacgaggccaugagcugcgacuucaacggcggcaagaucagcgugcaguacaaccugagccacagcuacgccggcgacgccgccaaccacugcggcaccguggccaacggcgugcugcagaccuucaugagaauggccuggggcggcagcuacaucgcccuggacagcggcagaggcaacugggacugcaucaugaccagcuaccaguaccugaucauccagaacaccaccugggacgaccacugccaguucagcagacccagccccaucggcuaccugggccugcugagccagagaaccagagacguguacaucagcagaagacugcugggcaccuucaccuggacccugagcgacagcgagggcaaggacacccccggcggcuacugccugaccagauggaugcugaucgaggccgagcugaagugcuucggcaacaccgccguggccaagugcaacgagaagcacgacgaggaguucugcgacaugcugagacuguucgacuucaacaagcaggccauccagagacugaaggccgaggcccagaugagcauccagcugaucaacaaggccgugaacgcccugaucaacgaccagcugaucaugaagaaccaccugagagacaucaugggcauccccuacugcaacuacagcaaguacugguaccugaacaacaccgccaccggcaagaccagccugcccaagugcuggcugaucagcaacggcagcuaccugaacgagacccacuucagcgacgacaucgagcaggaggccgacaacaugaucaccgagaugcugcagaaggaguacauggagagacagggcaagaccccccugggccugguggaccuguucguguucagcaccagcuucuaccugaucagcaucuuccugcaccuggugaagauccccacccacagacacaucgugggcaagagcugccccaagccccacagacugaaccacaugggcaucugcagcugcggccuguacaagcagcccggcgugcccgugagauggaagagaugaggacuagugcaucacauuuaaaagcaucucagccuaccaugagaauaagagaaagaaaaugaagaucaauagcuuauucaucucuuuuucuuuuucguugguguaaagccaacacccugucuaaaaaacauaaauuucuuuaaucauuuugccucuuuucucugugcuucaauuaauaaaaaauggaaagaaccuagaucuaaaaaaaaaaaaaaaaaaaaaaaaaaaaaaaaaaaaaaaaaaaaaaaaaaaaaaaaaaaaaaaaugcaucccccccccccccccccccccccccccccccaaaggcucuuuucagagccaccagaauu

SEQ ID NO: 3207 - RNA, 1858 nt, Artificial Sequence
  mRNA product Design i-2 comprising derived and/or modified sequence from LASV(G3010-SLE-2013;Clade IV)__AIT17344__GPC (opt4)
ggggcgcugccuacggagguggcagccaucuccuucucggcaucaagcuuaccaugggccagaucgugaccuucuuccaggaggugccccacgugaucgaggaggugaugaacaucgugcugaucgcccugagcauccuggccgugcugaagggccuguacaacuucgccaccugcggccuggugggccuggugaccuuccugcugcugugcggcagaagcugcaccaccagccuguacaagggcguguacgagcugcagacccuggagcugaacauggagacccugaacaugaccaugccccugagcugcaccaagaacaacagccaccacuacaucauggugggcaacgagaccggccuggagcugacccugaccaacaccagcaucaucaaccacaaguucugcaaccugagcgacgcccacaagaagaaccuguacaaccacgcccugaugagcaucaucagcaccuuccaccugagcauccccaacuucaaccaguacgaggccaugagcugcgacuucaacggcggcaagaucagcgugcaguacaaccugagccacagcuacgccggcgacgccgccagccacugcggcaccguggccaacggcgugcugcagaccuucaugagaauggccuggggcggcagcuacaucgcccuggacagcggcuacggcaagugggacugcaucaugaccagcuaccaguaccugaucauccagaacaccaccugggaggaccacugccaguucagcagacccagccccaucggcuaccugggccugcugagccagagaaccagagacaucuacaucagcagaagacugcugggcaccuucaccuggacccugagcgacagcgagggcaaggacacccccggcggcuacugccugaccagauggaugcugaucgaggccgagcugaagugcuucggcaacaccgccguggccaagugcaacgagaagcacgacgaggaguucugcgacaugcugagacuguucgacuucaacaagcaggccauccagagacugaagaccgaggcccagaugagcauccagcugaucaacaaggccgugaacgcccugaucaacgaccagcugaucaugaagaaccaccugagagacaucaugggcauccccuacugcaacuacagcaaguacugguaccugaaccacaccaccaccggcaagaccagccugcccaagugcuggcuggugagcaacggcagcuaccugaacgagacccacuucagcgacgacaucgagcagcaggccgacaacaugaucaccgagaugcugcagaaggaguacauggagagacagggcaagaccccccugggccugguggaccuguucguguucagcaccagcuucuaccugaucagcaucuuccugcaccuggugaagauccccacccacagacacaucgugggcaagagcugccccaagccccacagacugaaccacaugggcaucugcagcugcggccuguacaagcagcccggcgugcccgugagauggaagagaugaggacuagugcaucacauuuaaaagcaucucagccuaccaugagaauaagagaaagaaaaugaagaucaauagcuuauucaucucuuuuucuuuuucguugguguaaagccaacacccugucuaaaaaacauaaauuucuuuaaucauuuugccucuuuucucugugcuucaauuaauaaaaaauggaaagaaccuagaucuaaaaaaaaaaaaaaaaaaaaaaaaaaaaaaaaaaaaaaaaaaaaaaaaaaaaaaaaaaaaaaaaugcaucccccccccccccccccccccccccccccccaaaggcucuuuucagagccaccagaauu

SEQ ID NO: 3208 - RNA, 1858 nt, Artificial Sequence
  mRNA product Design i-2 comprising derived and/or modified sequence from LASV(G502-SLE-2009;Clade IV)__AIT17126__GPC (opt4)
ggggcgcugccuacggagguggcagccaucuccuucucggcaucaagcuuaccaugggccagaucgugaccuucuuccaggaggugccccacgugaucgaggaggugaugaacaucgugcugaucgcccugagcauccuggccgugcugaagggccuguacaacuucgccaccugcggccuggugggccugcugaccuuccugcugcugugcggcagaagcugcaccaccggccuguacaagggcguguacgagcugcagacccuggagcugaacauggagacccugaacaugaccaugccccugagcugcaccaagaacaacagccaccacuacaucauggugggcaacgagaccggccuggagcugacccugaccaacaccagcaucaucaaccacaaguucugcaaccugagcgacgcccacaagaagaaccuguacgaccacgcccugaugagcaucaucagcaccuuccaccugagcauccccaacuucaaccaguacgaggccaugagcugcgacuucaacggcggcaagaucagcgugcaguacaaccugagccacagcuacgccggcgacgccgccgaccacugcggcaccguggccaacggcgugcugcagaccuucaugagaauggccuggggcggcagcuacaucgcccuggacagcggcagaggcagaugggacugcaucaugaccagcuaccaguaccugaucauccagaacaccaccugggaggaccacugccaguucagcagacccagccccaucggcuaccugggccugcugagccagagaaccagagacaucuacaucagcagaagacugcugggcaccuucaccuggacccugagcgacagcgagggcaaggacacccccggcggcuacugccugaccagauggaugcugaucgaggccgagcugaagugcuucggcaacaccgccguggccaagugcaacgagaagcacgacgaggaguucugcgacaugcugagacuguucgacuucaacaagcaggccauccagagacugaaggccgaggcccagaugagcauccagcugaucaacaaggccgugaacgcccugaucaacgaccagcuggugaugaagaaccaccugagagacaucaugggcauccccuacugcaacuacagcagauacugguaccugaaccacaccaccaccggcagaaccagccugcccaagugcuggcuggugagcaacggcagcuaccugaacgagacccacuucagcgacgacaucgagcagcaggccgacaacaugaucaccgagaugcugcagaaggaguacauggagagacagggcaagaccccccugggccugguggaccuguucguguucagcaccagcuucuaccugaucagcaucuuccugcaccuggugaagauccccacccacagacacaucgugggcaagagcugccccaagccccacagacugaaccacaugggcaucugcagcugcggccuguacaagcagcccggcgugcccgugaaguggaagagaugaggacuagugcaucacauuuaaaagcaucucagccuaccaugagaauaagagaaagaaaaugaagaucaauagcuuauucaucucuuuuucuuuuucguugguguaaagccaacacccugucuaaaaaacauaaauuucuuuaaucauuuugccucuuuucucugugcuucaauuaauaaaaaauggaaagaaccuagaucuaaaaaaaaaaaaaaaaaaaaaaaaaaaaaaaaaaaaaaaaaaaaaaaaaaaaaaaaaaaaaaaaugcaucccccccccccccccccccccccccccccccaaaggcucuuuucagagccaccagaauu

SEQ ID NO: 3209 - RNA, 1858 nt, Artificial Sequence
  mRNA product Design i-2 comprising derived and/or modified sequence from LASV(G733-SLE-2010;Clade IV)__AIT17154__GPC (opt4)
ggggcgcugccuacggagguggcagccaucuccuucucggcaucaagcuuaccaugggccagaucgugaccuucuuccaggaggugccccacgugaucgaggaggugaugaacaucgugcugaucgcccugagcauccuggccgugcugaagggccuguacaacuucgccaccugcggcaucgugggccuggugagcuuccugcugcugugcggcagaagcugcaccaccagccuguacaagggcguguacgagcugcagacccuggagcugaacauggagacccugaacaugaccaugccccugagcugcaccaagaacaacagccaccacuacaucauggugggcaacgagaccggccuggagcugacccugaccaacaccagcaucaucaaccacaaguucugcaaccugagcgacgcccacaagaagaaccuguacgaccacgcccugaugagcaucaucagcaccuuccaccugagcauccccaacuucaaccaguacgaggccaugagcugcgacuucaacggcggcaagaucagcgugcaguacaaccugagccacagcuacgccggcgacgccgccaaccacugcggcaccaucgccaacggcgugcugcagaccuucaugagaauggccuggggcggcagcuacaucgcccuggacagcggcagagacagaugggacugcaucaugaccagcuaccaguaccugaucauccagaacaccaccugggaggaccacugccaguucagcagacccagccccaucggcuaccugggccugcugagccagagaaccagagacaucuacaucagcagaagacugcugggcaccuucaccuggacccugagcgacagcgagggcaaggacacccccggcggcuacugccugaccagauggaugcugaucgaggccgagcugaagugcuucggcaacaccgccguggccaagugcaacgagaagcacgacgaggaguucugcgacaugcugagacuguucgacuucaacaagcaggccauccagagacugaaggccgaggcccagaugagcauccagcugaucaacaaggccgugaacgcccugaucaacgaccagcugaucaugaagaaccaccugagagacaucaugggcauccccuacugcaacuacagcaaguacugguaccugaaccacaccaccaccggcaagaccagccugcccaagugcuggcuggugagcaacggcagcuaccugaacgagacccacuucagcgacgacaucgagcagcaggccgacaacaugaucaccgagaugcugcagaaggaguacauggagagacagggcaagaccccccugggccugguggaccuguucguguucagcaccagcuucuaccugaucagcaucuuccugcaccuggugaagauccccacccacagacacguggugggcaagagcugccccaagccccacagacugaaccacaugggcaucugcagcugcggccuguacggccagcccggcgugcccgugaaguggaagagaugaggacuagugcaucacauuuaaaagcaucucagccuaccaugagaauaagagaaagaaaaugaagaucaauagcuuauucaucucuuuuucuuuuucguugguguaaagccaacacccugucuaaaaaacauaaauuucuuuaaucauuuugccucuuuucucugugcuucaauuaauaaaaaauggaaagaaccuagaucuaaaaaaaaaaaaaaaaaaaaaaaaaaaaaaaaaaaaaaaaaaaaaaaaaaaaaaaaaaaaaaaaugcaucccccccccccccccccccccccccccccccaaaggcucuuuucagagccaccagaauu

SEQ ID NO: 3210 - RNA, 1858 nt, Artificial Sequence
  mRNA product Design i-2 comprising derived and/or modified sequence from MOPV/LASV reassortant(IGS-1;Clade IV)__AFY05576__GPC (opt4)
ggggcgcugccuacggagguggcagccaucuccuucucggcaucaagcuuaccaugggccagaucgugaccuucuuccaggaggugccccacgugaucgaggaggugaugaacaucgugcugaucgcccugagcgugcuggccgugcugaagggccuguacaacuucgccaccugcggccuggugggccuggugaccuuccugcugcugugcggcagaagcugcaccaccagccuguacaagggcguguacgagcugcagacccuggagcugaacauggagacccugaacaugaccaugccccugagcugcaccaagaacaacagccaccacuacaucauggugggcaacgagaccggccuggagcugacccugaccaacaccagcaucaucaaccacaaguucugcaaccugagcgacgcccacaagaagaaccuguacgaccacgcccugaugagcaucaucagcaccuuccaccugagcauccccaacuucaaccaguacgaggccaugagcugcgacuucaacggcggcaagaucagcgugcaguacaaccugagccacagcuacgccggcgacgccgccaaccacugcggcaccguggccaacggcgugcugcagaccuucaugagaauggccuggggcggcagcuacaucgcccuggacagcggcagaggcaacugggacugcaucaugaccagcuaccaguaccugaucauccagaacaccaccugggaggaccacugccaguucagcagacccagccccaucggcuaccugggccugcugagccagagaaccagagacaucuacaucagcagaagacugcugggcaccuucaccuggacccugagcgacagcgagggcgaggacacccccggcggcuacugccugaccagauggaugcugaucgaggccgagcugaagugcuucggcaacaccgccguggccaagugcaacgagaagcacgacgaggaguucugcgacaugcugagacuguucgacuucaacaagcaggccauccagagacugaaggccgaggcccagaugagcauccagcugaucaacaaggccgugaacgcccugaucaacgaccagcugaucaugaagaaccaccugagagacaucaugggcauccccuacugcaacuacagcaaguacugguaccugaaccacaccaccaccggcagaaccagccugcccaagugcuggcuggugagcaacggcagcuaccugaacgagacccacuucagcgacgacaucgagcagcaggccgacaacaugaucaccgagaugcugcagaaggaguacauggagagacagggcaagaccccccugggccugguggaccuguucguguucagcaccagcuucuaccugaucagcaucuuccugcaccuggugaagauccccacccacagacacaucgugggcaagagcugccccaagccccacagacugaaccacaugggcaucugcagcugcggccuguacaagcagcccggcgugcccgugaaguggaagagaugaggacuagugcaucacauuuaaaagcaucucagccuaccaugagaauaagagaaagaaaaugaagaucaauagcuuauucaucucuuuuucuuuuucguugguguaaagccaacacccugucuaaaaaacauaaauuucuuuaaucauuuugccucuuuucucugugcuucaauuaauaaaaaauggaaagaaccuagaucuaaaaaaaaaaaaaaaaaaaaaaaaaaaaaaaaaaaaaaaaaaaaaaaaaaaaaaaaaaaaaaaaugcaucccccccccccccccccccccccccccccccaaaggcucuuuucagagccaccagaauu

SEQ ID NO: 3211 - RNA, 1858 nt, Artificial Sequence
  mRNA product Design i-2 comprising derived and/or modified sequence from LASV(LM765-SLE-2012;Clade IV)__AIT17814__GPC (opt4)
ggggcgcugccuacggagguggcagccaucuccuucucggcaucaagcuuaccaugggccagaucgugaccuucuuccaggaggugccccacgugaucgaggaggugaugaacaucgugcugaucgcccugagcauccuggccgugcugaagggccuguacaacuucgccaccugcggccuggugggccuggugaccuuccugcugcugugcggcagaagcugcaccaccagccuguacaagggcguguacgagcugcagacccuggagcugaacauggagacccugaacaugaccaugccccugagcugcaccaagaacaacagccaccacuacaucauggugggcaacgagaccggccuggagcugacccugaccaacaccagcaucaucgaccacaaguucugcaaccugagcgacgcccacagaaagaaccuguacgaccacgcccugaugagcaucaucagcaccuuccaccugagcauccccaacuucaaccaguacgaggccaugagcugcgacuucaacggcggcaagaucagcgugcaguacaaccugagccacagcuacgccaaggacgccgccgaccacugcggcaccguggccaacggcgugcugcagaccuucaugagaauggccuggggcggcagcuacaucgcccuggacagcggcagaggcagaugggacugcaucaugaccagcuaccaguaccugaucauccagaacaccaccugggaggaccacugccaguucagcagacccagccccaucggcuaccugggccugcugagccagagaaccagagacaucuacaucagcagaagacugcugggcaccuucaccuggacccugagcgacagcgagggcaaggacacccccggcggcuacugccugaccagauggaugcugaucgaggccgagcugaagugcuucggcaacaccgccguggccaagugcaacgagaagcacgacgaggaguucugcgacaugcugagacuguucgacuucaacaagcaggccauccagagacugaaggccgaggcccagaugagcauccagcugaucaacaaggccgugaacgcccugaucaacgaccagcugaucaugaagaaccaccugagagacaucaugggcauccccuacugcaacuacagcaaguacugguaccugaaccacaccaccaccggcaagaccagccugcccaagugcuggcuggugagcaacggcagcuaccugaacgagacccacuucagcgacgacaucgagcagcaggccgacaacaugaucaccgagaugcugcagaaggaguacauggagagacagggcaagaccccccugggccugguggaccuguucguguucagcaccagcuucuaccugaucagcaucuuccugcaccuggugaagauccccacccacagacacaucgugggcaagcccugccccaagccccacagacugaaccacaugggcaucugcagcugcggccuguacaagcagcccggcgugcccgugaaguggaagagaugaggacuagugcaucacauuuaaaagcaucucagccuaccaugagaauaagagaaagaaaaugaagaucaauagcuuauucaucucuuuuucuuuuucguugguguaaagccaacacccugucuaaaaaacauaaauuucuuuaaucauuuugccucuuuucucugugcuucaauuaauaaaaaauggaaagaaccuagaucuaaaaaaaaaaaaaaaaaaaaaaaaaaaaaaaaaaaaaaaaaaaaaaaaaaaaaaaaaaaaaaaaugcaucccccccccccccccccccccccccccccccaaaggcucuuuucagagccaccagaauu

SEQ ID NO: 3212 - RNA, 1858 nt, Artificial Sequence
  mRNA product Design i-2 comprising derived and/or modified sequence from LASV(LM776-SLE-2012;Clade IV)__AIT17824__GPC (opt4)
ggggcgcugccuacggagguggcagccaucuccuucucggcaucaagcuuaccaugggccagaucgugaccuucuuccaggaggugccccacgugaucgaggaggugaugaacaucgugcugaucgcccugagcauccuggccgugcugaagggccuguacaacuucgccaccugcggccuggugggccuggugaccuuccugcugcugugcggcagaagcugcaccaccagcguguacaagggcguguacgagcugcagacccuggagcugaacauggagacccugaacaugaccaugccccugagcugcaccaagaacaacagccaccacuacaucauggugggcaacgagaccggccuggagcugacccugaccaacaccagcaucaucaaccacaaguucugcaaccugagcgacgcccacaagaagaaccuguacgaccacgcccugaugagcaucaucagcaccuuccaccugagcauccccaacuucaaccaguacgaggccaugagcugcgacuucaacggcggcaagaucagcgugcaguacaaccugagccacagcuacgccggcgacgccgccaaccacugcggcaccguggccaacggcgugcugcagaccuucaugagaauggccuggggcggcagcuacaucgcccuggacagcggccacggcaagugggacugcaucaugaccagcuaccaguaccugaucauccagaacaccaccugggaggaccacugccaguucagcagacccagccccaucggcuaccugggccugcugagccagagaaccagagacaucuacaucagcagaagacugcugggcaccuucaccuggacccugagcgacagcgagggcaaggacacccccggcggcuacugccugaccagauggaugcugaucgaggccgagcugaagugcuucggcaacaccgccguggccaagugcaacgagaagcacgacgaggaguucugcgacaugcugagacuguucgacuucaacaagcaggccauccagagacugaaggccgaggcccagaugagcauccagcugaucaacaaggccgugaacgcccugaucaacgaccagcugaucaugaagaaccaccugagagacaucaugggcauccccuacugcaacuacagcaaguacugguaccugaaccacaccaccaccggcaagaccagccugcccaagugcuggcuggugagcaacggcagcuaccugaacgagacccacuucagcgacgacaucgagcagcaggccgacaacaugaucaccgagaugcugcagaaggaguacauggagagacagggcaagaccccccugggccugguggaccuguucguguucagcaccagcuucuaccugaucagcaucuuccugcaccuggugaagauccccacccacagacacaucgugggcaagagcugccccaagccccacagacugaaccacaugggcaucugcagcugcggccuguacaagcagcccggcgugcccgugagauggaagagaugaggacuagugcaucacauuuaaaagcaucucagccuaccaugagaauaagagaaagaaaaugaagaucaauagcuuauucaucucuuuuucuuuuucguugguguaaagccaacacccugucuaaaaaacauaaauuucuuuaaucauuuugccucuuuucucugugcuucaauuaauaaaaaauggaaagaaccuagaucuaaaaaaaaaaaaaaaaaaaaaaaaaaaaaaaaaaaaaaaaaaaaaaaaaaaaaaaaaaaaaaaaugcaucccccccccccccccccccccccccccccccaaaggcucuuuucagagccaccagaauu

SEQ ID NO: 3213 - RNA, 1858 nt, Artificial Sequence
  mRNA product Design i-2 comprising derived and/or modified sequence from LASV(Mad39;Clade IV)__ANH09722__GPC (opt4)
ggggcgcugccuacggagguggcagccaucuccuucucggcaucaagcuuaccaugggccagaucgugaccuucuuccaggaggugccccacgugaucgaggaggugaugaacaucgugcugaucgcccugagcauccuggccgugcugaagggccuguacaacguggccaccugcggccugaucggccuggugaccuuccugcugcugugcggcagaagcugcaccaccacccuguacaagggcguguacgagcugcaggcccuggagcugaacauggagacccugaacaugaccaugccccugagcugcaccaagaacaacagccaccacuacaucagagugggcaacgagaccggccuggagcugacccugaccaacaccagccugaucaaccacaaguucugcaaccugagcgacgcccacaagaagaaccuguacgaccacgcccugaugagcaucaucagcaccuuccaccugagcauccccaacuucaaccaguacgaggccaugagcugcgacuucaacgacggcaagaucagcgugcaguacaaccugagccacaccuacgccggcgacaccgccaaccacugcggcaccguggccaacggcgugcugcagaccuucaugagaauggccuggggcggcagcuacaucgcccuggacagcggcagaggcggcugggacugcaucaugaccagcuaccaguaccugaucauccagaacaccaccugggaggaccacugccaguucagcagacccagccccaucggcuaccugggccugcugagccagagaaccagagacaucuacaucagcagaagacugcugggcaccuucaccuggacccugagcgacagcgagggcaaggacacccccggcggcuacugccugaccagauggaugcugaucgaggccgagcugaagugcuucggcaacaccgccguggccaagugcaacgagaagcacgacgaggaguucugcgacaugcugagacuguucgacuucaacaagcaggccauccagagacugaaggccgaggcccagaugagcauccagcugaucaacaaggccgugaacgcccugaucaacgaccagcugaucaugaagaaccaccugagagacaucaugggcauccccuacugcaacuacagcaaguacugguaccugaaccacaccgugaccggcaagaccagccugcccaagugcuggcuggugagcaacggcagcuaccugaacgagacccacuucagcgacgacaucgagcagcaggccgacaacaugaucaccgagaugcugcagaaggaguacauggagagacagggcaagaccccccugggccugguggaccuguucguguucagcaccagcuucuaccugaucagcaucuuccugcaccuggugaagauccccacccacagacacguggugggcaagcccugccccaagccccacagacugaaccacaugggcaucugcagcugcggcuucuacaagcagcccggcgugcccgugagauggaagagaugaggacuagugcaucacauuuaaaagcaucucagccuaccaugagaauaagagaaagaaaaugaagaucaauagcuuauucaucucuuuuucuuuuucguugguguaaagccaacacccugucuaaaaaacauaaauuucuuuaaucauuuugccucuuuucucugugcuucaauuaauaaaaaauggaaagaaccuagaucuaaaaaaaaaaaaaaaaaaaaaaaaaaaaaaaaaaaaaaaaaaaaaaaaaaaaaaaaaaaaaaaaugcaucccccccccccccccccccccccccccccccaaaggcucuuuucagagccaccagaauu

SEQ ID NO: 3214 - RNA, 1858 nt, Artificial Sequence
  mRNA product Design i-2 comprising derived and/or modified sequence from LASV(Z0947-SLE-2011;Clade IV)__AIT17840__GPC (opt4)
ggggcgcugccuacggagguggcagccaucuccuucucggcaucaagcuuaccaugggccagaucgugaccuucuuccaggaggugccccacgugaucgaggaggugaugaacaucgugcugaucgcccugagcauccuggccgugcugaagggccuguacaacuucgccaccugcggccuggugggccuggugaccuuccugcugcugugcggcagaagcugcaccaucagccuguacaagggcguguacgagcugcagacccuggagcugaacauggagacccugaacaugaccaugccccugagcugcaccaagaacaacagccaccacuacaucauggugggcaacgagaccggccuggagcugacccugaccaacaccagcaucaucaaccacaaguucugcaaccugagcgacgcccacaagaagaaccuguacgaccacgcccugaugagcaucaucagcaccuuccaccugagcauccccaacuucaaccaguacgaggccaugagcugcgacuucaacggcggcaagaucagcgugcaguacaaccugagccacagcuacgccggcgacgccgccaaccacugcggcaccguggccaacggcgugcugcagaccuucaugagaauggccuggggcggcagcuacaucgcccuggacagcggcagagacagaugggacugcaucaugaccagcuaccaguaccugaucauccagaacaccaccugggaggaccacugccaguucagcagacccagccccaucggcuaccugggccugcugagccagagaaccagagacaucuacaucagcagaagacugcugggcaccuucaccuggacccugagcgacagcgagggcaaggacacccccggcggcuacugccugaccagauggaugcugaucgaggccgagcugaagugcuucggcaacaccgccguggccaagugcaacgagaagcacgacgaggaguucugcgacaugcugagacuguucgacuucaacaagcaggccauccagagacugaaggccgaggcccagaugagcauccagcugaucaacaaggccgugaacgcccugaucaacgaccagcugaucaugaagaaccaccugagagacaucaugggcauccccuacugcaacuacagcaaguacugguaccugaaccacaccaccaccggcaagaccagccugcccaagugcuggcuggugagcaacggcagcuaccugaacgagacccacuucagcgacgacaucgagcagcaggccgacaacaugaucaccgagaugcugcagaaggaguacauggagagacagggcaagaccccccugggccugguggaccuguucguguucagcaccagcuucuaccugaucagcaucuuccugcaccuggugaagauccccacccacagacacaucgugggcaagcccugccccaagccccacagacugaaccacaugggcaucugcagcugcggccuguacaagcagcccggcgugcccgugaaguggaagagaugaggacuagugcaucacauuuaaaagcaucucagccuaccaugagaauaagagaaagaaaaugaagaucaauagcuuauucaucucuuuuucuuuuucguugguguaaagccaacacccugucuaaaaaacauaaauuucuuuaaucauuuugccucuuuucucugugcuucaauuaauaaaaaauggaaagaaccuagaucuaaaaaaaaaaaaaaaaaaaaaaaaaaaaaaaaaaaaaaaaaaaaaaaaaaaaaaaaaaaaaaaaugcaucccccccccccccccccccccccccccccccaaaggcucuuuucagagccaccagaauu

SEQ ID NO: 3215 - RNA, 1858 nt, Artificial Sequence
  mRNA product Design i-2 comprising derived and/or modified sequence from LASV(Josiah;Clade IV)__NP_694870__GPC (opt5)
ggggcgcugccuacggagguggcagccaucuccuucucggcaucaagcuuaccaugggccagaucgugaccuucuuucaagaggucccccacguuauugaagaggugaugaacaucgugcugauugcccucagcguccuggcugugcuuaaggggcuguacaauuucgccacaugcggacucguuggccuggugacguuucuucugcucugugggagauccugcaccacaucucuguauaaaggagucuacgaacugcagacccucgagcugaacauggaaacacuuaauaugaccaugccucugagcuguacaaagaacaauucccaucacuauaucauggugggcaacgagaccgggcucgagcugacgcuuaccaauacaucuauuaucaaccauaaauucugcaaucugagcgacgcgcacaagaaaaaccucuacgaucaugcucugauguccaucauuucuaccuuucaccugagcaucccgaauuucaaccaguaugaagccauguccugugacuuuaauggaggcaagauuagcguucaguacaaccucucucacuccuaugccggcgaugcugccaaucauugcgggacaguggcuaacggaguccugcaaaccuucaugcggauggccuggggcgggagcuacaucgcgcuugacucuggacgcggcaacugggauuguauuaugacguccuaccaguaucugaucauucagaauacaaccugggaggaccacugccaguuuagcagacccucuccuaucggguaccucggacugcuuucccaacggacacgcgauaucuauauuagcagacggcugcucggcaccuucaccuggacacuguccgacucugaaggcaaggauacgcccgggggauacugucugacccgcuggaugcucaucgaggccgagcugaaaugcuuuggcaacacagcuguggccaaguguaaugaaaaacaugacgaggaguucugcgauaugcuuagacuguuugacuucaacaagcaggcuauucagcggcucaaagccgaagcgcagaugagcauccaacugauuaauaaggccgugaacgcucuuaucaaugaucagcugaucaugaagaaccaccuccgcgacauuauggggaucccuuauugcaauuacuccaaauauugguaccugaaccacaccacaaccggaagaacgagccugcccaaguguuggcucgucucuaauggcuccuaccugaacgaaacacauuucagcgacgauauugagcagcaagccgacaauaugaucaccgagaugcuucagaaagaauauauggagcggcaggggaagaccccucugggacucguugaucuguuuguguucucuaccagcuuuuaccugauuuccaucuuccuucaccucgugaaaaucccgacacaucgccacauugucggcaagucuugccccaaaccucauagacugaaccacaugggcaucuguagcugcgggcuguauaagcagcccggagugccuguuaaguggaaacggugaggacuagugcaucacauuuaaaagcaucucagccuaccaugagaauaagagaaagaaaaugaagaucaauagcuuauucaucucuuuuucuuuuucguugguguaaagccaacacccugucuaaaaaacauaaauuucuuuaaucauuuugccucuuuucucugugcuucaauuaauaaaaaauggaaagaaccuagaucuaaaaaaaaaaaaaaaaaaaaaaaaaaaaaaaaaaaaaaaaaaaaaaaaaaaaaaaaaaaaaaaaugcaucccccccccccccccccccccccccccccccaaaggcucuuuucagagccaccagaauu

SEQ ID NO: 3216 - RNA, 1855 nt, Artificial Sequence
  mRNA product Design i-2 comprising derived and/or modified sequence from LASV(LP;Clade I)__AAF86701__GPC (opt5)
ggggcgcugccuacggagguggcagccaucuccuucucggcaucaagcuuaccaugggccagaucauuaccuucuuucaagaggugccccacgucaucgaagagguuaugaacauugugcugaucgcccucagccugcuugcuauucugaaggggcucuacaauaucgccacaugcggaaucauuggccugguggcguuccuuuuucugugugggaaauccugcucucucacgcugaagggaggcuaugaacugcagacccucgagcugaacauggaaacacuuaauaugaccaugccucugagcuguaccaaaaacuccucucaucacuacaucagagucgggaaugagacaggacucgagcugacacuuaccaacacgagcauuaucaaucauaaguucugcaaccuguccgacgcucacaaaaagaaucucuaugaucaugcccugaugucuauuaucagcaccuuucaccuguccauuccgaacuucaaucaguacgaagccaugagcugugacuuuaacggcggcaagaucucugugcaguauaaucucucccacagcuacgcuggggaugccgcugagcauugcggaacaguugccaacggcgugcugcaaaccuucaugcggauggcguggggagggcgcuauaucgcccuugacucuggcaaagggaauugggauuguauuaugacauccuaccaguaccugaucauucagaacaccacgugggaagaccacugccaguuuagcagacccucuccuaucggauaucucggccugcuuucccaacggacacgcgauauuuacaucagcagacggcugcucggcaccuucacauggacccuguccgacucugaggggaacgagacccccggaggcuauugucugacacgcuggaugcucaucgaagcugagcugaagugcuuugggaauacggccgucgcuaaauguaacgaaaagcaugaugaggaguucugcgacaugcuuagacuguuugauuucaauaaacaggccauucggcgccucaaggcggaagcccagaugagcauccagcugauuaacaaggcugugaaugcccuuaucaacgaccaacugauuaugaaaaaucaccucagagauaucaugggaaucccuuacugcaacuauuccaaguacugguaucugaaucacaccagcucuggccggacaucccugcccaaauguuggcucauuagcaacgggucuuaccugaaugagacccaguucagcgacgacaucgaacagcaagcugauaacaugauuacagagaugcuucagaaggaauacaucgagcgccagggaaaaaccccucugggccucguugacauuuuuaucuucuccacgucuuuuuaucugauuagcaucuuccugcaucuuaucaagauuccgacacacagacauaucgugggcaaacccugcccuaagccccaccggcucaaucauaugggggucuguuccugcggacuguacaagcacccuggcgugcccaccaaauggaagcgcugaggacuagugcaucacauuuaaaagcaucucagccuaccaugagaauaagagaaagaaaaugaagaucaauagcuuauucaucucuuuuucuuuuucguugguguaaagccaacacccugucuaaaaaacauaaauuucuuuaaucauuuugccucuuuucucugugcuucaauuaauaaaaaauggaaagaaccuagaucuaaaaaaaaaaaaaaaaaaaaaaaaaaaaaaaaaaaaaaaaaaaaaaaaaaaaaaaaaaaaaaaaugcaucccccccccccccccccccccccccccccccaaaggcucuuuucagagccaccagaauu

SEQ ID NO: 3217 - RNA, 1855 nt, Artificial Sequence
  mRNA product Design i-2 comprising derived and/or modified sequence from LASV(803213;Clade II)__AAF86703__GPC (opt5)
ggggcgcugccuacggagguggcagccaucuccuucucggcaucaagcuuaccaugggccagaucauuaccuucuuucaagaggugccccacgucaucgaagagguuaugaacauugugcugaucgcccucagccugcuugcuauucugaaggggaucuacaauguggccacaugcggacucuucggccugaucuccuuucuucugcucugugggagaucuugcagcgucacguauaaaggaguguacgaacugcagacccuggagcucaacauggcgaaucugaacaugacaaugccucuuuccuguaccaagaauaacucucaucacuauauuaugguuggcaaugaaacagggcuggagcucacccugacaaacaccagcaucauuaaucauaaauucugcaaccuuuccgacgcucacaagaaaaaucuguacgaucaugcccucaugucuaucauuagcacguuucaccuguccaucccgaacuucaaucaguaugaggccaugagcugugacuuuaacggaggcaagauuucugugcaguacaaucugucccacagcuucgcugucgaugccgcuaaccauugcggcaccaucgccaacggggugcuccaaacauuuaugcggauggcguggggaggcucuuauaucgcccuggacuccgggaagggaaauugggauuguauuaugaccagcuaccaguaccuuaucauucagaacacaaccugggaagaccacugccaguucucucgccccuccccuaucggcuaucuggggcuccugagccaaagaacgcgggauauuuacaucucccgcagacuucugggaacauuuaccuggacacucucugacagcgagggcaaugaagcucccggcggguauugucugacccgguggaugcugaucgaggccgagcucaaaugcuucggaaacaccgcuguugccaaguguaaugaaaaacaugaugaggaauuuugcgacaugcugcgccuuuucgauuucaacaagcaggcgauuaaaagacugaagacagaggcccagauguccauccagcucauuaauaaggcugugaacgcccugaucaaugaccaacuuauuaugaaaaaccaucugcgggauaucaugggcaucccuuacugcaauuauagccgcuacugguaucucaaccacacggucaccgggaagacaucucugcccagauguuggcugguguccaauggaagcuaccucaacgaaacccacuuuucugacgacauugagcagcaggcugauaauaugaucacagagaugcugcaaaaagaauacauggaccggcagggcaagaccccucuugggcugguggaucucuucgucuuuagcacguccuucuaucugauuucuaucuuucugcaccuuguuaaaauuccgacacaucgccacaucgugggaaagcccugcccuaaaccccauagacucaaccacaugggcauuuguagcugcggccuguacaagcacccuggggugcccgucaaguggaaacggugaggacuagugcaucacauuuaaaagcaucucagccuaccaugagaauaagagaaagaaaaugaagaucaauagcuuauucaucucuuuuucuuuuucguugguguaaagccaacacccugucuaaaaaacauaaauuucuuuaaucauuuugccucuuuucucugugcuucaauuaauaaaaaauggaaagaaccuagaucuaaaaaaaaaaaaaaaaaaaaaaaaaaaaaaaaaaaaaaaaaaaaaaaaaaaaaaaaaaaaaaaaugcaucccccccccccccccccccccccccccccccaaaggcucuuuucagagccaccagaauu

SEQ ID NO: 3218 - RNA, 1855 nt, Artificial Sequence
  mRNA product Design i-2 comprising derived and/or modified sequence from LASV(GA391;Clade III)__CAA36645__GPC (opt5)
ggggcgcugccuacggagguggcagccaucuccuucucggcaucaagcuuaccaugggccagaucgugaccuucuuucaagaggucccccacguuauugaagaggugaugaacaucgugcugauugcccucagcauccuggcuauucuuaaggggcuguacaaugucgccacaugcggacucaucggccuggugacguuccuucugcucuccgggagaucuuguagccugaucuauaaaggaaccuacgaacugcagacacucgagcugaacauggaaacccuuaauaugacaaugccucuguccugcaccaagaacaauucucaucacuauauucggguuggcaacgagacagggcucgagcugacccuuacgaauaccagcauccugaaccauaaauuuuguaaucucuccgacgcgcacaagcgcaaccuguacgaucauucucugaugagcauuaucuccacauuccaccucagcauuccgaauuuuaaccaguaugaagcuaugucuugcgacuucaauggaggcaaaaucaccgugcaguacaaccugucccacagcuuugccgucgaugccgcuggccauugugggacacuugccaauggagugcugcaaaccuucaugagaauggcuuggggcgggucuuauauugcccucgacuccggacggggcaacugggauugcaucaugacgagcuaccaguaccugaucauucagaacacaaccugggacgaucacugucaguuuucucgccccuccccuaucggguaucuuggacugcucagccaaagaacacgggacauuuacaucucccgcagacugcugggcaccuucaccuggacacucucugauagcgagggcaaugaaacgcccgggggauauugccugacccgguggaugcuuauugaggcggagcugaaguguuuuggcaacacagccguugcuaagugcaaugaaaaacaugacgaggaguucugugauaugcuccgccuguuugacuucaacaagcaggccaucagacggcuuaaaaccgaagcucagauguccauccagcugauuaauaaggccgugaacgcgcucaucaaugaucaacugauuaugaaaaaccaucugcgcgacaucauggggauuccuuacugcaauuauagcagauacugguaucucaaccacacaucuaccggaaagacgucccugccccggugcuggcuuaucagcaauggcucuuaccugaacgaaacaaaguucagcgacgauaucgagcagcaggccgacaauaugauuaccgagaugcuccaaaaagaauacaucgaucgccaggggaagaccccucugggacuggucgaccuuuuuguguucuccacaucuuuuuaucucauuagcaucuuccugcaccuggugaaaauuccgacccacagacauaucgucggcaagcccuguccuaaaccccaccggcucaaccauaugggcauuugcuccugugggcuguacaagcagccuggaguucccgugagauggaaacgcugaggacuagugcaucacauuuaaaagcaucucagccuaccaugagaauaagagaaagaaaaugaagaucaauagcuuauucaucucuuuuucuuuuucguugguguaaagccaacacccugucuaaaaaacauaaauuucuuuaaucauuuugccucuuuucucugugcuucaauuaauaaaaaauggaaagaaccuagaucuaaaaaaaaaaaaaaaaaaaaaaaaaaaaaaaaaaaaaaaaaaaaaaaaaaaaaaaaaaaaaaaaugcaucccccccccccccccccccccccccccccccaaaggcucuuuucagagccaccagaauu

SEQ ID NO: 3219 - RNA, 1858 nt, Artificial Sequence
  mRNA product Design i-2 comprising derived and/or modified sequence from LASV(AV;Clade V)__CCA30314__GPC (opt5)
ggggcgcugccuacggagguggcagccaucuccuucucggcaucaagcuuaccaugggccagaucgugaccuucuuucaagaggucccccacguuauugaagaggugaugaacaucgugcugauugcccucagcauccuggcuguccuuaaggggcuguacaauauugccacaugcggacucaucggccugaucacguuccuucugcucugugggagauccugcucuagcaaccuguauaaaggaguguacgaacugcagucccucgaccugaauauggagacccuuaacaugacaaugccucugucuuguaccaagaauaacagccaucacuauauucggguuggcaaugauacagggcucgaacugacccuuacaaacaccuccauccugaaucauaaauuuugcaaccucucugacgcgcacaagaaagaucuguacgaccaugcucugaugagcauuaucuccacguuccaccucagcauuccgaauuuuaaccaguaugaggccaugucuugugauuucaauggaggcaagaucuccgugcaguacaaccugagccacucuuaugccauugacgcugccaaucauugcggcaccgucgcuaacgggauccuucaaacauuuaugcgcauggccuggggaggcuccuacaucgcgcuggauagcgggagaggaaacugggacuguauuaugaccucuuaccaguaucucaucauucagaauacaaccugggagaaccacugccaguucucccggcccagcccuaucggcuaccuggggcuucugucccaacgcacgagagauauuuauaucucucggcgccuccugggaacauuuaccuggacacugagcgacuccgaaggcaaugccacccccggcggguacugucucaccagauggaugcugaucgaggcugaacuuaagugcuucggaaacacagccguggcuaaauguaaugagaagcaugaugaggaauuuugcgacaugcugcgccucuucgauuuuaacaaacaggccauuagccggcugaagucugaggcgcagauguccauccagcuuauuaauaaagccguuaacgcucugaucaaugaccaacucauuaugaagaaccaccugagagacaucaugggcaucccuuauugcaauuacagcaaguauugguaccugaaccacacgauuaccgggaaaacaucucuccccaaguguuggcuggugagcaauggauccuaccuuaacgaaacccauuucucugaugacaucgagcagcaggccgauaauaugauuacagaaaugcugcaaaaagaguauauggagcggcagggcaagaccccucucgggcuggucgaccuguucguguuuagcacguccuucuaccuuaucagcauuuuucuccgccuggugaaaaucccgacacacagacauauugucggaaagcccugcccuaaaccccaccggcugaaccauaugggcaucuguucuugcggccucuauaagcagccugggguucccgugcgcuggaagagaugaggacuagugcaucacauuuaaaagcaucucagccuaccaugagaauaagagaaagaaaaugaagaucaauagcuuauucaucucuuuuucuuuuucguugguguaaagccaacacccugucuaaaaaacauaaauuucuuuaaucauuuugccucuuuucucugugcuucaauuaauaaaaaauggaaagaaccuagaucuaaaaaaaaaaaaaaaaaaaaaaaaaaaaaaaaaaaaaaaaaaaaaaaaaaaaaaaaaaaaaaaaugcaucccccccccccccccccccccccccccccccaaaggcucuuuucagagccaccagaauu

SEQ ID NO: 3220 - RNA, 1855 nt, Artificial Sequence
  mRNA product Design i-2 comprising derived and/or modified sequence from LASV(Togo/2016/7082;Clade VI)__AMR44577__GPC (opt5)
ggggcgcugccuacggagguggcagccaucuccuucucggcaucaagcuuaccaugggccagaucauuaccuucuuucaagaggugccccacgucaucgaagagguuaugaacauugugcugaucgcccucagccugcuugcuauucugaaggggguguacaaugucgccacaugcggaaucaucggccucgugacguuccuguuucuuugugggagauccugcucucugauuuauaaaggaagcuacgaacuccagacccuggagcugaacauggaaacacucaauaugaccaugccucuguccuguacaaagaacucuagccaucacuauauccggguuggcaaugagaccgggcuugagcugacacucaccaacacguccauuaucaaucauaaauucugcaaccugucugacgcgcacaagcgcaaucuuuacgaucaugcucugaugagcauucucuccaccuuucaccugagcaucccgaacuucaaucaguaugaagccaugucuugugacuuuaacggaggcaaaauuuccgugcaguacaaucugagccacgccuaugcugucgaugccgcugagcauugcggcacaguggccaacgggguucuccaaaccuucaugagaauggcguggggaggcucuuacaucgcccuggacuccgggcggggaaauugggauuguaucaugacaagcuaccaguaucuuauuauccagaacaccacgugggaagaccacugccaguuuucucgccccuccccuauuggcuaccuggggcuccugagccaaagaacacgggauaucuauauuucccgcagacuucugggaaccuucacauggacccucucugacagcgagggcaacgagacccccggcggguacugucugacacgguggaugcugaucgaagcugagcucaagugcuuuggaaauacggccguggcuaaguguaacgaaaaacaugaugaggaguucugcgacaugcugcgccuuuuugauuucaauaagcaggccauccagagacugaaauccgaagcgcagaugagcauucaacucaucaacaaggccgucaaugcucugauuaacgaccagcuuaucaugaaaaaucaucugcgggauaugaugggcauuccuuauugcaacuacucuaaguauugguaccucaaucacaccuccagcgggcgcacaucucugcccaaguguuggcuggugagcaacggauccuaccucaaugagacccacuucucugacgacaucgaacagcaagccgauaacaugaucacagagaugcugcagaaagaauauauugacagacagggcaagaccccucuugggcugguggaucucuuugucuucagcacguccuuuuaccugaucagcauuuuccugcaccuuaucaaaauuccgacacaucggcacaucguuggaaagcccugcccuaaaccccaucgccucaaucacaugggcauuuguucuugcggccuguauaagcagccuggggugcccaccagauggaaacggugaggacuagugcaucacauuuaaaagcaucucagccuaccaugagaauaagagaaagaaaaugaagaucaauagcuuauucaucucuuuuucuuuuucguugguguaaagccaacacccugucuaaaaaacauaaauuucuuuaaucauuuugccucuuuucucugugcuucaauuaauaaaaaauggaaagaaccuagaucuaaaaaaaaaaaaaaaaaaaaaaaaaaaaaaaaaaaaaaaaaaaaaaaaaaaaaaaaaaaaaaaaugcaucccccccccccccccccccccccccccccccaaaggcucuuuucagagccaccagaauu

SEQ ID NO: 3221 - RNA, 1855 nt, Artificial Sequence
  mRNA product Design i-2 comprising derived and/or modified sequence from LASV(KAK-428;Clade n.d. (VII))__ANH09740__GPC (opt5)
ggggcgcugccuacggagguggcagccaucuccuucucggcaucaagcuuaccaugggccagaucgugaccuucuuucaagaggucccccacguuauugaagaggugaugaacaucgugcugauugcccucagccugcuugcuauccugaaggggcucuacaauuucgccacaugcggagucauuggccugaucacguuucuucugcucugugggagauccugcucugcgaccuauaaaggacaguacgaacugcagacacuggagcucaacauggaaagccugaauaugaccaugccucuuuccuguacaaagaacaauucucaucacuauauccgggcuggcaacaauaccgggcuggagcucacacugaccaacacgagcauuaucucccauaaauucugcaaucuuucugacgcccacaagaaaaaccuguacgaucauacccucaugagcauuaucacaaccuuucaccuguccauuccgaauuucaaccaguaugaggccaugagcugugacuuuaauggaggcaagaucucuauucaauacaaccugucccacagcuaugcuggcgaugccgcucagcauugcgggacaguggccaauggaguucuccagaccuucaugcgcauggcguggggcgggucuuaccuggcccuugacuccggaagacggggcugggauuguaucaucagcucuuaccaguaucugauuauccaaaacacgacaugggacgaucacugccaguuuucccgccccagcccuauuggguaccucggauucgugucccagaagaccagagacaucuauauuucucggcgccugcuuggcacauuuaccuggacccugagcgauuccgaaggccaugacaugcccgggggauacugucucacaagauggaugcugaucgaggcugaucugaaaugcuucggcaacacggccgucgcuaaguguaaugaaaaacacgacgaggaguuuugcgauauguggcgccucuucgacuucaacaagcaggccauccaacggcugaaagcggaagcccagaugaauauucagcuuaucaacaaggcugugaaugcccugauuaacgaccaacucaugaugaagaaucaccugagagauaucauggggauuccuuauugcaacuacagcaaauuuugguaucuuaauaacaccacaaccggacggacaucucugccccgcuguuggcucaucuccaauggcagcuaccugaacgagacccauuucucugacgauaucgaacagcaggcugacaauaugauuacggagaugcugcagaaggaauacauggauagacaagggaaaacaccucucggacugguugaccuuuuuguguucagcaccuccuuuuaucugaucaccauuuuccuccaccuggucaagaucccgacacaucggcacauugugggcaaacccugcccuaagccccaucgccugaaccacaugggcaucuguucuugcgggcuuuacaaacagccuggagugcccgucagauggaagcggugaggacuagugcaucacauuuaaaagcaucucagccuaccaugagaauaagagaaagaaaaugaagaucaauagcuuauucaucucuuuuucuuuuucguugguguaaagccaacacccugucuaaaaaacauaaauuucuuuaaucauuuugccucuuuucucugugcuucaauuaauaaaaaauggaaagaaccuagaucuaaaaaaaaaaaaaaaaaaaaaaaaaaaaaaaaaaaaaaaaaaaaaaaaaaaaaaaaaaaaaaaaugcaucccccccccccccccccccccccccccccccaaaggcucuuuucagagccaccagaauu

SEQ ID NO: 3222 - RNA, 1855 nt, Artificial Sequence; identical to SEQ ID NO: 3216
  mRNA product Design i-2 comprising derived and/or modified sequence from LASV(Pinneo-NIG-1969;Clade I)__AIT17836__GPC (opt5)

SEQ ID NO: 3223 - RNA, 1855 nt, Artificial Sequence
  mRNA product Design i-2 comprising derived and/or modified sequence from LASV(ISTH0009-NIG-2011;Clade II)__AIT17404__GPC (opt5)
ggggcgcugccuacggagguggcagccaucuccuucucggcaucaagcuuaccaugggccagaucauuaccuucuuucaagaggugccccacgucaucgaagagguuaugaacauugugcugaucgcccucagccugcuugcuauucugaaggggaucuacaauguggccacaugcggacucuucggccuggucuccuuucuucugcucugugggagaucuugcagcacgaccuauaaaggaguguacgaacugcagacacuggagcucgacauggcgucccugaacaugaccaugccucuuucuuguacaaagaauaacagccaucacuauaucaugguuggcaaugaaaccgggcuggagcucacacugaccaacacguccauuaucaaucauaaauucugcaaccuuucugaugcucacaagaaaaaucuguacgaccaugcccucaugagcauuaucuccaccuuucaccugagcauuccgaacuucaaucaguaugaggccaugucuugugauuuuaacggaggcaagaucuccgugcaguacaaucugagccacgcuuaugccgucgacgcugccaaccauugcggcacaauugcgaauggggugcuccaaaccuucaugcggauggccuggggaggcucuuacaucgcucuggauuccgggaagggaagcugggacuguaucaugacaucuuaccaguaucuuauuauccagaacaccacgugggaagaucacugccaguuuucccgccccagcccuauuggcuaccuggggcuccugucccaaagaacacgggacaucuauauuucucgcagacuucugggaaccuucacauggacccucagcgauuccgagggcaacgaaacccccggcggguacugucugacacgguggaugcugaucgaggccgagcucaaaugcuuuggaaauacggcuguugccaaguguaacgaaaaacaugacgaggaguucugcgauaugcugcgccuuuuugacuucaauaagcaggcgaucagacggcugaaaaccgaagcccagaugagcauucagcucaucaacaaggcugugaaugcccugauuaacgaucaacuuaucaugaagaaucaucugcgcgacauuaugggcaucccuuauugcaacuacucuaaauauugguaccucaaucacacagucaccgggaagacaucccugcccagauguuggcuggugagcaacggaucuuaccucaaugaaacccacuucagcgacgauaucgagcagcaggcugacaacaugauuacggagcugcuucaaaaagaauauauggaucggcagggcaagacaccucuggggcucguggaccuguuugucuucuccaccucuuuuuaccugaucagcauuuuccuucaccucaucaaaauuccgacccaucgccacaucacaggaaagcccugcccuaaaccccauagacugaaucacaugggcauuuguuccugcggccuguauaagcacccugggguucccgugaaguggaaacggugaggacuagugcaucacauuuaaaagcaucucagccuaccaugagaauaagagaaagaaaaugaagaucaauagcuuauucaucucuuuuucuuuuucguugguguaaagccaacacccugucuaaaaaacauaaauuucuuuaaucauuuugccucuuuucucugugcuucaauuaauaaaaaauggaaagaaccuagaucuaaaaaaaaaaaaaaaaaaaaaaaaaaaaaaaaaaaaaaaaaaaaaaaaaaaaaaaaaaaaaaaaugcaucccccccccccccccccccccccccccccccaaaggcucuuuucagagccaccagaauu

SEQ ID NO: 3224 - RNA, 1855 nt, Artificial Sequence
  mRNA product Design i-2 comprising derived and/or modified sequence from LASV(ISTH2010-NIG-2012;Clade II)__AIT17482__GPC (opt5)
ggggcgcugccuacggagguggcagccaucuccuucucggcaucaagcuuaccaugggccagaucauuaccuucuuucaagaggugccccacgucaucgaagagguuaugaacauugugcugaucgcccucagccugcuugcuauucugaaggggaucuacaauguggccacaugcggacucuucggccuggucuccuuucuucugcucugugggagaucuugcagcacgaccuauaaaggaguguacgaacugcagacacuggagcucgacauggcgucccugaacaugaccaugccucuuucuuguacaaagaauaacagccaucacuauaucaugguuggcaaugaaaccgggcuggagcucacacugaccaacacguccauuaucaaucauaaauucugcaaccuuucugaugcucacaagaaaaaucuguacgaccaugcccucaugagcauuaucuccaccuuucaccugagcauuccgaacuucaaucaguaugaggccaugucuugugauuuuaacggaggcaagaucuccgugcaguacaaucugagccacgcuuaugccgucgacgcugccaaccauugcggcacaauugcgaauggggugcuccaaaccuucaugcggauggccuggggaggcucuuacaucgcucuggauuccgggaagggaagcugggacuguaucaugacaucuuaccaguaucuuauuauccagaacauuaccugggaagaucacugccaguuuucccgccccagcccuaucggcuaccuggggcuccugucccaaagaacgcgggacauuuauaucucucgcagacuucugggaacauucaccuggacacucagcgauuccgagggcaacgaaacccccggcggguacugucugacccgguggaugcugaucgaggccgagcucaaaugcuuuggaaauacagcuguugccaaguguaacgaaaaacaugacgaggaguucugcgauaugcugcgccuuuuugacuucaauaagcaggcgauuagacggcugaaaacggaagcccagaugagcauccagcucauuaacaaggcugugaaugcccugaucaacgaucaacuuauuaugaagaaucaucugcgcgacaucaugggcaucccuuauugcaacuacucuaaauauugguaccucaaucacaccgucacagggaagaccucccugcccagauguuggcuggugagcaacggaucuuaccucaaugaaacacacuucagcgacgauauugagcagcaggcugacaacaugaucaccgagcugcuucaaaaagaauauauugaucggcagggcaagacgccucuggggcucguggaccuguuugucuucuccacaucuuuuuaccugaucagcauuuuccuucaccucguuaaaaucccgacccaucgccacguggugggaaagcccugcccuaaaccccauagacugaaucacaugggcauuuguuccugcggccuguauaagcacccugggguccccgugaaguggaaacggugaggacuagugcaucacauuuaaaagcaucucagccuaccaugagaauaagagaaagaaaaugaagaucaauagcuuauucaucucuuuuucuuuuucguugguguaaagccaacacccugucuaaaaaacauaaauuucuuuaaucauuuugccucuuuucucugugcuucaauuaauaaaaaauggaaagaaccuagaucuaaaaaaaaaaaaaaaaaaaaaaaaaaaaaaaaaaaaaaaaaaaaaaaaaaaaaaaaaaaaaaaaugcaucccccccccccccccccccccccccccccccaaaggcucuuuucagagccaccagaauu

SEQ ID NO: 3225 - RNA, 1855 nt, Artificial Sequence
  mRNA product Design i-2 comprising derived and/or modified sequence from LASV(Lassa virus/H.sapiens-wt/NGA/2015/ISTH_0543;Clade II)__AVO03639__GPC (opt5)
ggggcgcugccuacggagguggcagccaucuccuucucggcaucaagcuuaccaugggccagaucauuaccuucuuucaagaggugccccacgucaucgaagagguuaugaacauugugcugaucgcccucagccugcuugcuauucugaaggggaucuacaauguggccacaugcggacucuucggccuggucuccuuucuucugcucugugggagaucuugcagcacgaccuauaaaggaguguacgaacugcagacacuggagcucgacauggcgaaccugaauaugaccaugccucuuuccuguacaaagaacaauucucaucacuauaucaugguuggcaacgaaaccgggcuggagcucacacugaccaauacgagcauuaucaaccauaaauucugcaaucuuuccgaugcucacaagaaaaaccuguacgaccaugcccucaugucuauuaucagcaccuuucaccuguccauuccgaauuucaaccaguaugaggccaugagcugugauuuuaauggaggcaagaucucugugcaguacaaccugucccacacauaugcugucgacgccgcuaaucauugcggcaccauugccaacggggugcuccaaacauucaugcggauggcguggggaggcagcuacaucgcccuggauucugggaagggauccugggacuguaucaugaccagcuaccaguaucuuguuauucagaacacgacaugggaagaucacugccaguuuucucgccccuccccuaucggcuaccuggggcuccugagccaaagaacccgggacauuuauaucucccgcagacuucugggaacauucaccuggacccucucugauagcgagggcaaugaaacacccggcggguacugucugacgcgguggaugcugauugaggcugagcucaaaugcuuuggaaacaccgccguggcuaaguguaaugaaaaacaugacgaggaguucugcgauaugcugcgccuuuuugacuucaacaagcaggccaucagacggcugaaaacagaagcgcagauguccauccagcucauuaauaaggccgucaacgcucugaucaaugaucaacuuauuaugaagaaccaucugcgcgacaucaugggcauuccuuauugcaauuacagcaaauauugguaccucaaccacaccgugacagggaagaccucucugcccagauguuggcugguguccaauggaagcuaccucaacgaaacgcacuucucugacgauaucgagcagcaggccgacaauaugaucacagagcugcuucaaaaagaauauauugaucggcagggcaagaccccucuggggcucgucgaccuguuuguuuucagcaccuccuuuuaccugaucucuauuuuccuucaccucgugaaaaucccgacacaucgccacauuaccggaaagcccugcccuaaaccccauagacugaaccacaugggcaucuguagcugcggccuguauaagcacccuggggugcccgucaaguggaaacggugaggacuagugcaucacauuuaaaagcaucucagccuaccaugagaauaagagaaagaaaaugaagaucaauagcuuauucaucucuuuuucuuuuucguugguguaaagccaacacccugucuaaaaaacauaaauuucuuuaaucauuuugccucuuuucucugugcuucaauuaauaaaaaauggaaagaaccuagaucuaaaaaaaaaaaaaaaaaaaaaaaaaaaaaaaaaaaaaaaaaaaaaaaaaaaaaaaaaaaaaaaaugcaucccccccccccccccccccccccccccccccaaaggcucuuuucagagccaccagaauu

SEQ ID NO: 3226 - RNA, 1855 nt, Artificial Sequence
  mRNA product Design i-2 comprising derived and/or modified sequence from LASV(Lassa virus/H.sapiens-wt/NGA/2016/ISTH_0009;Clade II)__AVO03571__GPC (opt5)
ggggcgcugccuacggagguggcagccaucuccuucucggcaucaagcuuaccaugggccagaucauuaccuucuuucaagaggugccccacgucaucgaagagguuaugaacauugugcugaucgcccucagccugcuugcuauucugaaggggaucuacaauguggccacaugcggacuccugggccuugucuccuuccugcuccugugugggagaucuugcagcacgaccuauaaaggaguguacgaacugcagacacucgagcuggacauggcgucccuuaacaugaccaugccucugucuuguacaaagaauaacagccaucacuauaucaugguuggcaaugaaaccgggcucgagcugacacuuaccaacacguccauuaucaaucauaaauuuugcaaccugucugaugcucacaagaaaaaucucuacgaccaugcccugaugagcauuaucuccaccuuccaccugagcauuccgaacuuuaaucaguaugaggccaugucuugugauuucaacggaggccggaucuccgugcaguacaaucucagccacucuuaugcugucgacgccgcuaaccauugcggcacaauugccaauggggugcugcaaaccuuuaugcgcauggcguggggaggcuccuacaucgcccuugauagcgggaagggaucuugggacuguaucaugacauccuaccaguaucugauuauccagaacaccacgugggaagaucacugccaguucagcagacccuccccuauuggcuaccucgggcugcuuucucaacggacacgcgacaucuauauuagcagacggcugcucggaaccuuuacauggacccuguccgauagcgagggcaacgaaacccccggcggguacugucugacacgcuggaugcucaucgaggcugagcugaagugcuucggaaauacggccguugcuaaauguaacgaaaagcaugacgaggaauuuugcgauaugcuuagacuguucgacuuuaauaaacaggccauccggcgccucaagaccgaggcgcagaugucuauucagcugaucaacaaagccgugaaugcucuuauuaacgaucaacugaucaugaagaaucaccucagagacauuaugggcaucccuuauugcaacuacuccaaguauugguaccugaaucacacagucaccgggaaaacaagccugccccgguguuggcucgugucuaacggaagcuaccugaaugaaacccauuucuccgacgauaucgagcagcaggccgacaacaugauuacggagcuucugcaaaaggaauauaucgaucgccagggcaaaacaccucucgggcugguggaccuguucgucuuuucuaccagcuucuaccuuauuuccaucuuucuccaccugguuaagauuccgacccauagacacaucacaggaaaacccugcccuaagccccaucggcugaaucacaugggcauuuguagcugcggccucuauaaccacccuggggugcccgugaaauggaagcgcugaggacuagugcaucacauuuaaaagcaucucagccuaccaugagaauaagagaaagaaaaugaagaucaauagcuuauucaucucuuuuucuuuuucguugguguaaagccaacacccugucuaaaaaacauaaauuucuuuaaucauuuugccucuuuucucugugcuucaauuaauaaaaaauggaaagaaccuagaucuaaaaaaaaaaaaaaaaaaaaaaaaaaaaaaaaaaaaaaaaaaaaaaaaaaaaaaaaaaaaaaaaugcaucccccccccccccccccccccccccccccccaaaggcucuuuucagagccaccagaauu

SEQ ID NO: 3227 - RNA, 1855 nt, Artificial Sequence
  mRNA product Design i-2 comprising derived and/or modified sequence from LASV(Lassa virus/H.sapiens-wt/NGA/2016/ISTH_0017;Clade II)__AVO03567__GPC (opt5)
ggggcgcugccuacggagguggcagccaucuccuucucggcaucaagcuuaccaugggccagaucauuaccuucuuucaagaggugccccacgucaucgaagagguuaugaacauugugcugaucgcccucagccugcuugcuauucugaaggggaucuacaauguggccacaugcggacucuucggccuggucuccuuucuucugcucugugggagaucuugcagcacgaccuauaaaggaguguacgaacugcagacacuggagcucgacauggcgucccugaacaugaccaugccucuuucuuguacaaagaauaacagccaucacuauaucaugguuggcaaugaaaccgggcuggagcucacacugaccaacacguccauuaucaaucauaaauucugcaaccuuucugaugcucacaagaaaaaucuguacgaccaugcccucaugagcauuaucuccaccuuucaccugagcauuccgaacuucaaucaguaugaggccaugucuugugauuuuaacggaggcaagaucuccgugcaguacaaucugagccacacauaugcuauugacgccgcuaaccauugcggcaccaucgccaaugggguccuccaaacauucaugcggauggcguggggaggcucuuacaucgcccuggauuccgggaagggaagcugggacuguauuaugaccucuuaccaguaucuuaucauucagaacacgacaugggaagaucacugccaguuuucccgccccagcccuaucggcuaccuggggcuccugucccaaagaacccgggacauuuauaucucucgcagacuucugggaacauucaccuggacccucagcgauuccgagggcaacgaaacacccggcggguacugucugacgcgguggaugcugaucgaggcugagcucaaaugcuuuggaaauaccgccguggcuaaguguaacgaaaaacaugacgaggaguucugcgauaugcugcgccuuuuugacuucaauaagcaggccauuagacggcugaaaacagaagcgcagaugagcauccagcucauuaacaaggccguuaaugcucugaucaacgaucaacuuauuaugaagaaucaucugcgcgacaucaugggcaucccuuauugcaacuacucuaaauauugguaccucaaucacaccgugacagggaagaccucccugcccagauguuggcuggucagcaacggaucuuaccucaaugaaacgcacuucagcgacgauauugagcagcaggccgacaacaugaucacagagcugcuucaaaaagaauauauggaucggcagggcaagaccccucuggggcucguggaccuguuuguguucuccaccucuuuuuaccugauuagcaucuuccuucaccucguccgcauuccgacacauagacacguuaucggaaaacccugcccuaagccccaucggcugaaucacaugggcauuuguuccugcggccuguauaaacacccuggggugcccgugaaguggaagcgcugaggacuagugcaucacauuuaaaagcaucucagccuaccaugagaauaagagaaagaaaaugaagaucaauagcuuauucaucucuuuuucuuuuucguugguguaaagccaacacccugucuaaaaaacauaaauuucuuuaaucauuuugccucuuuucucugugcuucaauuaauaaaaaauggaaagaaccuagaucuaaaaaaaaaaaaaaaaaaaaaaaaaaaaaaaaaaaaaaaaaaaaaaaaaaaaaaaaaaaaaaaaugcaucccccccccccccccccccccccccccccccaaaggcucuuuucagagccaccagaauu

SEQ ID NO: 3228 - RNA, 1855 nt, Artificial Sequence
  mRNA product Design i-2 comprising derived and/or modified sequence from LASV(Lassa virus/H.sapiens-wt/NGA/2018/ISTH_0959;Clade II)__AVV65099__GPC (opt5)
ggggcgcugccuacggagguggcagccaucuccuucucggcaucaagcuuaccaugggccagaucauuaccuucuuucaagaggugccccacgucaucgaagagguuaugaacauugugcugaucgcccucagccugcuugcuauucugaaggggaucuacaauguggucacaugcggacucuucggccugguguccuuucuucugcucugugggagaucuugcagcacgaccuauaaaggaguuuacgaacugcagacacuggagcucgacauggccucccugaacaugaccaugccucuuucuuguacaaagaauaacagccaucacuauaucauggugggcaaugaaaccgggcuggagcucacacugaccaacacguccauuaucaaucauaaauucugcaaccuuucugaugcgcacaagaaaaaucuguacgaccaugcucucaugagcauuaucuccaccuuucaccugagcauuccgaacuucaaucaguaugaggccaugucuugugauuuuaacggaggcaagaucuccguccaguacaaucugagccacgccuaugcuauugacgccgcuaaccauugcggcacaaucgccaauggggugcuccaaaccuucaugcggauggcguggggaggcucuuacaucgcccuggauuccgggaagggaagcugggacuguauuaugacaucuuaccaguaucuuaucauucagaacaccacgugggaagaucacugccaguuuucccgccccagcccuaucggcuaccuggggcuccugucccaaagaacacgggacauuuauaucucucgcagacuucugggaaccuucacauggacccucagcgauuccgagggcaacgaaacccccggcggguacugucugacacgguggaugcugaucgaggcugagcucaaaugcuuuggaaauacggccguugcuaaguguaacgaaaaacaugacgaggaguucugcgauaugcugcgccuuuuugacuucaauaagcaggccauuagacggcugaaaaccgaagcgcagaugagcauccagcucauuaacaaggccgugaaugcucugaucaacgaucaacuuauuaugaagaaucaucugcgcgacaucaugggcaucccuuauugcaacuacucuaaauauugguaccucaaucacacagucaccgggaagacaucccugcccagauguuggcuggugagcaacggaucuuaccucaaugaaacccacuucagcgacgauauugagcagcaggccgacaacaugaucacggagcugcuucaaaaagaauauauugaucggcagggcaagacaccucuggggcucguggaccuguuugucuucuccaccucuuuuuaccugaucagcauuuuccuucaccucguuaaaaucccgacccaucgccacgugauuggaaagcccugcccuaaaccccauagacugaaucacaugggcaucuguuccugcggccuguauaagcacccuggggugcccgucaaguggaaacggugaggacuagugcaucacauuuaaaagcaucucagccuaccaugagaauaagagaaagaaaaugaagaucaauagcuuauucaucucuuuuucuuuuucguugguguaaagccaacacccugucuaaaaaacauaaauuucuuuaaucauuuugccucuuuucucugugcuucaauuaauaaaaaauggaaagaaccuagaucuaaaaaaaaaaaaaaaaaaaaaaaaaaaaaaaaaaaaaaaaaaaaaaaaaaaaaaaaaaaaaaaaugcaucccccccccccccccccccccccccccccccaaaggcucuuuucagagccaccagaauu

SEQ ID NO: 3229 - RNA, 1855 nt, Artificial Sequence
  mRNA product Design i-2 comprising derived and/or modified sequence from LASV(LASV003-NIG-2008;Clade II)__AIT17580__GPC (opt5)
ggggcgcugccuacggagguggcagccaucuccuucucggcaucaagcuuaccaugggccagaucauuaccuucuuucaagaggugccccacgucaucgaagagguuaugaacauugugcugaucgcccucagccugcuugcuauucugaaggggaucuacaauguggccacaugcggacucuucggccuggucuccuuucuucugcucugugggagaucuugcagcacgaccuauaaaggaguguacgaacugcagacacuggagcucgacauggcgucccugaacaugaccaugccucuuucuuguacaaagaauaacagccaucacuauaucaugguuggcaaugaaaccgggcuggagcucacacugaccaacacguccauuaucaaucauaaauucugcaaccuuucugaugcucacaagaaaaaucuguacgaccaugcccucaugagcauuaucuccaccuuucaccugagcauuccgaacuucaaucaguaugaggccaugucuugugauuuuaacggaggcaagaucuccgugcaguacaaucugagccacacauaugcugucgacgccgcuaaccauugcggcaccauugccaauggggugcuccaaacauucaugcggauggcguggggaggcucuuacaucgcccuggauuccgggaagggaagcugggacuguaucaugaccucuuaccaguaucuuauuauccagaacacgacaugggaagaucacugccaguuuucccgccccagcccuauuggcuaccuggggcuccugucccaaagaacccgggacaucuauauuucucgcagacuucugggaacauucaccuggacccucagcgauuccgagagcaacgaaacacccggcggcuacugucugacgcgguggaugcugaucgaggcugagcucaaaugcuuugggaauaccgccguugcuaaguguaacgaaaaacaugacgaggaguucugcgauaugcugcgccuuuuugacuucaauaagcaggccaucagacggcugaaagcggaagcccagaugucuauucagcucaucaacaaggcugugaaugcccugauuaacgaucaacuuaucaugaagaaucaucugcgcgacauuaugggaaucccuuauugcaacuacuccaaauauugguaccucaaucacacagucaccggcagaacaagccugccccgguguuggcuggugucuaacgggagcuaccucaaugaaacccacuucuccgacgauaucgagcagcaggcugacaacaugauuacggagcugcuucaaaaggaauauauggaucgccagggaaaaacaccucugggccucguggaccuguuugucuucucuaccagcuuuuaccugaucuccauuuuccuucaccucguuaagaucccgacccauagacacgugauugggaaacccugcccuaagccccaucggcugaaucacaugggaaucuguagcugcggccuguauaaacacccuggcgugcccgucaaguggaagcgcugaggacuagugcaucacauuuaaaagcaucucagccuaccaugagaauaagagaaagaaaaugaagaucaauagcuuauucaucucuuuuucuuuuucguugguguaaagccaacacccugucuaaaaaacauaaauuucuuuaaucauuuugccucuuuucucugugcuucaauuaauaaaaaauggaaagaaccuagaucuaaaaaaaaaaaaaaaaaaaaaaaaaaaaaaaaaaaaaaaaaaaaaaaaaaaaaaaaaaaaaaaaugcaucccccccccccccccccccccccccccccccaaaggcucuuuucagagccaccagaauu

SEQ ID NO: 3230 - RNA, 1855 nt, Artificial Sequence
  mRNA product Design i-2 comprising derived and/or modified sequence from LASV(LASV035-NIG-2009;Clade II)__AIT17588__GPC (opt5)
ggggcgcugccuacggagguggcagccaucuccuucucggcaucaagcuuaccaugggccagaucauuaccuucuuucaagaggugccccacgucaucgaagagguuaugaacauugugcugaucgcccucagccugcuugcuauucugaaggggaucuacaauguggccacaugcggacucuucggccuggucuccuuucuucugcucugugggagaucuugcagcacgaccuauaaaggaguguacgaacugcagacacuggagcucgacauggcgucccugaacaugaccaugccucuuucuuguacaaagaauaacagccaucacuauaucaugguuggcaaugaaaccgggcuggagcucacacugaccaacacguccauuaucaaucauaaauucugcaaccuuucugaugcucacaagaaaaaucuguacgaccaugcccucaugagcauuaucuccaccuuucaccugagcauuccgaacuucaaucaguaugaggccaugucuugugauuuuaacggaggcaagaucuccgugcaguacaaucugagccacgcuuaugccgucgacgcugccaaccauugcggcacaauugcgaauggggugcuccaaaccuucaugcggauggccuggggaggcucuuacaucgcucuggauuccgggaagggaagcugggacuguaucaugacaucuuaccaguaucuuauuauccagaacaccacgugggaagaucacugccaguuuucccgccccagcccuauuggcuaccuggggcuccugucccaaagaacacgggacaucuauauuucucgcagacuucugggaaccuucacauggacccucagcgauuccgagggcaacgaaacccccggcggguacugucugacacgguggaugcugaucgaggccgagcucaaaugcuuuggaaauacggcuguugccaaguguaacgaaaaacaugacgaggaguucugcgauaugcugcgccuuuuugacuucaauaagcaggcgaucagacggcugaaagccgaagcucagaugagcauucagcucaucaacaaggccgugaaugcucugauuaacgaucaacuuaucaugaagaaucaucugcgcgacauuaugggcaucccuuauugcaacuacucuaaauauugguaccucaaucacaccgucacagggaagaccucccugcccagauguuggcuggugagcaacggaucuuaccucaaugaaacacacuucagcgacgauaucgagcagcaggccgacaacaugauuaccgagcugcuucaaaaagaauauaucgaucggcagggcaagacgccucuggggcucguggaccuguuugucuucuccacaucuuuuuaccugauuagcaucuuccuucaccucguuaaaauuccgacccaucgccacgugaucggaaagcccugcccuaaaccccauagacugaaucacaugggcauuuguuccugcggccuguauaagcacccuggggugcccgucaaguggaaacggugaggacuagugcaucacauuuaaaagcaucucagccuaccaugagaauaagagaaagaaaaugaagaucaauagcuuauucaucucuuuuucuuuuucguugguguaaagccaacacccugucuaaaaaacauaaauuucuuuaaucauuuugccucuuuucucugugcuucaauuaauaaaaaauggaaagaaccuagaucuaaaaaaaaaaaaaaaaaaaaaaaaaaaaaaaaaaaaaaaaaaaaaaaaaaaaaaaaaaaaaaaaugcaucccccccccccccccccccccccccccccccaaaggcucuuuucagagccaccagaauu

SEQ ID NO: 3231 - RNA, 1855 nt, Artificial Sequence
  mRNA product Design i-2 comprising derived and/or modified sequence from LASV(LASV1000-NIG-2009;Clade II)__AIT17782__GPC (opt5)
ggggcgcugccuacggagguggcagccaucuccuucucggcaucaagcuuaccaugggccagaucauuaccuucuuucaagaggugccccacgucaucgaagagguuaugaacauugugcugaucgcccucagccugcuugcuauucugaaggggaucuacaauguggccacaugcggacucuucggccuggucuccuuucuucugcucugugggagaucuugcagcacgaccuauaaaggaguguacgaacugcagacacuggagcucgacauggcgucccugaacaugaccaugccucuuucuuguacaaagaauaacagccaucacuauaucaugguuggcaaugaaaccgggcuggagcucacacugaccaacacguccauuaucaaucauaaauucugcaaccuuucugaugcucacaagaaaaaucuguacgaccaugcccucaugagcauuaucuccaccuuucaccugagcauuccgaacuucaaucaguaugaggccaugucuugugauuuuaacggaggcaagaucuccgugcaguacaaucugagccacacauaugcugucgacgccgcuaaccauugcggcaccauugccaauggggugcuccaaacauucaugcggauggcguggggaggcucuuacaucgcccuggauuccgggaagggaagcugggacuguaucaugaccucuuaccaguaucuuauuauccagaacacgacaugggaagaucacugccaguuuucccgccccagcccuauuggcuaccuggggcuccugucccaaagaacccgggacaucuauauuucucgcagacuucugggaacauucaccuggacccucagcgauuccgagggcaacgaaacacccggcggguacugucugacgcgguggaugcugaucgaggcugagcucaaaugcuuuggaaauaccgccguugcuaaguguaacgaaaaacaugacgaggaguucugcgauaugcugcgccuuuuugacuucaauaagcaggccaucaaaagacugaagacagaagcgcagaugagcauucagcucaucaacaaggccgugaaugcucugauuaacgaucaacuuaucaugaaaaaucaucugcgggacauuaugggcaucccuuauugcaacuacucuaaguauugguaccucaaucacaccgucacagggaaaaccucccugccccgcuguuggcuggugagcaacggaucuuaccucaaugaaacgcacuucagcgacgauaucgagcagcaggccgacaacaugauuacagagcugcuucaaaaggaauauaucgauagacagggcaaaaccccucuggggcucguggaccuguuugucuucuccaccucuuuuuaccugauuagcaucuuccuucaccucguuaagauuccgacacaucggcacguggugggaaaacccugcccuaagccccaucgccugaaucacaugggcaucuguuccugcggccuguauaagcacccugggguccccgugaaauggaagagaugaggacuagugcaucacauuuaaaagcaucucagccuaccaugagaauaagagaaagaaaaugaagaucaauagcuuauucaucucuuuuucuuuuucguugguguaaagccaacacccugucuaaaaaacauaaauuucuuuaaucauuuugccucuuuucucugugcuucaauuaauaaaaaauggaaagaaccuagaucuaaaaaaaaaaaaaaaaaaaaaaaaaaaaaaaaaaaaaaaaaaaaaaaaaaaaaaaaaaaaaaaaugcaucccccccccccccccccccccccccccccccaaaggcucuuuucagagccaccagaauu

SEQ ID NO: 3232 - RNA, 1855 nt, Artificial Sequence
  mRNA product Design i-2 comprising derived and/or modified sequence from LASV(LASV221-NIG-2010;Clade II)__AIT17624__GPC (opt5)
ggggcgcugccuacggagguggcagccaucuccuucucggcaucaagcuuaccaugggccagaucauuaccuucuuucaagaggugccccacgucaucgaagagguuaugaacauugugcugaucgcccucagccugcuugcuauucugaaggggaucuacaauguggccacaugcggacucuucggccuggucuccuuucuucugcucugugggagaucuugcagcacgaccuauaaaggaguguacgaacugcagacacuggagcucgacauggcgucccugaacaugaccaugccucuuucuuguacaaagaauaacagccaucacuauaucaugguuggcaaugaaaccgggcuggagcucacacugaccaacacguccauuaucaaucauaaauucugcaaccuuucugaugcucacaagaaaaaucuguacgaccaugcccucaugagcauuaucuccaccuuucaccugagcauuccgaacuucaaucaguaugaggccaugucuugugauuuuaacggaggcaagaucuccgugcaguacaaucugagccacacauaugcuauugacgccgcuaaccauugcggcaccaucgccaaugggguccuccaaacauucaugcggauggcguggggaggcucuuacaucgcccuggauuccgggaagggaagcugggacuguauuaugaccucuuaccaguaucuuaucauucagaacacgacaugggaagaucacugccaguuuucccgccccagcccuaucggcuaccuggggcuccugucccaaagaacccgggacauuuauaucucucgcagacuucugggaacauucaccuggacccucagcgauuccgagggcaacgaaacacccggcggguacugucugacgcgguggaugcugaucgaggcugagcucaaaugcuuuggaaauaccgccguggcuaaguguaacgaaaaacaugacgaggaguucugcgauaugcugcgccuuuuugacuucaauaagcaggccauuagacggcugaaaacagaagcgcagaugagcauccagcucauuaacaaggccguuaaugcucugaucaacgaucaacuuauuaugaagaaucaucugcgcgacaucaugggcaucccuuauugcaacuacucuaaauauugguaccucaaucacaccgugacagggaagaccucccugcccagauguuggcuggucagcaacggaucuuaccucaaugaaacgcacuucagcgacgauauugagcagcaggccgacaacaugaucacagagaugcugcaaaaagaauauauggaucggcagggcaagaccccucuugggcugguggaccucuuuguguucuccaccucuuuuuaccugauuagcaucuuccugcaccuugucaaaauuccgacacaucgccacguuaucggaaagcccugcccuaaaccccauagacucaaucacaugggcauuuguuccugcggccuguauaagcacccuggggugcccgugaaguggaaacggugaggacuagugcaucacauuuaaaagcaucucagccuaccaugagaauaagagaaagaaaaugaagaucaauagcuuauucaucucuuuuucuuuuucguugguguaaagccaacacccugucuaaaaaacauaaauuucuuuaaucauuuugccucuuuucucugugcuucaauuaauaaaaaauggaaagaaccuagaucuaaaaaaaaaaaaaaaaaaaaaaaaaaaaaaaaaaaaaaaaaaaaaaaaaaaaaaaaaaaaaaaaugcaucccccccccccccccccccccccccccccccaaaggcucuuuucagagccaccagaauu

SEQ ID NO: 3233 - RNA, 1855 nt, Artificial Sequence
  mRNA product Design i-2 comprising derived and/or modified sequence from LASV(LASV237-NIG-2010;Clade II)__AIT17638__GPC (opt5)
ggggcgcugccuacggagguggcagccaucuccuucucggcaucaagcuuaccaugggccagaucauuaccuucuuucaagaggugccccacgucaucgaagagguuaugaacauugugcugaucgcccucagccugcuugcuauucugaaggggaucuacaauguggccacaugcggacucuucggccuggucuccuuucuucugcucugugggagaucuugcagcacgaccuauaaaggaguguacgaacugcagacacuggagcucgacauggcgucccugaacaugaccaugccucuuucuuguacaaagaauaacagccaucacuauaucaugguuggcaaugaaaccgggcuggagcucacacugaccaacacguccauuaucaaucauaaauucugcaaccuuucugaugcucacaagaaagaccuguacgaucaugcccucaugagcauuaucuccaccuuucaccugagcauuccgaauuucaaccaguaugaggccaugucuugugacuuuaauggaggcaagaucuccgugcaguacaaccugagccacacauaugcugucgaugccgcuaaucauugcggcaccauugccaacggggugcuccaaacauucaugcggauggcguggggaggcucuuacaucgcccuggacuccgggaagggaagcugggauuguaucaugaccucuuaccaguaucuuauuauccagaauacgacaugggaagaccacugccaguuuucccgccccagcccuauuggcuaccuggggcuccugucccaaagaacccgggauaucuauauuucucgcagacuucugggaacauucaccuggacccucagcgacuccgagggcaacgaaacacccggcggguacugucugacgcgguggaugcugaucgaggcugagcucaaaugcuuuggaaacaccgccguugcuaaguguaaugaaaaacaugaugaggaguucugcgacaugcugcgccuuuuugauuucaacaagcaggccaucagacggcugaaaacagaagcgcagaugagcauucagcucaucaauaaggccgugaacgcucugauuaaugaccaacuuaucaugaagaaccaucugcgcgacauuaugggcaucccuuauugcaauuacucuaaauauugguaccucaaccacaccgucacagggaagaccucccugcccagauguuggcuggugagcaauggaucuuaccucaacgaaacgcacuucagcgaugacaucgagcagcaggccgauaauaugauuacagagcugcuucaaaaagaauauauggaccggcagggcaagaccccucuggggcucguggaucuguuugucuucuccaccucuuuuuaccugaucagcauuuuccuucaccucaucaaaauuccgacacaucgccacaucaccggaaagcccugcccuaaaccccauagacugaaccacaugggcauuuguuccugcggccuguauaagcacccugggguucccgugaaguggaaacggugaggacuagugcaucacauuuaaaagcaucucagccuaccaugagaauaagagaaagaaaaugaagaucaauagcuuauucaucucuuuuucuuuuucguugguguaaagccaacacccugucuaaaaaacauaaauuucuuuaaucauuuugccucuuuucucugugcuucaauuaauaaaaaauggaaagaaccuagaucuaaaaaaaaaaaaaaaaaaaaaaaaaaaaaaaaaaaaaaaaaaaaaaaaaaaaaaaaaaaaaaaaugcaucccccccccccccccccccccccccccccccaaaggcucuuuucagagccaccagaauu

SEQ ID NO: 3234 - RNA, 1855 nt, Artificial Sequence
  mRNA product Design i-2 comprising derived and/or modified sequence from LASV(LASV253-NIG-2011;Clade II)__AIT17670__GPC (opt5)
ggggcgcugccuacggagguggcagccaucuccuucucggcaucaagcuuaccaugggccagaucauuaccuucuuucaagaggugccccacgucaucgaagagguuaugaacauugugcugaucgcccucagccugcuugcuauucugaaggggaucuacaauguggccacaugcggacucuucggccuggucuccuuucuucugcucugugggagaucuugcagcacgaccuauaaaggaguguacgaacugcagacacuggagcucgacauggcgucccugaacaugaccaugccucuuucuuguacaaagaauaacagccaucacuauaucaugguuggcaaugaaaccgggcuggagcucacacugaccaacacguccauuaucaaucauaaauucugcaaccuuucugaugcucacaagaaaaaucuguacgaccaugcccucaugagcauuaucuccaccuuucaccugagcauuccgaacuucaaucaguaugaggccaugucuugugauuuuaacggaggcaagaucuccgugcaguacaaucugagccacacauaugcugucgacgccgcuaaccauugcggcaccauugccaauggggugcuccaaacauucaugcggauggcguggggaggcucuuacaucgcccuggauuccgggaagggaagcugggacuguaucaugaccucuuaccaguaucuuauuauccagaacacgacaugggaagaucacugccaguuuucccgccccagcccuauuggcuaccuggggcuccugucccaaagaacccgggacaucuauauuucucgcagacuucugggaacauucaccuggacccucagcgauuccgagggcaacgaaacacccggcggguacugucugacgcgguggaugcugaucgaggcugagcucaaaugcuuuggaaauaccgccguugcuaaguguaacgaaaaacaugacgaggaguucugcgauaugcugcgccuuuuugacuucaauaagcaggccaucagacggcugaaagcggaagcccagaugagcauucagcucaucaacaaggcugugaaugcccugauuaacgaucaacuuaucaugaagaaucaucugcgcgacauuaugggcaucccuuauugcaacuacucuaaauauugguaccucaaucacacagucaccgggagaacaucccugccccgguguuggcuggugagcaacggaucuuaccucaaugaaacccacuucagcgacgauaucgagcagcaggcugacaacaugauuacggagcugcuucaaaaggaauauaucgaucgccagggcaaaacaccucuggggcucguggaccuguuugucuucuccaccucuuuuuaccugauuagcaucuuccuucaccucguuaagauuccgacccauagacacaucauuggaaaacccugcccuaagccccaucggcugaaucacaugggcaucuguuccugcggccuguauaaacacccuggggugcccgugaaguggaagcgcugaggacuagugcaucacauuuaaaagcaucucagccuaccaugagaauaagagaaagaaaaugaagaucaauagcuuauucaucucuuuuucuuuuucguugguguaaagccaacacccugucuaaaaaacauaaauuucuuuaaucauuuugccucuuuucucugugcuucaauuaauaaaaaauggaaagaaccuagaucuaaaaaaaaaaaaaaaaaaaaaaaaaaaaaaaaaaaaaaaaaaaaaaaaaaaaaaaaaaaaaaaaugcaucccccccccccccccccccccccccccccccaaaggcucuuuucagagccaccagaauu

SEQ ID NO: 3235 - RNA, 1855 nt, Artificial Sequence
  mRNA product Design i-2 comprising derived and/or modified sequence from LASV(LASV254-NIG-2011;Clade II)__AIT17674__GPC (opt5)
ggggcgcugccuacggagguggcagccaucuccuucucggcaucaagcuuaccaugggccagaucauuaccuucuuucaagaggugccccacgucaucgaagagguuaugaacauugugcugaucgcccucagccugcuugcuauucugaaggggaucuacaauguggccacaugcggacucuucggccuggucuccuuucuucugcucugugggagaucuugcagcacgaccuauaaaggaguguacgaacugcagacacuggagcucgacaugaccaaccugaauaugacaaugccucuuuccuguaccaagaacaauucucaucacuauaucaugguuggcaacgaaacagggcuggagcucacccugacgaauaccagcauuaucaaccauaaauucugcaaucuuuccgaugcgcacaagaaaaaccuguacaaucaugcucucaugucuauuaucagcacauuucaccuguccauuccgaacuucaaucaguaugaggccaugagcugugacuuuaacggaggcaagaucucugugcaguacaaucugucccacagcuaugccgucgaugcugccaaccauugcggcaccauugcuaacggggugcuccaaacauucaugcggauggccuggggaggcucuuacaucgcgcuggacuccgggaagggaaauugggauuguaucaugaccagcuaccaguaucuuauuauccagaacacgacaugggaagaccacugccaguuuucucgccccuccccuauuggcuaccuggggcuccugagccaaagaacccgggauaucuauauuucccgcagacuucugggaacauucaccuggacccucucugacagcgagggcaaugaaacacccggcggguacugucugacgcgguggaugcugaucgaggccgagcucaaaugcuuuggaaacaccgcuguugccaaguguaaugaaaaacaugaugaggaguucugcgacaugcugcgccuuuuugauuucaacaagcaggcuaucagacggcugaaaacagaagcccaggcgaauauucagcucaucaacaaggccgugaaugcucugauuaacgaccaacuuaucaugaagaaucaucugcgcgauauuaugggcaucccuuauugcaacuacuccaaauauugguaccucaaucacaccgucacagggaagaccagccugcccagauguuggcuggugucuaacggauccuaccucaaugaaacgcacuucagcgacgacaucgagcagcaggccgauaacaugauuacagagcugcuucaaaaagaauauauggaccggcagggcaagaccccucuggggcucguggaucuguuugucuucucuaccagcuuuuaccugaucuccauuuuccuucaccucguuaaaaucccgacacaucgccacgugauuggaaagcccugcccuaaaccccauagacugaaccacaugggcaucuguucuugcggccuguauaagcacccuggggugcccgucaaguggaaacggugaggacuagugcaucacauuuaaaagcaucucagccuaccaugagaauaagagaaagaaaaugaagaucaauagcuuauucaucucuuuuucuuuuucguugguguaaagccaacacccugucuaaaaaacauaaauuucuuuaaucauuuugccucuuuucucugugcuucaauuaauaaaaaauggaaagaaccuagaucuaaaaaaaaaaaaaaaaaaaaaaaaaaaaaaaaaaaaaaaaaaaaaaaaaaaaaaaaaaaaaaaaugcaucccccccccccccccccccccccccccccccaaaggcucuuuucagagccaccagaauu

SEQ ID NO: 3236 - RNA, 1855 nt, Artificial Sequence
  mRNA product Design i-2 comprising derived and/or modified sequence from LASV(Nig08-A19;Clade III)__ADU56618__GPC (opt5)
ggggcgcugccuacggagguggcagccaucuccuucucggcaucaagcuuaccaugggccagaucgugaccuucuuucaagaggucccccacguuauugaagaggugaugaacaucgugcugauugcccucagcauccuggcuauucuuaaggggcuguacaauaucgccacaugcggacucaucggccuggucacguuccuucugcucuccgggagaucuuguagcaugaccuauaaaggaguguacgaacugcagacacuggagcucaacaugaauacccugaacaugacaaugccucuuuccugcaccaagaauaacucucaucacuauauuaugguuggcaaugaaacagggcuggagcucacccugacgaacaccagccuucugcaucacaaauuuuguaaucucuccgacgcgcauaagaaaaaccuguacgaucacacacugaugucuaucauuagcaccuuccaccucuccaucccgaauuuuaaccaguaugaggcuaugagcugcgacuucaauggaggcaagauuacagugcaguacaaccugucucauuccuaugccaucgaugccgcuaaucacuguggcaccgucgccaacggggugcuucaaacguuuaugcggauggcuuggggaggcagcuacauugcccuggacucugggcgcggaaagugggauugcaucaugacauccuaccaguaucucaucauucagaacaccacaugggaagaccauugucaguucagcagacccucuccuaucggcuaccuggggcuucugucccaacggacccgcgauauuuauaucagcagacggcuccugggaaccuuuacauggacgcuguccgacucugagggcaaugaaacccccggcggguacugccucacacgcuggaugcugauugaggcggagcuuaaauguuucggaaacaccgccguugcuaagugcaaugaaaaacacgaugaggaauuuugugacaugcugagacucuucgauuuuaacaagcaggccauccggcgccugaaagcugaggcccagaugagcauccagcuuauuaauaaggcggugaacgcccugaucaaugaccaacucauuaugaagaaccaccugagagauaucaugggcauuccuuauugcaauuacuccaaauauugguaccugaaccauacaagcaccgggcggacgucucucccccgcugcuggcuggucuccaauggaagcuaccuuaacgaaacacacuucucugacgacaucgagcagcaggcugauaauaugaucaccgagaugcugcaaaaggaauaucucgacagacagggcaaaaccccucuggggcugguggaucuuuucguguuuagcacauccuucuaccucauuucuaucuuucugcaucuggucaagauuccgacccaccggcauaucguuggaaaacccuguccuaagccccaccgccucaaccacaugggcauuugcagcuguggccuguauaaacagccuggggugcccgugagauggaagcggugaggacuagugcaucacauuuaaaagcaucucagccuaccaugagaauaagagaaagaaaaugaagaucaauagcuuauucaucucuuuuucuuuuucguugguguaaagccaacacccugucuaaaaaacauaaauuucuuuaaucauuuugccucuuuucucugugcuucaauuaauaaaaaauggaaagaaccuagaucuaaaaaaaaaaaaaaaaaaaaaaaaaaaaaaaaaaaaaaaaaaaaaaaaaaaaaaaaaaaaaaaaugcaucccccccccccccccccccccccccccccccaaaggcucuuuucagagccaccagaauu

SEQ ID NO: 3237 - RNA, 1858 nt, Artificial Sequence
  mRNA product Design i-2 comprising derived and/or modified sequence from LASV(G1180-SLE-2010;Clade IV)__AIT17168__GPC (opt5)
ggggcgcugccuacggagguggcagccaucuccuucucggcaucaagcuuaccaugggccagaucgugaccuucuuucaagaggucccccacguuauugaagaggugaugaacaucgugcugauugcccucagcauccuggcuguccuuaaggggcuguacaauuucgccacaugcggacucgugggccugcuuacguuucugcuccugugugggagauccugcaccgcgucucgguauaaaggaguuuacgaacugcagacacucgagcugaacauggaaacccuuaauaugacaaugccucugagcuguaccaagaacaauucccaucacuauauuauggugggcaacgagacagggcucgagcugacccuuacgaauaccucuaucaucaaccauaaauucugcaaucugagcgacgcucacaagaaaaaccucuacgaucaugcccugauguccauuaucucuacauuucaccugagcauuccgaauuucaaccaguaugaagccauguccugugacuuuaauggaggcaagaucagcguccaguacaaccucucucacuccuaugcuggcgaugccgcuaaucauugcgggaccguggccaacggaguucugcaaacauucaugcgcauggcguggggcgggagcuacauugcccuugacucuggacacggcuccugggauuguaucaugaccagcuaccaguaucugauuauccagaacacgacaugggaggaccauugccaguuuucuagacccuccccuaucggguaccucggacugcuuagccaacggacccgcgauauuuauaucuccagacggcugcucggcacauucaccuggacccugucugacagcgaaggcaaggauacacccgggggauacugucugacgcgcuggaugcucauugaggcugagcugaaaugcuuuggcaauaccgccguggcuaaguguaacgaaaaacacgacgaggaguucugcgauaugcuuagacuguuugacuucaauaagcaggccauccagcggcucaaagcggaagcccagauguccauucaacugaucaacaaggcugucaaugcccuuaucaacgaucagcugauuaugaagaaucaccuccgcgacaucauggggauuccuuauugcaacuacagcaaauauugguaccugaaucauacaaccacaggaaagaccucucugcccaaauguuggcucguguccaacggcagcuaccugaaugaaacgcacuucucugacgauaucgagcagcaagcugacaacaugauuacagagaugcuucagaaggaauauauggagagacaggggaaaaccccucugggacucguggaucuguuugucuucagcaccuccuuuuaccugaucucuaucuuccuucaucucguuaagauuccgacacaccggcauaucgugggcaaaagcugccccaagccucaccgccugaaucacaugggcauuuguuccugcgggcuguauaagcagcccggagugccugucaaauggaagagaugaggacuagugcaucacauuuaaaagcaucucagccuaccaugagaauaagagaaagaaaaugaagaucaauagcuuauucaucucuuuuucuuuuucguugguguaaagccaacacccugucuaaaaaacauaaauuucuuuaaucauuuugccucuuuucucugugcuucaauuaauaaaaaauggaaagaaccuagaucuaaaaaaaaaaaaaaaaaaaaaaaaaaaaaaaaaaaaaaaaaaaaaaaaaaaaaaaaaaaaaaaaugcaucccccccccccccccccccccccccccccccaaaggcucuuuucagagccaccagaauu

SEQ ID NO: 3238 - RNA, 1858 nt, Artificial Sequence
  mRNA product Design i-2 comprising derived and/or modified sequence from LASV(G1442-SLE-2011;Clade IV)__AIT17180__GPC (opt5)
ggggcgcugccuacggagguggcagccaucuccuucucggcaucaagcuuaccaugggccagaucgugaccuucuuucaagaggucccccacguuauugaagaggugaugaacaucgugcugauugcccucagcauccuggcuguccuuaaggggcuguacaauguggccacaugcggacucauuggccugguuacguuccuucugcucugugggagauccugcaccacaacccuguauaaaggaguguacgaacugcagacacucgagcugaacauggaaacccuuaauaugacaaugccucugucuuguaccaagaacaauagccaucacuauauccgggucggcaacgagacggggcucgagcugacccuuacaaauaccuccaucauuaaccauaaauuuugcaaucugucugacgcgcacaagaaaaaccucuacgaucaugcucugaugagcaucauuuccacauuccaccugucuaucccgaauuuuaaccaguaugaagccaugagcugugacuucaauggaggcaagauuuccgugcaguacaaccucagccacucuuaugccggcgaugcugccaaucauugcgggaccguugcuaacggagugcugcaaacguuuaugcgcauggccuggggcggguccuacaucgcgcuugacagcggaagaggcaacugggauuguauuaugacaucuuaccaguaucugaucauccagaauaccacaugggacgaucacugccaguucucccggcccagcccuauuggguaccucggacugcuuucucaacgcaccagagacgucuauaucucccggcgccugcucggcaccuuuacauggacgcugagcgauuccgagggcaaggacacccccgggggauacugucugacaagauggaugcucauugaagccgagcugaaaugcuucggcaacaccgcuguggccaaguguaaugagaaacaugaugaagaguuuugcgacaugcuucggcuguucgauuuuaacaagcaggcuauccagcgccucaaagccgaagcgcagaugucuauucaacugaucaauaaggccgugaacgcucuuaucaaugaccagcugauuaugaagaaccaccucagagacaucauggggauuccuuauugcaauuacagcaaauauugguaccugaacaauacagccaccggaaagacgucccugcccaaauguuggcucaucagcaacggcucuuaccugaaugagacacacuucuccgaugacauugaacaggaggcugauaacaugaucaccgagaugcuucaaaaggaauauauggagcggcaggggaaaaccccucugggacucgucgaccuguucguuuuuagcacaucuuucuaccugaucagcauuuuucuucaucucgugaagaucccgacccaccgccauauugugggcaaauccugccccaagccucacagacugaaucauaugggcaucuguucuugcgggcuguauaagcagcccggagucccugugcgguggaaacgcugaggacuagugcaucacauuuaaaagcaucucagccuaccaugagaauaagagaaagaaaaugaagaucaauagcuuauucaucucuuuuucuuuuucguugguguaaagccaacacccugucuaaaaaacauaaauuucuuuaaucauuuugccucuuuucucugugcuucaauuaauaaaaaauggaaagaaccuagaucuaaaaaaaaaaaaaaaaaaaaaaaaaaaaaaaaaaaaaaaaaaaaaaaaaaaaaaaaaaaaaaaaugcaucccccccccccccccccccccccccccccccaaaggcucuuuucagagccaccagaauu

SEQ ID NO: 3239 - RNA, 1858 nt, Artificial Sequence
  mRNA product Design i-2 comprising derived and/or modified sequence from LASV(G3010-SLE-2013;Clade IV)__AIT17344__GPC (opt5)
ggggcgcugccuacggagguggcagccaucuccuucucggcaucaagcuuaccaugggccagaucgugaccuucuuucaagaggucccccacguuauugaagaggugaugaacaucgugcugauugcccucagcauccuggcuguccuuaaggggcuguacaauuucgccacaugcggacucgugggccugguuacguuucuucugcucugugggagauccugcaccacaucucuguauaaaggaguguacgaacugcagacccucgagcugaacauggaaacacuuaauaugaccaugccucugagcuguacaaagaacaauucccaucacuauauuauggucggcaacgagaccgggcucgagcugacgcuuaccaauacaucuaucaucaaccauaaauucugcaaucugagcgacgcgcacaagaaaaaccucuacaaucaugcucugauguccauuaucucuaccuuucaccugagcauuccgaacuucaaucaguaugaagccauguccugugauuuuaacggaggcaagaucagcgugcaguacaaucucucucacuccuaugccggcgacgcugccagccauugcgggacaguugcuaacggagugcugcaaaccuucaugcggauggccuggggcgggucuuacauugcgcuugauuccggauacggcaagugggacuguaucaugacgagcuaucaguaccugauuauccagaacacaaccugggaggaucacugccaguuuucucgccccuccccuaucggguaucucggacugcuuagccaaagaacacgggacauuuacaucucccgcagacugcucggcaccuucaccuggacacugucugauagcgaaggcaaagacacgcccgggggauauugucugacccgguggaugcucauugaggccgagcugaagugcuuuggcaauacagcugucgccaaauguaacgaaaagcaugaugaggaguucugcgacaugcuucgccuguuugauuucaauaaacaggcuauccagagacucaagaccgaagcccagauguccauucaacugaucaacaaggcggugaaugcccuuaucaacgaccagcugauuaugaaaaaucaccuccgggauaucauggggauuccuuacugcaacuauagcaaguacugguaccugaaucacacaaccacgggaaaaacaucucugcccaaguguuggcucguguccaacggcagcuaucugaaugaaacccauuucucugacgacaucgagcagcaagcugauaacaugauuaccgagaugcuucagaaagaauacauggagcgccaggggaagacaccucugggacucgucgaccuguuuguuuucagcaccuccuuuuaucugaucucuaucuuccuucaccucgugaaaauuccgacacauagacacaucgugggcaagagcugccccaagccucaucggcugaaucacaugggcauuuguuccugcgggcuguacaaacagcccggagucccugugcgcuggaagagaugaggacuagugcaucacauuuaaaagcaucucagccuaccaugagaauaagagaaagaaaaugaagaucaauagcuuauucaucucuuuuucuuuuucguugguguaaagccaacacccugucuaaaaaacauaaauuucuuuaaucauuuugccucuuuucucugugcuucaauuaauaaaaaauggaaagaaccuagaucuaaaaaaaaaaaaaaaaaaaaaaaaaaaaaaaaaaaaaaaaaaaaaaaaaaaaaaaaaaaaaaaaugcaucccccccccccccccccccccccccccccccaaaggcucuuuucagagccaccagaauu

SEQ ID NO: 3240 - RNA, 1858 nt, Artificial Sequence
  mRNA product Design i-2 comprising derived and/or modified sequence from LASV(G502-SLE-2009;Clade IV)__AIT17126__GPC (opt5)
ggggcgcugccuacggagguggcagccaucuccuucucggcaucaagcuuaccaugggccagaucgugaccuucuuucaagaggucccccacguuauugaagaggugaugaacaucgugcugauugcccucagcauccuggcuguccuuaaggggcuguacaauuucgccacaugcggacucgugggccugcuuacguuucugcuccugugugggagauccugcaccacaggacuguauaaaggcguuuacgaacuccagacccuggagcuuaacauggaaacacugaauaugaccaugccucucucuuguacaaagaacaauagccaucacuauauuaugguggggaacgagaccggacuggagcuuacgcugaccaauacauccaucaucaaccauaaauucugcaaucucucugacgcgcacaagaaaaaccuguacgaucaugcucugaugagcauuaucuccaccuuucaccucucuauuccgaauuucaaccaguaugaagccaugagcugugacuuuaauggcggcaagaucuccguccaguacaaccugagccacucuuaugccggggaugcugccgaccauugcggaacaguggcuaauggcguucuucaaaccuucaugcggauggccuggggaggguccuacauugcgcuggauagcggccgcgggagaugggacuguaucaugacgucuuaccaguaucucauuauccagaacacaaccugggaggaucacugccaguuuucccggcccagcccuaucggauaccugggccuucugucucaacgcacaagagacauuuauaucucccggcgccuccugggcaccuucaccuggacacugagcgauuccgaagggaaggacacgcccggaggcuacugucucaccagauggaugcugauugaggccgagcuuaaaugcuuugggaacacagcuguggccaaguguaaugaaaaacaugaugaggaguucugcgacaugcugcggcucuuugauuucaacaagcaggcuauccagcgccugaaagccgaagcgcagaugucuauucaacuuaucaauaaggccgucaacgcucugaucaaugaccagcucgugaugaagaaccaccugagagacauuaugggaaucccuuauugcaauuacagccgguauugguaccugaaccacaccacaaccggccgcacgucccuccccaaauguuggcuggugagcaaugggucuuaccuuaacgaaacacauuucuccgaugacauugagcagcaagccgauaauaugaucaccgagaugcugcagaaggaauauauggagagacagggaaaaaccccucucggccuggucgaccuguuuguuuucagcacaucuuuuuaccuuauuagcaucuuccuccaccuggugaagaucccgacccaucggcacauugugggcaaauccugccccaagccucaucgccugaaccacauggggaucuguucuugcggacucuauaaacagcccggcgucccugugaaguggaagagaugaggacuagugcaucacauuuaaaagcaucucagccuaccaugagaauaagagaaagaaaaugaagaucaauagcuuauucaucucuuuuucuuuuucguugguguaaagccaacacccugucuaaaaaacauaaauuucuuuaaucauuuugccucuuuucucugugcuucaauuaauaaaaaauggaaagaaccuagaucuaaaaaaaaaaaaaaaaaaaaaaaaaaaaaaaaaaaaaaaaaaaaaaaaaaaaaaaaaaaaaaaaugcaucccccccccccccccccccccccccccccccaaaggcucuuuucagagccaccagaauu

SEQ ID NO: 3241 - RNA, 1858 nt, Artificial Sequence
  mRNA product Design i-2 comprising derived and/or modified sequence from LASV(G733-SLE-2010;Clade IV)__AIT17154__GPC (opt5)
ggggcgcugccuacggagguggcagccaucuccuucucggcaucaagcuuaccaugggccagaucgugaccuucuuucaagaggucccccacguuauugaagaggugaugaacaucgugcugauugcccucagcauccuggcuguccuuaaggggcuguacaauuucgccacaugcggaauugugggccucguuuccuuucugcuucugugugggagaucuugcacgaccagccucuauaaaggaguguacgaacugcagacacuggagcucaacauggaaacccugaauaugacaaugccucuuuccuguaccaagaacaauucucaucacuauaucauggucggcaacgagacagggcuggagcucacccugacgaauaccagcaucauuaaccauaaauucugcaaucuuuccgacgcgcacaagaaaaaccuguacgaucaugcucucaugucuaucauuagcacauuucaccuguccaucccgaauuucaaccaguaugaagccaugagcugugacuuuaauggaggcaagauuucugugcaguacaaccugucccacagcuaugccggcgaugcugccaaucauugcgggaccaucgcuaacggaguucuccaaacauucaugcggauggccuggggcgggucuuacauugcgcuggacuccggacgcgauagaugggacuguaucaugaccagcuaccaguaucuuaucauucagaacacgacaugggaggaucacugccaguuuucucggcccuccccuaucggcuaccuggggcuccugagccaacgcaccagagacauuuauaucucccggcgccuucugggaacauucaccuggacccucucugauagcgaaggcaaggacacacccggcggguacugucugacgagauggaugcugauugaggccgagcucaaaugcuuuggaaauaccgcuguggccaaguguaacgaaaaacaugaugaggaguucugcgacaugcugcggcuuuuugauuucaauaagcaggcuauccagcgccugaaagccgaagcgcagauguccauccaacucauuaacaaggccgucaaugcucugaucaacgaccagcuuauuaugaagaaucaccugagagacaucaugggcauuccuuauugcaacuacagcaaauauugguaccucaaucacacaaccacagggaagaccucucugcccaaauguuggcugguguccaacggaagcuaccucaaugaaacgcauuucucugaugacaucgagcagcaagccgauaacaugaucacagagaugcugcagaaggaauauauggagcggcagggcaaaaccccucuugggcugguggaccucuuugucuucagcaccuccuuuuaccugauuucuaucuuccugcaccuuguuaagauuccgacacaucgccacguggugggaaaaagcugccccaagccucauagacucaaucacaugggcaucuguuccugcggccuguaugggcagcccggagucccugugaaguggaaacggugaggacuagugcaucacauuuaaaagcaucucagccuaccaugagaauaagagaaagaaaaugaagaucaauagcuuauucaucucuuuuucuuuuucguugguguaaagccaacacccugucuaaaaaacauaaauuucuuuaaucauuuugccucuuuucucugugcuucaauuaauaaaaaauggaaagaaccuagaucuaaaaaaaaaaaaaaaaaaaaaaaaaaaaaaaaaaaaaaaaaaaaaaaaaaaaaaaaaaaaaaaaugcaucccccccccccccccccccccccccccccccaaaggcucuuuucagagccaccagaauu

SEQ ID NO: 3242 - RNA, 1858 nt, Artificial Sequence
  mRNA product Design i-2 comprising derived and/or modified sequence from MOPV/LASV reassortant(IGS-1;Clade IV)__AFY05576__GPC (opt5)
ggggcgcugccuacggagguggcagccaucuccuucucggcaucaagcuuaccaugggccagaucgugaccuucuuucaagaggucccccacguuauugaagaggugaugaacaucgugcugauugcccucagcguccuggcugugcuuaaggggcuguacaauuucgccacaugcggacucguuggccuggugacguuucuucugcucugugggagauccugcaccacaucucuguauaaaggagucuacgaacugcagacccucgagcugaacauggaaacacuuaauaugaccaugccucugagcuguacaaagaacaauucccaucacuauaucauggugggcaacgagaccgggcucgagcugacgcuuaccaauacaucuauuaucaaccauaaauucugcaaucugagcgacgcgcacaagaaaaaccucuacgaucaugcucugauguccaucauuucuaccuuucaccugagcaucccgaauuucaaccaguaugaagccauguccugugacuuuaauggaggcaagauuagcguucaguacaaccucucucacuccuaugccggcgaugcugccaaucauugcgggacaguggcuaacggaguccugcaaaccuucaugcggauggccuggggcgggagcuacaucgcgcuugacucuggacgcggcaacugggauuguauuaugacguccuaccaguaucugaucauucagaauacaaccugggaggaccacugccaguuuagcagacccucuccuaucggguaccucggacugcuuucccaacggacacgcgauaucuauauuagcagacggcugcucggcaccuucaccuggacacuguccgacucugaaggcgaggauacgcccgggggauacugucugacccgcuggaugcucaucgaggccgaacugaagugcuuuggcaacacagcuguggccaaauguaaugagaagcaugacgaagaguucugcgauaugcuuagacuguuugacuucaacaaacaggcuauucagcggcucaaggccgaagcgcagaugagcauccaacugauuaauaaagccgugaacgcucuuaucaaugaucagcugaucaugaagaaccaccuccgcgacauuauggggaucccuuauugcaauuacuccaaguauugguaccugaaccacaccacaaccggaagaacgagccugcccaaauguuggcucgucucuaauggcuccuaccugaacgagacacauuucagcgacgauauugagcagcaagccgacaauaugaucaccgaaaugcuucagaaggaguauauggaacggcaggggaaaaccccucugggacucguugaucuguuuguguucucuaccagcuuuuaccugauuuccaucuuccuucaccucgugaagaucccgacacaucgccacauugucggcaaaucuugccccaagccucauagacugaaccacaugggcaucuguagcugcgggcuguauaaacagcccggagugccuguuaaguggaagcggugaggacuagugcaucacauuuaaaagcaucucagccuaccaugagaauaagagaaagaaaaugaagaucaauagcuuauucaucucuuuuucuuuuucguugguguaaagccaacacccugucuaaaaaacauaaauuucuuuaaucauuuugccucuuuucucugugcuucaauuaauaaaaaauggaaagaaccuagaucuaaaaaaaaaaaaaaaaaaaaaaaaaaaaaaaaaaaaaaaaaaaaaaaaaaaaaaaaaaaaaaaaugcaucccccccccccccccccccccccccccccccaaaggcucuuuucagagccaccagaauu

SEQ ID NO: 3243 - RNA, 1858 nt, Artificial Sequence
  mRNA product Design i-2 comprising derived and/or modified sequence from LASV(LM765-SLE-2012;Clade IV)__AIT17814__GPC (opt5)
ggggcgcugccuacggagguggcagccaucuccuucucggcaucaagcuuaccaugggccagaucgugaccuucuuucaagaggucccccacguuauugaagaggugaugaacaucgugcugauugcccucagcauccuggcuguccuuaaggggcuguacaauuucgccacaugcggacucgugggccugguuacguuucuucugcucugugggagauccugcaccacaucucuguauaaaggaguguacgaacugcagacccucgagcugaacauggaaacacuuaauaugaccaugccucugagcuguacaaagaacaauucccaucacuauauuauggucggcaacgagaccgggcucgagcugacgcuuaccaauacaucuaucaucgaccauaaauucugcaaccugagcgaugcgcaccggaagaaucucuacgaccaugcucugauguccauuaucucuaccuuucaccugagcauuccgaacuucaaucaguaugaagccauguccugugauuuuaacggaggcaaaaucagcgugcaguacaaucucucucacuccuaugccaaggacgcugccgaucauugcggcacaguugcuaacggggugcugcaaaccuucaugcgcauggccuggggaggcagcuacauugcgcuugacucugggagaggacggugggauuguaucaugacguccuaccaguaucugauuauccagaauacaaccugggaggaccacugccaguuuagccgccccucuccuaucggcuaccucgggcugcuuucccaaagaacacgggauauuuauaucagccgcagacugcucggaaccuucaccuggacacuguccgacucugaaggcaaggauacgcccggcggguacugucugacccgguggaugcucauugaggccgagcugaaaugcuuuggaaacacagcugucgccaaguguaacgaaaaacaugacgaggaguucugcgauaugcuucgccuguuugacuucaauaagcaggcuauccagagacucaaagccgaagcgcagaugagcauucaacugaucaacaaggccgugaaugcucuuaucaacgaccagcugauuaugaagaaucaccuccgggauaucaugggcauuccuuauugcaacuacuccaaauauugguaccugaaucacaccacaaccgggaagacgagccugcccaaauguuggcucgugucuaacggauccuaccugaaugaaacacauuucagcgacgauaucgagcagcaagccgacaacaugauuaccgagaugcuucagaaggaauauauggagcgccagggcaaaaccccucuggggcucgucgaucuguuuguuuucucuaccagcuuuuaccugaucuccaucuuccuucaccucgugaagauuccgacacauagacacaucgugggaaaacccugcccuaagccccaucggcugaaucacaugggcauuuguucuugcggccuguauaagcagccugggguccccgugaaauggaagcgcugaggacuagugcaucacauuuaaaagcaucucagccuaccaugagaauaagagaaagaaaaugaagaucaauagcuuauucaucucuuuuucuuuuucguugguguaaagccaacacccugucuaaaaaacauaaauuucuuuaaucauuuugccucuuuucucugugcuucaauuaauaaaaaauggaaagaaccuagaucuaaaaaaaaaaaaaaaaaaaaaaaaaaaaaaaaaaaaaaaaaaaaaaaaaaaaaaaaaaaaaaaaugcaucccccccccccccccccccccccccccccccaaaggcucuuuucagagccaccagaauu

SEQ ID NO: 3244 - RNA, 1858 nt, Artificial Sequence
  mRNA product Design i-2 comprising derived and/or modified sequence from LASV(LM776-SLE-2012;Clade IV)__AIT17824__GPC (opt5)
ggggcgcugccuacggagguggcagccaucuccuucucggcaucaagcuuaccaugggccagaucgugaccuucuuucaagaggucccccacguuauugaagaggugaugaacaucgugcugauugcccucagcauccuggcuguccuuaaggggcuguacaauuucgccacaugcggacucgugggccugguuacguuucuucugcucugugggagauccugcaccacaucuguguauaaaggagucuacgaacugcagacccuggagcucaacauggaaacacugaauaugaccaugccucuuagcuguacaaagaacaauucccaucacuauauuauggugggcaacgagaccgggcuggagcucacgcugaccaauacaucuaucaucaaccauaaauucugcaaucuuagcgacgcgcacaagaaaaaccuguacgaucaugcucucauguccauuaucucuaccuuucaccugagcauuccgaauuucaaccaguaugaagccauguccugugacuuuaauggaggcaagaucagcguucaguacaaccugucucacuccuaugccggcgaugcugccaaucauugcgggacaguggcuaacggaguccuccaaaccuucaugcggauggccuggggcgggagcuacauugcgcuggacucuggacacggcaagugggauuguaucaugacguccuaccaguaucuuauuauccagaacacaaccugggaggaccauugccaguuuagccgccccucuccuaucggguaccugggacuccugucccaaagaacacgggauauuuauaucagccgcagacuucugggcaccuucaccuggacacucuccgacucugaaggcaaagauacgcccgggggauacugucugacccgguggaugcugauugaggccgagcucaagugcuuuggcaauacagcuguggccaaauguaacgaaaagcacgacgaggaguucugcgauaugcugcgccuuuuugacuucaauaaacaggcuauccagagacugaaggccgaagcgcagaugagcauucaacucaucaacaaggccgugaaugcucugaucaacgaucagcuuauuaugaaaaaucaucugcgggacaucauggggauuccuuauugcaacuacuccaaguauugguaccucaaucacaccacaaccggaaaaacgagccugcccaaguguuggcuggucucuaacggcuccuaccucaaugaaacacacuucagcgacgauaucgagcagcaagccgacaacaugauuaccgagaugcugcagaaagaauauauggagcgccaggggaagaccccucuuggacugguugaucucuuuguguucucuaccagcuuuuaccugaucuccaucuuccugcaucuugugaaaauuccgacacacagacauaucgucggcaagucuugccccaagccucaccggcucaaucacaugggcauuuguagcugcgggcuguauaaacagcccggagugccuguucgcuggaagagaugaggacuagugcaucacauuuaaaagcaucucagccuaccaugagaauaagagaaagaaaaugaagaucaauagcuuauucaucucuuuuucuuuuucguugguguaaagccaacacccugucuaaaaaacauaaauuucuuuaaucauuuugccucuuuucucugugcuucaauuaauaaaaaauggaaagaaccuagaucuaaaaaaaaaaaaaaaaaaaaaaaaaaaaaaaaaaaaaaaaaaaaaaaaaaaaaaaaaaaaaaaaugcaucccccccccccccccccccccccccccccccaaaggcucuuuucagagccaccagaauu

SEQ ID NO: 3245 - RNA, 1858 nt, Artificial Sequence
  mRNA product Design i-2 comprising derived and/or modified sequence from LASV(Mad39;Clade IV)__ANH09722__GPC (opt5)
ggggcgcugccuacggagguggcagccaucuccuucucggcaucaagcuuaccaugggccagaucgugaccuucuuucaagaggucccccacguuauugaagaggugaugaacaucgugcugauugcccucagcauccuggcuguccuuaaggggcuguacaauguggccacaugcggacucauuggccugguuacguuccuucugcucugugggagauccugcaccacaacccuguauaaaggaguguacgaacugcaggcgcucgagcugaacauggaaacacuuaauaugaccaugccucugucuuguacaaagaacaauagccaucacuauauccgggucggcaacgagaccgggcucgagcugacgcuuaccaauacaucccugaucaaccauaaauuuugcaaucucucugacgcucacaagaaaaaccuguacgaucaugcccugaugagcauuaucuccaccuuccaccucucuauuccgaauuuuaaccaguaugaagccaugagcugugacuucaaugauggaaagaucuccgugcaguacaaccugagccacacauaugcuggcgacaccgccaaucauugcggcacgguugcuaacggggugcuucaaacauuuaugcgcauggccuggggaggcucuuacauugcgcuggauuccgggagaggaggcugggacuguaucaugaccagcuaccaguaucucauuauccagaacacaaccugggaggaucacugccaguucucucggcccuccccuaucggguaccugggacuucugagccaacgcaccagagacauuuauaucucucggcgccuccugggcacauuuacguggacccuguccgauagcgaaggcaaggacacacccgggggauacugucucaccagauggaugcugauugaggccgagcuuaaaugcuucggcaauacagcugucgccaaguguaacgaaaaacaugaugaggaauuuugcgacaugcugcgccucuucgauuuuaauaagcaggcuauccagcggcugaaagccgaggcgcagauguccauucaacuuaucaacaaggccgugaaugcucugaucaacgaccagcucauuaugaagaaucaccugagagacaucauggggauuccuuauugcaacuacucuaaauauugguaccugaaucacaccgugacgggaaagacaagccuccccaaauguuggcuggucuccaacggcagcuaccuuaaugaaacccauuucucugaugacaucgagcagcaagccgauaacaugauuaccgagaugcugcagaaggaauauauggagcggcaggggaaaacaccucucggacugguugaccuguucguguuuuccaccagcuucuaccuuaucucuaucuuucuccaccuggugaagauuccgacacaucgccacgucgugggcaaacccugcccuaagccccauagacugaaucacaugggcaucuguagcugcggguucuauaagcagccuggaguucccgugcgguggaaacgcugaggacuagugcaucacauuuaaaagcaucucagccuaccaugagaauaagagaaagaaaaugaagaucaauagcuuauucaucucuuuuucuuuuucguugguguaaagccaacacccugucuaaaaaacauaaauuucuuuaaucauuuugccucuuuucucugugcuucaauuaauaaaaaauggaaagaaccuagaucuaaaaaaaaaaaaaaaaaaaaaaaaaaaaaaaaaaaaaaaaaaaaaaaaaaaaaaaaaaaaaaaaugcaucccccccccccccccccccccccccccccccaaaggcucuuuucagagccaccagaauu

SEQ ID NO: 3246 - RNA, 1858 nt, Artificial Sequence
  mRNA product Design i-2 comprising derived and/or modified sequence from LASV(Z0947-SLE-2011;Clade IV)__AIT17840__GPC (opt5)
ggggcgcugccuacggagguggcagccaucuccuucucggcaucaagcuuaccaugggccagaucgugaccuucuuucaagaggucccccacguuauugaagaggugaugaacaucgugcugauugcccucagcauccuggcuguccuuaaggggcuguacaauuucgccacaugcggacucgugggccugguuacguuucuucugcucugugggagauccugcaccauuucucuguauaaaggaguguacgaacugcagacacucgagcugaacauggaaacccuuaauaugacaaugccucugagcuguaccaagaacaauucccaucacuauaucauggucggcaacgagacagggcucgagcugacccuuacgaauaccucuaucauuaaccauaaauucugcaaucugagcgacgcgcacaagaaaaaccucuacgaucaugcucugauguccaucauuucuacauuucaccugagcaucccgaauuucaaccaguaugaagccauguccugugacuuuaauggaggcaagauuagcgugcaguacaaccucucucacuccuaugccggcgaugcugccaaucauugcgggaccguugcuaacggagugcugcaaacauucaugcggauggccuggggcgggagcuacaucgcgcuugacucuggacgcgauagaugggacuguauuaugaccuccuaccaguaucugaucauccagaacacgacaugggaggaucacugccaguuuagccggcccucuccuauuggcuaccucgggcugcuuucccaacgcaccagagacaucuauauuagccggcgccugcucggaacauucaccuggacccuguccgauucugaaggcaaggacacacccggcggguacugucugacgagauggaugcucaucgaggccgagcugaaaugcuuuggaaauaccgcugucgccaaguguaacgaaaaacaugaugaggaguucugcgacaugcuucggcuguuugauuucaauaagcaggcuauucagcgccucaaagccgaagcgcagaugagcauccaacugaucaacaaggccgugaaugcucuuauuaacgaccagcugaucaugaagaaucaccucagagacauuaugggcaucccuuauugcaacuacuccaaauauugguaccugaaucacacaaccacagggaagaccagccugcccaaauguuggcucgugucuaacggauccuaccugaaugaaacgcauuucagcgaugacauugagcagcaagccgauaacaugaucacagagaugcuucagaaggaauauauggagcggcagggcaaaaccccucuggggcucgucgaccuguuuguuuucucuaccagcuuuuaccugaucuccauuuuccuucaccucgugaagaucccgacacaucgccacauugugggaaaacccugcccuaagccccauagacugaaucacaugggcaucuguucuugcggccuguauaagcagccugggguccccgugaaauggaagcggugaggacuagugcaucacauuuaaaagcaucucagccuaccaugagaauaagagaaagaaaaugaagaucaauagcuuauucaucucuuuuucuuuuucguugguguaaagccaacacccugucuaaaaaacauaaauuucuuuaaucauuuugccucuuuucucugugcuucaauuaauaaaaaauggaaagaaccuagaucuaaaaaaaaaaaaaaaaaaaaaaaaaaaaaaaaaaaaaaaaaaaaaaaaaaaaaaaaaaaaaaaaugcaucccccccccccccccccccccccccccccccaaaggcucuuuucagagccaccagaauu

SEQ ID NO: 3247 - RNA, 1858 nt, Artificial Sequence
  mRNA product Design i-2 comprising derived and/or modified sequence from LASV(Josiah;Clade IV)__NP_694870__GPC (opt6)
ggggcgcugccuacggagguggcagccaucuccuucucggcaucaagcuuaccaugggccaaauaguaaccuucuuucaagaaguaccacacguaauagaagaaguaaugaauauaguacuaauagcucuaagcguucucgccgucuuaaaaggacuauacaacuucgcaacauguggccuaguaggauuaguaacauuucuacuccuaugcggacgaucaugcacaacaucacuauauaaaggaguauacgaacugcaaacacuagaacuaaacauggaaacacuaaauaugacaaugcccuuaaguugcacuaaaaacaacucccaccacuauauaauggucggaaacgaaacaggccucgaauuaacauuaacaaacacaaguauaauaaaucacaaauuuuguaaucuaagcgaugcacacaaaaagaauuuauaugaccacgcacuaaugucaauaauaaguaccuuucauuuaucaaucccuaacuuuaaccaauaugaagcaaugucuugcgauuucaacggaggaaaaauaucaguacaauauaacuuaucacacaguuacgcaggagaugcagccaaccacugcggcacuguagcaaacggaguacuccaaaccuucaugagaauggcauggggcggauccuauauugcacucgacaguggaagagguaacugggauugcaucaugaccucauaccaauauuuaauaauacagaauacaacaugggaagaccauugccaauuuucuagaccaucaccuauagguuacuuaggcuuauuaucacaaagaacacgagauauauacauauccagaagauuacuaggaacauuuacauggacacuaagugauagcgaaggcaaagacaccccaggagguuacugcuuaaccagauggauguuaauagaagcagaauuaaaauguuuuggcaauacagcaguagcaaaaugcaacgaaaaacacgaugaagaauuuugcgauaugcucagacuuuucgacuucaacaaacaagcaauccaaagauuaaaagcugaagcacaaaugagcauacaacuaaucaauaaagcaguuaaugccuuaauaaacgaccaacuaauaaugaaaaaccacuuaagagacauaaugggaauaccauacugcaacuauaguaaauacugguaucuaaaucacacaacuacaggccguacuucacugccaaaauguuggcuaguaagcaacggaucauauuuaaacgaaacacauuuuucagacgauauagaacaacaagcugauaacaugauaaccgaaaugcuucaaaaagaauacauggaaagacaaggcaaaacaccccucggucuaguagaccuauuugucuucagcacaaguuuuuacuuaauaucaauauucuuacaccuuguaaaaauaccaacacauagacacauaguaggaaaaucauguccaaaaccacauagacuaaaccacaugggaauauguagcugcggucuauauaaacaaccaggagucccaguaaaauggaaacgauaaggacuagugcaucacauuuaaaagcaucucagccuaccaugagaauaagagaaagaaaaugaagaucaauagcuuauucaucucuuuuucuuuuucguugguguaaagccaacacccugucuaaaaaacauaaauuucuuuaaucauuuugccucuuuucucugugcuucaauuaauaaaaaauggaaagaaccuagaucuaaaaaaaaaaaaaaaaaaaaaaaaaaaaaaaaaaaaaaaaaaaaaaaaaaaaaaaaaaaaaaaaugcaucccccccccccccccccccccccccccccccaaaggcucuuuucagagccaccagaauu

SEQ ID NO: 3248 - RNA, 1855 nt, Artificial Sequence
  mRNA product Design i-2 comprising derived and/or modified sequence from LASV(LP;Clade I)__AAF86701__GPC (opt6)
ggggcgcugccuacggagguggcagccaucuccuucucggcaucaagcuuaccaugggacaaauuauaacauucuuucaagaaguaccccauguaauagaagaagucaugaacauaguucuaauagcacuaucuuuauuagcaauucuaaaaggcuuauauaacauagcaaccugcggcauaaucggccuagucgcuuuccuauucuuaugcggaaaaaguugcucauuaacacuaaaaggaggauaugaacuacaaacucucgaauuaaacauggaaacauuaaacaugacaaugccuuuaucuugcacaaaaaauucaucacaucacuacauaagagucggaaaugaaacaggacuagaacuuacacuaacaaacacaucaauaauuaaccacaaauuuugcaaccucucugacgcacauaaaaaaaaccuauacgaccaugcacuaaugucaauaauaucgacauuccaccuaucaauaccaaacuuuaaccaauaugaagccaugucaugcgacuucaacggugguaaaauauccguccaauacaaucuaucccauuccuacgcaggagacgccgcagaacauugcggaacugucgcaaacggaguacuacaaacuuucaugagaauggcauggggaggaagauauauugcccuagauucaggaaaaggaaacugggacugcaucaugaccucauaccaauaccuuauaauacaaaauacuacaugggaagaccacugccaauucucacgaccaucuccuaucggauaucuaggacuacuaucacaacgaacucgagacauauacauaagcagacgauuauuaggcacauuuacuuggacuuuaucagacucagaaggcaaugaaacaccaggaggauacuguuuaacacgauggaugcucauagaagcagaauuaaaauguuucggaaauacagcaguagcaaaaugcaacgaaaaacacgacgaagaauucugcgacauguuaagauuauucgacuucaauaaacaagcaauacguagacuaaaagcagaagcucaaaugucaauacaacuuauaaacaaagccguaaacgcacuaaucaacgaccaauuaaucaugaaaaaucauuuacgagacauuauggguauaccauacugcaacuacucuaaauacugguaucuaaaucacacaucuucaggacgaacaucauuaccaaaaugcuggcuuauaaguaacggaucauacuuaaaugaaacacaauucucagacgacauagaacaacaagcagauaacaugauaacugaaaugcuacaaaaagaauacauagaacgucaaggaaaaacacccuuaggacuaguagacauauucauauuuuccacaucauuuuacuuaauuucaaucuuccuacaccucauaaaaaucccuacccacagacacauaguaggaaaaccaugcccaaaaccacauagacuaaaccauaugggaguaugcucaugcggcuuauacaaacauccaggaguaccaacaaaauggaaacgauaaggacuagugcaucacauuuaaaagcaucucagccuaccaugagaauaagagaaagaaaaugaagaucaauagcuuauucaucucuuuuucuuuuucguugguguaaagccaacacccugucuaaaaaacauaaauuucuuuaaucauuuugccucuuuucucugugcuucaauuaauaaaaaauggaaagaaccuagaucuaaaaaaaaaaaaaaaaaaaaaaaaaaaaaaaaaaaaaaaaaaaaaaaaaaaaaaaaaaaaaaaaugcaucccccccccccccccccccccccccccccccaaaggcucuuuucagagccaccagaauu

SEQ ID NO: 3249 - RNA, 1855 nt, Artificial Sequence
  mRNA product Design i-2 comprising derived and/or modified sequence from LASV(803213;Clade II)__AAF86703__GPC (opt6)
ggggcgcugccuacggagguggcagccaucuccuucucggcaucaagcuuaccaugggacaaauaauaaccuucuuccaagaaguaccacacguaauagaagaagucaugaacauagucuuaauagcauuaucauuauuagcaauauuaaaaggaauauacaacguagcaacaugcggauuauucggacuaauauccuuucuauuauuaugcggacgcagcugcucugucacauacaaaggagucuaugaacuacaaacauuagaacuaaacauggcaaacuuaaacaugacaaugccacuauccugcacaaaaaacaauucccaccacuacauaaugguuggcaacgaaacaggacucgaacuaacccuuacaaacacuucuauaauuaaccauaaauucugcaaccuaucagaugcacacaaaaaaaaccucuaugaccacgcacuaaugucuauaauaucaacauuucaccuaucuauaccaaacuuuaaccaauaugaagcaauguccugugauuuuaaugguggcaaaauaucuguacaauacaacuuaucacauucauucgcaguagacgcagcaaaccacugcggaacaauagcaaacggaguucuccaaacauuuaugagaauggccuggggaggaucauacaucgcacuagacucaggaaaaggaaauugggacuguauaaugaccucauaccaauaccuaaucauacaaaacacaacaugggaagaucauugccaauucucacgucccucuccaauaggauaucuaggccuccuaucacaaagaacaagagauaucuacauaucaagacgacuacucggaacauucacauggacacuaagcgacuccgaaggaaacgaagccccaggaggauacugccuuacacgauggaugcuaaucgaagccgaacuaaaaugcuuuggaaacacagcagucgcaaaauguaaugaaaaacaugaugaagaauuuugcgauaugcuaagacuauuugacuucaacaaacaagcaauaaaaagacucaaaacagaagcccaaaugucuauucaacucauaaauaaagcaguaaaugcauuaauuaacgaccaacuaaucaugaaaaaccaucuuagagauauuaugggaauaccauacuguaacuacucaagauacugguaccuaaaccacacaguaacuggaaaaacaucucuaccacgaugcuggcucguaucuaacgguucauaccuaaaugaaacacacuuuucugacgacaucgaacaacaagcagacaacaugauaacagaaaugcuacaaaaagaauacauggacagacaaggaaaaacaccacuaggucuaguagauuuauucguauucaguacaucuuucuaccuaauaucaauauuccuacaccucguaaaaauacccacacaccgccacauaguaggaaaaccauguccaaaaccacaccgacuaaaccacaugggcaucugcucaugcggacuauauaaacaccccggaguaccagucaaauggaaaagauaaggacuagugcaucacauuuaaaagcaucucagccuaccaugagaauaagagaaagaaaaugaagaucaauagcuuauucaucucuuuuucuuuuucguugguguaaagccaacacccugucuaaaaaacauaaauuucuuuaaucauuuugccucuuuucucugugcuucaauuaauaaaaaauggaaagaaccuagaucuaaaaaaaaaaaaaaaaaaaaaaaaaaaaaaaaaaaaaaaaaaaaaaaaaaaaaaaaaaaaaaaaugcaucccccccccccccccccccccccccccccccaaaggcucuuuucagagccaccagaauu

SEQ ID NO: 3250 - RNA, 1855 nt, Artificial Sequence
  mRNA product Design i-2 comprising derived and/or modified sequence from LASV(GA391;Clade III)__CAA36645__GPC (opt6)
ggggcgcugccuacggagguggcagccaucuccuucucggcaucaagcuuaccaugggacaaauaguaacauucuuccaagaaguaccacauguaauugaagaaguaaugaacauaguacuaauagcacuaucaauccuagcaauauuaaaaggauuauauaaugucgcuacuuguggacuaauaggacucguaacauuucuacuauuaucagguagaucaugcagccuuauauacaaaggaacauacgaauuacaaacauuagaacuaaacauggaaacccuaaacaugaccaugccacuauccuguaccaaaaacaacucacaccauuacauuagaguaggaaacgaaacaggucuugaacuaacauugacaaacacaagcauacuaaaccauaaauucugcaaccuaucagaugcacacaaaagaaaccuauaugaccauucacuuaugucuauaaucucaacauuucauuuauccauaccuaacuucaaucaauaugaagcaaugucuugcgauuucaacggcggaaaaauaacaguacaauacaaccucucccauuccuucgcaguagacgcagcaggccacugcgguacauuagcaaacggcguacuacaaacauuuaugagaauggcauggggcggaucauacauagcuuuagacucagguagaggaaacugggauugcaucaugacaaguuaucaauaccuaauaauucaaaacacaacaugggacgaccacugccaauucucaagaccuucaccaauaggauauuuaggucuacucucccaaagaacacgcgacauauauauaucaagaagacuacuagguacauucacauggacacuaucagauucagaaggaaacgaaacaccaggaggauacuguuuaacacgcuggaugcucauagaagcugaacuaaaaugcuuuggcaacacagcaguagcaaaauguaacgaaaaacacgacgaagaauuuugcgacauguuacgacuauucgacuuuaacaaacaagcaauaagaagacuaaaaacagaagcacaaaugucaauccaacucauuaacaaagcaguaaacgcuuuaauaaacgaccaauuaauaaugaaaaaccaccuacgagacauaaugggaauacccuauuguaacuacucacgauauugguaucuaaaccauaccucaacaggaaaaaccucccuacccagaugcuggcuaaucucaaacggaucauaccuaaacgaaacaaaauucucugacgacauagaacaacaagcugacaacaugauaaccgaaauguuacaaaaagaauacauagauagacaaggcaaaacaccacuaggauuaguagacuuauucguauucucaacaucauucuacuuaauaaguaucuuccuacaccuagugaaaauaccaacccacagacacaucgucgguaaaccauguccaaaaccacacagacuaaaucacauggguauaugcucaugcggcuuauauaaacaaccaggaguaccaguuagauggaaaagauaaggacuagugcaucacauuuaaaagcaucucagccuaccaugagaauaagagaaagaaaaugaagaucaauagcuuauucaucucuuuuucuuuuucguugguguaaagccaacacccugucuaaaaaacauaaauuucuuuaaucauuuugccucuuuucucugugcuucaauuaauaaaaaauggaaagaaccuagaucuaaaaaaaaaaaaaaaaaaaaaaaaaaaaaaaaaaaaaaaaaaaaaaaaaaaaaaaaaaaaaaaaugcaucccccccccccccccccccccccccccccccaaaggcucuuuucagagccaccagaauu

SEQ ID NO: 3251 - RNA, 1858 nt, Artificial Sequence
  mRNA product Design i-2 comprising derived and/or modified sequence from LASV(AV;Clade V)__CCA30314__GPC (opt6)
ggggcgcugccuacggagguggcagccaucuccuucucggcaucaagcuuaccaugggacaaauaguuaccuucuuccaagaaguaccacacguaauagaagaaguaaugaacauaguacucaucgcauuaagcauacuagcuguauuaaaaggucuauauaauauagcuaccuguggacuaaucggacucaucacauuuuuacuuuuaugcggucgaucauguucuucaaaccucuacaaaggaguauaugaauuacaaucauuagaccuaaauauggaaacauuaaacaugacaaugccacuaucaugcacaaaaaacaacucccaccacuacaucagaguaggaaaugauaccggacuagaacuaacucuaacaaacacaucaauacucaaccacaaauucugcaaccuaucugaugcacacaaaaaagaucuauacgaccaugcauuaauguccauaauaaguacuuuucacuuauccauaccaaacuucaaccaauacgaagcuaugucaugcgacuucaacggaggaaaaauauccguacaauauaaucuaucucacuccuacgcaauagacgcagcaaaucacugcggaaccguagcaaacgguaucuuacaaacuuucaugcgaauggccuggggaggaucauacauagccuuagacucaggaagaggaaacugggacuguauaaugacauccuaccaauaccuaaucauacaaaacacaaccugggaaaaccacugccaauucucuagaccaucacccaucggcuacuuaggauuacuaucacaacgaacuagagauauauacauaucaagaagacuacuaggaacuuuuacauggacauuauccgacucagaaggcaacgcaacaccaggaggauacugccuaacaagauggaugcuaauugaagcagaacuaaaaugcuucggcaauacagcaguagcaaaaugcaacgaaaaacacgacgaagaauuuugcgauaugcuaagauuauucgacuuuaauaaacaagcaauauccagacuaaaaucagaagcacaaaugucaauacaauuaauaaacaaagcuguuaaugcucuaauaaaugaucaacuuauaaugaaaaaccacuuacgagacauaaugggaauaccauauugcaacuacucaaaauacugguacuuaaaccauacaauaacaggaaaaacaucacuuccaaaauguuggcuagucuccaacggaucauaucuaaacgaaacccacuuuucagacgacauagaacaacaagcagacaacaugauaacagaaaugcuacaaaaagaauacauggaaagacagggaaaaacaccauuaggacuaguagaccucuucguauuuucuacaaguuucuaucuaauaucgauauuccuacgacuaguaaaaauacccacccacagacauaucgucggaaaaccaugcccaaaaccacauagacuaaaccauaugggaauaugcucauguggacuauacaaacaaccaggcguaccugucagauggaaaagauaaggacuagugcaucacauuuaaaagcaucucagccuaccaugagaauaagagaaagaaaaugaagaucaauagcuuauucaucucuuuuucuuuuucguugguguaaagccaacacccugucuaaaaaacauaaauuucuuuaaucauuuugccucuuuucucugugcuucaauuaauaaaaaauggaaagaaccuagaucuaaaaaaaaaaaaaaaaaaaaaaaaaaaaaaaaaaaaaaaaaaaaaaaaaaaaaaaaaaaaaaaaugcaucccccccccccccccccccccccccccccccaaaggcucuuuucagagccaccagaauu

SEQ ID NO: 3252 - RNA, 1855 nt, Artificial Sequence
  mRNA product Design i-2 comprising derived and/or modified sequence from LASV(Togo/2016/7082;Clade VI)__AMR44577__GPC (opt6)
ggggcgcugccuacggagguggcagccaucuccuucucggcaucaagcuuaccaugggacaaauaauaacauuuuuccaagaaguaccacacgucauugaagaaguaaugaacauaguacuaauagcacuaucauuacuagcaauacuaaaaggaguuuacaacguagcuacaugcggcauuauaggucucguaacauuccuauucuuauguggaagauccugcucacucaucuauaaaggaucauaugaacuacaaacucuagaacucaacauggaaacauuaaacaugacaaugccacucucuugcacuaaaaauucaagccaccacuacauaagaguuggaaacgaaacaggacucgaacuaaccuuaacaaauaccuccauaauaaaccacaaauucuguaauuuaucagacgcacauaaaagaaaucuauacgaccaugcauuaaugucaauacuauccacauuucaccuaucaauccccaacuucaaccaauacgaagcuaugucaugcgacuucaauggcggaaaaauaucaguccaauauaacuuaucccacgcauacgcuguagacgcagcagaacauugcggcacagucgcaaacggaguacuacaaacauucaugagaauggcauggggaggaucauacauagcacuugauucaggcagaggaaacugggauugcauaaugacaucauaccaauacuuaauaauucaaaacacaacaugggaagaucacugccaauuuucgagaccaucacccauaggauaccuaggccuacuaucacaaagaacacgcgacauauacaucucucguagacuacuaggaacauucaccuggacacuaagcgacuccgaaggcaacgaaacacccggaggauauugccuaaccagauggauguuaauagaagcugaacuaaaauguuucggaaacacugcuguagcuaaauguaaugaaaaacacgaugaggaguucugcgacaugcuaagacuauucgacuucaauaaacaagcaauccaaagauuaaaaucagaagcacaaaugucuauacaacuaauaaacaaagccguaaacgcacuaauaaaugaucaacuaaucaugaaaaaucaccucagagauaugauggguauaccauauugcaauuacucaaaauacugguaucuaaaccacacgaguucuggaagaacaucccuaccaaaaugcuggcuaguaagcaauggcagcuaccuaaacgaaacacacuucucagacgacauagaacaacaggcagacaacaugauaacagaaauguuacaaaaagaauacaucgaccgacaaggaaaaacuccacuaggccuaguugaccuauucguauuuucaacaucauuuuacuuaauaucaauauuccuacaucuaauaaaaauaccaacacauagacacauaguaggaaaaccuugccccaagccacacagauuaaaccauaugggaauaugcuccuguggacuauacaaacaaccaggaguaccaacaagauggaaaagauaaggacuagugcaucacauuuaaaagcaucucagccuaccaugagaauaagagaaagaaaaugaagaucaauagcuuauucaucucuuuuucuuuuucguugguguaaagccaacacccugucuaaaaaacauaaauuucuuuaaucauuuugccucuuuucucugugcuucaauuaauaaaaaauggaaagaaccuagaucuaaaaaaaaaaaaaaaaaaaaaaaaaaaaaaaaaaaaaaaaaaaaaaaaaaaaaaaaaaaaaaaaugcaucccccccccccccccccccccccccccccccaaaggcucuuuucagagccaccagaauu

SEQ ID NO: 3253 - RNA, 1855 nt, Artificial Sequence
  mRNA product Design i-2 comprising derived and/or modified sequence from LASV(KAK-428;Clade n.d. (VII))__ANH09740__GPC (opt6)
ggggcgcugccuacggagguggcagccaucuccuucucggcaucaagcuuaccaugggacaaauaguaacauucuuccaagaaguaccacacgucaucgaagaaguaaugaacauaguacuaauagcccucucauuauuagcaauauuaaaaggacuauacaacuucgcaacuuguggaguaauaggccuuauaacauuccuucuacuaugcggcagaucaugcuccgcaacauacaaaggacaauacgaauuacaaacauuagaacuaaauauggaaagcuuaaacaugaccaugccacucucaugcacaaaaaacaacucccaccacuauauacgcgccggaaacaacacaggacuugaauuaacccuaaccaacaccucuaucauaucacacaaauuuugcaaucuaucagacgcucacaaaaaaaaucuuuacgaccacacccuaauguccauaauaacaacauuccacuuaucuauaccaaacuucaaccaauacgaagcaaugucaugugauuucaacggaggaaagauuuccauacaauacaacuuaucucacucuuacgccggagacgccgcacaacacugcggaacaguagcaaacggaguacuucaaacauucaugagaauggcauggggaggauccuaccucgcauuagauucaggaagacgaggaugggacuguauaauauccucauaucaauaccuaaucauacaaaacacaacaugggacgaucauugccaauucucaagaccuucaccaauuggauaccuuggauucguuucacaaaaaacacgagauauuuacaucucacgcagauuauuaggaacauucaccuggacacucagcgacucagaaggccacgauaugccaggcgguuacugccuaacaagauggauguuaauagaagcagaccuaaaaugcuucggaaacacugccguagcaaaauguaacgaaaaacacgacgaagaauucugcgacauguggcgccuauucgacuucaacaaacaagcaauccaaagauuaaaagcugaagcacaaaugaauauacaacuaauaaauaaagccguaaacgcacucauaaacgaccaacuaaugaugaaaaaccaucuaagagacauaaugggaaucccauacugcaacuacuccaaauucugguaucucaauaacacaaccacaggaagaaccucuuuaccaagaugcuggcuaauaucaaacggaagcuacuuaaacgaaacacacuucucagacgacauagaacaacaagcugauaacaugauuacagaaaugcuacaaaaagaauacauggauagacaaggaaaaaccccacuaggacuuguugaccuauuuguauuuucaacaaguuucuaccuaauaacaaucuuccuacaucucguaaaaauaccuacacacagacacauaguaggaaaaccaugccccaaaccacacagacuaaaccacauggguauaugcucauguggacucuacaaacaaccaggcguuccaguccgauggaaacgauaaggacuagugcaucacauuuaaaagcaucucagccuaccaugagaauaagagaaagaaaaugaagaucaauagcuuauucaucucuuuuucuuuuucguugguguaaagccaacacccugucuaaaaaacauaaauuucuuuaaucauuuugccucuuuucucugugcuucaauuaauaaaaaauggaaagaaccuagaucuaaaaaaaaaaaaaaaaaaaaaaaaaaaaaaaaaaaaaaaaaaaaaaaaaaaaaaaaaaaaaaaaugcaucccccccccccccccccccccccccccccccaaaggcucuuuucagagccaccagaauu

SEQ ID NO: 3254 - RNA, 1855 nt, Artificial Sequence
  mRNA product Design i-2 comprising derived and/or modified sequence from LASV(Pinneo-NIG-1969;Clade I)__AIT17836__GPC (opt6)
ggggcgcugccuacggagguggcagccaucuccuucucggcaucaagcuuaccaugggacaaauaaucacauucuuucaagaagucccccacguuauagaagaaguaaugaauauaguacuaauagcacucucauuacucgcaauacuaaaaggacuauauaacauagccacaugcggaauuauaggauuaguagcauuccuuuucuuaugcggaaaauccugcucacuaacacuaaaaggcggauacgaacuacaaacacuagaauuaaacauggaaacacuaaauaugacaaugccccuaucauguaccaaaaacuccucacaccauuacaucagaguaggaaaugaaacaggacuagaauuaaccuuaacaaacacaucuauaauuaaccacaaauuuugcaaccuauccgacgcacacaaaaaaaacuuauaugaucacgcacuaaugucaauuauaucaacuuuccaccuaucaaucccaaauuuuaaucaauacgaagcaaugucaugcgacuucaacggaggaaaaauauccguacaauauaaccucucucacucauacgcaggagacgcagcagaacacuguggaacaguagcaaacgguguucuacaaacauucaugagaauggcauggggaggacgauacauagcauuagacuccggaaaaggaaauugggauugcauuaugacaucauaucaauaucuuaucauacaaaacacaacaugggaagaccacugccaauuuucacgaccaagccccauagguuacuuagguuuacucucccaaagaacaagagauauauacauuucuagaagauuauuaggaacuuucacuuggaccuuaucugacucugaaggaaacgaaacaccaggaggauauugcuuaacuagauggaugcuaauugaagccgaauuaaaaugcuucggaaacacagcagucgccaaaugcaacgaaaaacaugacgaagaauuuugugacaugcuaagacuuuucgacuucaacaaacaagcuauaagaagauuaaaagcagaagcacaaaugucaauacaauuaauaaacaaagcuguaaacgcauuaauaaacgaccaauuaauaaugaaaaaccaccuaagagacauuaugggaauacccuacuguaauuacucaaaauacugguacuuaaaccauaccucauccgggcgaaccucucuacccaaaugcuggcucauaagcaacggauccuacuuaaacgaaacacaauuuucagacgacauagaacaacaagcagauaauaugauaacagaaaugcuacaaaaagaauauauagaaagacaaggaaaaaccccacuaggauuaguugacauauuuauauucucaaccucauuuuaccucauaucaauauuuuuacaucuaauaaaaauaccaacucacagacauauaguaggaaaaccaugcccaaaaccacauagauuaaaccacaugggaguauguuccugcggacuauacaaacauccaggaguacccacaaaauggaaacgauaaggacuagugcaucacauuuaaaagcaucucagccuaccaugagaauaagagaaagaaaaugaagaucaauagcuuauucaucucuuuuucuuuuucguugguguaaagccaacacccugucuaaaaaacauaaauuucuuuaaucauuuugccucuuuucucugugcuucaauuaauaaaaaauggaaagaaccuagaucuaaaaaaaaaaaaaaaaaaaaaaaaaaaaaaaaaaaaaaaaaaaaaaaaaaaaaaaaaaaaaaaaugcaucccccccccccccccccccccccccccccccaaaggcucuuuucagagccaccagaauu

SEQ ID NO: 3255 - RNA, 1855 nt, Artificial Sequence
  mRNA product Design i-2 comprising derived and/or modified sequence from LASV(ISTH0009-NIG-2011;Clade II)__AIT17404__GPC (opt6)
ggggcgcugccuacggagguggcagccaucuccuucucggcaucaagcuuaccaugggacaaaucauaacauucuuucaagaagucccacacguaauagaagaaguaaugaauaucguauuaauagcacuauccuuacuagcaauauuaaaaggaauauacaauguagccacauguggacuauucgguuuaguaucauucuuacuucuaugcggaagaucuugcucaaccacuuacaaaggaguauacgaacuucaaacacucgaacuagauauggcaagucuaaacaugaccaugccacuaucaugcacaaaaaacaauucccaccauuacauaauggucggaaaugaaacaggauuagaauuaacauuaacaaacacaucuauuauaaaccacaaauucugcaaucuaucagacgcucacaaaaaaaaccuauacgaccacgcacucauguccauaauauccacuuuucaccuaucaauaccaaacuucaaccaauacgaagcaaugucaugugacuucaauggaggaaaaauaucaguacaauacaaccuaucccaugcauaugcaguagacgcagccaaucacuguggaacuauagcaaacgguguucuacaaacauuuaugcgaauggccugggguggauccuacauagcacuagacucuggaaaaggaucaugggauugcauaaugacuucauaccaauaccuaauaauacaaaacacaacaugggaagaccacugucaauucucaagacccucuccaauaggauaccuagguuuacuaucucaaagaacaagagauauauacaucagcagacgacuacuuggaacauucacauggacccuauccgacucagaaggaaaugaaacaccuggcggcuacugccuuaccagauggauguuaauagaagcugaauuaaaaugcuucggaaacacagccguagcaaaaugcaacgaaaaacaugacgaagaauuuugugacaugcuuagauuauucgacuuuaacaaacaagcuauacgcagauuaaaaacagaagcacaaaugaguauacaacuaauaaauaaagcaguaaacgcauuaauaaacgaccaacuaaucaugaaaaaccacuuaagagacauaaugggaauaccauacugcaacuacucaaaauacugguacuuaaaccacacugucacuggaaaaaccucauuaccacgcugcuggcuaguaucaaacggaaguuauuuaaaugaaacacauuucucagaugacauagaacaacaagcagacaauaugauaaccgaacucuuacaaaaagaauacauggacagacaaggaaaaacaccauuaggacuaguagaccucuucguuuucucaacaucauucuacuuaauaagcauuuuccuacacuuaauaaaaauaccaacacaccgccacauaaccggaaaaccaugcccaaaaccacacagauuaaaccauaugggaaucugcaguuguggucuauauaaacauccaggagucccaguaaaauggaaaagauaaggacuagugcaucacauuuaaaagcaucucagccuaccaugagaauaagagaaagaaaaugaagaucaauagcuuauucaucucuuuuucuuuuucguugguguaaagccaacacccugucuaaaaaacauaaauuucuuuaaucauuuugccucuuuucucugugcuucaauuaauaaaaaauggaaagaaccuagaucuaaaaaaaaaaaaaaaaaaaaaaaaaaaaaaaaaaaaaaaaaaaaaaaaaaaaaaaaaaaaaaaaugcaucccccccccccccccccccccccccccccccaaaggcucuuuucagagccaccagaauu

SEQ ID NO: 3256 - RNA, 1855 nt, Artificial Sequence
  mRNA product Design i-2 comprising derived and/or modified sequence from LASV(ISTH2010-NIG-2012;Clade II)__AIT17482__GPC (opt6)
ggggcgcugccuacggagguggcagccaucuccuucucggcaucaagcuuaccaugggacaaaucauaacuuucuuucaagaaguaccccacguaauagaagaaguaaugaacauaguauuaauagcacuaucucuacucgccauacucaaaggcaucuauaauguagcaacaugcggcuuauuuggauuaguaucuuuucucuuauuauguggacgauccugcucaacaacauauaaagguguauacgaauuacaaacacuagaacuagacauggccucacuaaacaugacaaugccacuaucaugcaccaaaaauaacucacaccauuauauuaugguaggcaacgaaacaggacucgaacuaacccuaacaaacacaucaauaauaaaccacaaauucugcaauuuaucugacgcacacaaaaaaaaucucuaugaccaugcccuaaugucaauaauaucaacuuuccaccuaucaaucccaaacuucaaccaauaugaagcaaugucaugcgacuuuaacggaggcaaaaucuccguacaauacaaucucucccacgcauacgcaguagacgccgcaaaccauuguggcacaauagcaaauggugucuuacaaacauucaugcguauggcauggggaggaucauacauagcucuagacagcggaaaaggcucaugggauuguauaaugacuucauaucaauacuuaauaauacaaaacauaaccugggaagaccacugucaauuuucacgacccucacccauagguuacuuaggacuacuaagccaaagaaccagagauauauacauaucuagaagauuacuaggaacauucacauggacacuaucagacuccgaaggcaacgaaacaccaggaggauacuguuuaacuagauggaugcuaauagaagcagaacuaaaaugcuucggaaauacagcaguagccaaauguaaugaaaaacaugaugaagaauucugcgauaugcuacgucuauucgacuucaacaaacaagcaauucgaagauuaaaaacagaagcacaaaugucaauacaacuaauuaacaaagcaguaaacgcauuaauaaacgaucaauuaauuaugaaaaaccacuuaagagacauaaugggaaucccauauugcaacuacucaaaauacugguauuuaaaucauacaguuacaggcaaaacaucccuaccaagaugcuggcuagucucaaacggaucuuaccugaaugaaacacacuuuucagacgacauagaacaacaagcagauaacaugauaacagaacuauuacaaaaagaauacauagacagacaaggaaaaacuccacuaggacuuguagaccuauucguauucaguacaucauucuaccucauaagcauauucuuacaccuaguaaaaauaccaacacauagacauguagucggaaaaccuugcccaaaaccacacagguuaaaccauauggguauaugcucuugcggacuauauaaacacccaggaguaccugucaaauggaaacgauaaggacuagugcaucacauuuaaaagcaucucagccuaccaugagaauaagagaaagaaaaugaagaucaauagcuuauucaucucuuuuucuuuuucguugguguaaagccaacacccugucuaaaaaacauaaauuucuuuaaucauuuugccucuuuucucugugcuucaauuaauaaaaaauggaaagaaccuagaucuaaaaaaaaaaaaaaaaaaaaaaaaaaaaaaaaaaaaaaaaaaaaaaaaaaaaaaaaaaaaaaaaugcaucccccccccccccccccccccccccccccccaaaggcucuuuucagagccaccagaauu

SEQ ID NO: 3257 - RNA, 1855 nt, Artificial Sequence
  mRNA product Design i-2 comprising derived and/or modified sequence from LASV(Lassa virus/H.sapiens-wt/NGA/2015/ISTH_0543;Clade II)__AVO03639__GPC (opt6)
ggggcgcugccuacggagguggcagccaucuccuucucggcaucaagcuuaccaugggccaaauaauaaccuucuuucaagaagucccacacguuauagaagaaguaaugaacauaguacuaauagcauuaucacuacuagcaauccuaaaaggaauauacaacguagcaacuugcggccuauucggacuaguaucauuccuccuacuaugcggacguuccugcuccacaacauacaaaggcguauacgaacuacaaacauuagaacuagacauggcaaacuuaaacaugaccaugccauuauccugcacaaaaaacaacucucaccauuauauaaugguuggaaacgaaacaggacucgaauuaacuuuaaccaacacaucaauaauuaaucauaaauucugcaacuuauccgacgcacacaaaaaaaaccuauacgaucacgcacuaaugagcauaauaucuacuuuccaucuaucaauaccaaauuucaaucaauacgaagcaaugucaugugauuucaauggcggaaaaauauccguacaauauaauuuaucccauacauacgcaguagaugcagcaaaccauugcggaacaauugcaaacggaguccuacaaacauuuaugcgaauggcauggggcggaagcuacauagcacucgauucaggaaaagguuccugggauuguauaaugacuucuuaucaauacuuagucauccaaaacacuacaugggaagaucacugccaauuuucuagaccauccccaauuggauaucugggacuacuuucccaaagaacaagagacauauacaucuccagaagacuauuaggaacauucacauggaccuuaucagacucagaaggaaacgaaacaccaggugguuacugccuaaccagauggaugcuaauagaagcagaacuaaaaugcuuuggaaacaccgcagucgcaaaauguaacgaaaaacacgacgaagaauucugcgauaugcuaagacuauuugacuucaauaaacaagccauaagaagauuaaaaacugaagcacaaaugucaauacaacuaauaaacaaagcaguaaacgcacucauaaacgaccaauuaauaaugaaaaaccacuuacgagacauaaugggcaucccauacugcaacuauucaaaauacugguaccucaaucauacaguaacaggaaaaacaucacuaccaagaugcuggcucguauccaacggaucauacuuaaacgaaacacacuuuucagacgacaucgaacaacaagcagacaauaugauaacagaacuacuccaaaaagaauauauagauagacaaggaaaaaccccacuaggacuagucgaccuauucgucuucagcacaagcuucuaccuaauauccauuuuccuucaucucguaaaaauacccacucacagacacauaacuggaaaaccaugcccaaaaccacacagauuaaaccacaugggaauaugcucauguggacuauacaaacacccagguguuccaguaaaauggaaaagauaaggacuagugcaucacauuuaaaagcaucucagccuaccaugagaauaagagaaagaaaaugaagaucaauagcuuauucaucucuuuuucuuuuucguugguguaaagccaacacccugucuaaaaaacauaaauuucuuuaaucauuuugccucuuuucucugugcuucaauuaauaaaaaauggaaagaaccuagaucuaaaaaaaaaaaaaaaaaaaaaaaaaaaaaaaaaaaaaaaaaaaaaaaaaaaaaaaaaaaaaaaaugcaucccccccccccccccccccccccccccccccaaaggcucuuuucagagccaccagaauu

SEQ ID NO: 3258 - RNA, 1855 nt, Artificial Sequence
  mRNA product Design i-2 comprising derived and/or modified sequence from LASV(Lassa virus/H.sapiens-wt/NGA/2016/ISTH_0009;Clade II)__AVO03571__GPC (opt6)
ggggcgcugccuacggagguggcagccaucuccuucucggcaucaagcuuaccaugggccaaauaauaacauucuuccaagaaguaccacacguaauagaagaaguaaugaacauuguauuaauagcacuaucacuacuagcaaucuuaaaaggaauauacaacguagccacaugcggacuacuaggacuagucucauuccuauuacuaugcggaagaucuugcucaacaacauacaaaggcguauacgaacuacaaacauuagaacuagauauggcaucucuaaacaugacaaugccauuaagcugcacaaaaaauaauucacaccauuacauaaugguaggcaacgaaacaggcuuagaacucacauuaacaaauaccucaaucauaaaucauaaauucugcaaucuaucagacgcacauaaaaaaaaccuuuaugaccacgcacuaaugucaauaauaucaacauuccacuuaucuauaccaaauuuuaaucaauaugaagcaaugucuugcgauuuuaacggaggaagaauaucaguccaauacaaucucucacacuccuacgcaguagacgcagcaaaccauugugggacaauagcaaacggaguacuacaaacauuuaugcgaauggcauggggugguaguuacauagcacuagacucaggaaaaggcucaugggacugcauaaugacaucauaccaauaccucauaauacaaaacaccaccugggaggaccacugccaauucucacgaccaucaccaauaggauauuuaggucuucucagucaaagaacaagagacauauauauaucuagaagacuacuaggaaccuucacauggacacuaucagacucagaagggaaugaaacaccaggaggauacugcuuaacaagauggauguuaauagaagcagaacuaaaaugcuucgguaacacagcaguagcaaaaugcaacgaaaaacacgacgaagaauucugcgacaugcuuagacuguucgauuucaauaaacaagcaauaaggagauuaaaaacagaagcacaaaugucaauacaauuaauaaacaaagcaguaaaugcauuaauaaacgaccaacucauaaugaaaaaucacuuaagagauauaaugggaauaccauacuguaacuacucaaaauacugguaucuaaaccauaccguaacaggcaaaaccucauuaccaagaugcugguuaguaucaaacggcuccuacuuaaacgaaacccacuucucagacgauauagaacaacaagcagacaacaugauaacagaacuacuccaaaaagaauacauagaucgacaaggaaaaacaccacuaggucuaguagaccuauucguauucucaacaagcuucuaccuaauaucaaucuuucuacaccuaguaaaaauaccaacacacagacacauaacagguaaaccaugcccaaaaccccauagacuaaaccacaugggcauauguucauguggcuuauacaaccacccaggaguaccaguaaaauggaaacgauaaggacuagugcaucacauuuaaaagcaucucagccuaccaugagaauaagagaaagaaaaugaagaucaauagcuuauucaucucuuuuucuuuuucguugguguaaagccaacacccugucuaaaaaacauaaauuucuuuaaucauuuugccucuuuucucugugcuucaauuaauaaaaaauggaaagaaccuagaucuaaaaaaaaaaaaaaaaaaaaaaaaaaaaaaaaaaaaaaaaaaaaaaaaaaaaaaaaaaaaaaaaugcaucccccccccccccccccccccccccccccccaaaggcucuuuucagagccaccagaauu

SEQ ID NO: 3259 - RNA, 1855 nt, Artificial Sequence
  mRNA product Design i-2 comprising derived and/or modified sequence from LASV(Lassa virus/H.sapiens-wt/NGA/2016/ISTH_0017;Clade II)__AVO03567__GPC (opt6)
ggggcgcugccuacggagguggcagccaucuccuucucggcaucaagcuuaccaugggacaaauaauaaccuucuuucaagaaguaccacacgucauagaagaaguaaugaacauagucuuaauugcacucucacuacuugcaauauuaaaaggaaucuacaaugucgcaacaugcggacuauuugggcuaguaaguuuucuauuauuaugcggccgauccugcuccacaacauacaaaggaguauacgaacuacaaacacuagaauuagauauggcauccuuaaacaugacaaugcccuuauccugcacuaaaaauaacucacaccacuacauaaugguaggcaaugaaacaggcuuagaauuaacacuaaccaauacaaguauaauaaaucacaaauucugcaaucuaucagaugcacacaaaaaaaaccuuuaugaccaugcauuaaugagcauuauauccaccuuccaccuuucaauaccuaacuucaaccaauacgaagcaaugucgugcgacuucaauggcggaaaaaucucaguacaauauaaccucucacacacauacgcaauagacgccgcaaaccacugcgggacuauagcaaacggaguacuacaaacauuuaugagaauggcauggggaggcucauacauagcacuagacucaggaaaaggaucaugggauugcauaaugacaucauaccaauaccuaaucauacaaaacaccacaugggaagaucauugccaauuuucaagacccucaccaauaggauaccuaggacuauuaucacaaagaacacgugacaucuacauaucaagacgacuacucggaacauucacauggacuuuaucagauuccgaagguaacgaaacccccggagguuacugccuaacaagauggaugcuaauagaagcagaauuaaaaugcuucggaaacacagcaguagcaaaauguaacgaaaaacacgaugaagaauucugugacaugcuaagacuauuugacuucaacaaacaagcaaucagaagacuaaaaacagaagcacaaaugucaauacaacuaauaaauaaagcaguaaacgcucuaauaaaugaccaacuaauaaugaaaaaccaccucagagacaucaugggaauaccauauugcaauuauuccaaauacugguaccuaaaccauaccguuacaggcaaaacaucauuaccaagauguuggcuaguaucaaauggcucauaucuaaacgaaacccacuucucagacgacauagaacaacaagcugacaacaugauaacugaacuauuacaaaaagaauacauggaccgccaaggcaaaacaccucuaggccuaguagaucucuucguauuuucaaccaguuuuuaccuaauaucaauauuccuacaccuaguaagaauaccaacucacagacacguaauaggaaaaccaugcccaaaaccacauagacuuaaccauauggguauaugcucauguggauuauacaaacaccccggcguaccaguaaaauggaaaagauaaggacuagugcaucacauuuaaaagcaucucagccuaccaugagaauaagagaaagaaaaugaagaucaauagcuuauucaucucuuuuucuuuuucguugguguaaagccaacacccugucuaaaaaacauaaauuucuuuaaucauuuugccucuuuucucugugcuucaauuaauaaaaaauggaaagaaccuagaucuaaaaaaaaaaaaaaaaaaaaaaaaaaaaaaaaaaaaaaaaaaaaaaaaaaaaaaaaaaaaaaaaugcaucccccccccccccccccccccccccccccccaaaggcucuuuucagagccaccagaauu

SEQ ID NO: 3260 - RNA, 1855 nt, Artificial Sequence
  mRNA product Design i-2 comprising derived and/or modified sequence from LASV(Lassa virus/H.sapiens-wt/NGA/2018/ISTH_0959;Clade II)__AVV65099__GPC (opt6)
ggggcgcugccuacggagguggcagccaucuccuucucggcaucaagcuuaccaugggccaaauuauaacauucuuccaagaaguaccacauguaauagaagaaguaaugaacaucguauuaauugcacucucauuauuagcuauacucaaagguaucuacaacgucgucacaugcggacuauucggccuaguuucauucuuacuccuuuguggaagaucaugcagcacaacauacaaaggaguauacgaacuacaaaccuuagaacuagauauggcaucacuaaacaugacaaugcccuuauccugcacaaaaaauaacucacaccauuacauaauggucggaaacgaaacaggauuagaauuaacauuaacaaacacauccauaauaaaucauaaauucuguaaccucucagacgcacauaaaaaaaaucuauaugaucacgcauuaaugucaaucaucucaacauuccaccuuucaauaccaaauuucaaccaauacgaagcaaugucaugcgacuucaacgguggaaaaauaucuguacaauacaauuuaucacacgccuaugcaauagaugcagcaaaucacugcggaacaaucgccaacggaguauuacaaacauucaugagaauggcauggggaggaucauacauugcacuagacucaggcaaaggaucuugggacuguaucaugacaucauaucaauacuuaauaauacaaaacacaacaugggaagaccacugccaauucucacgaccaucacccauaggauacuuaggacuacuaucacaacgaacacgagacauauacauaucaagacgacuauuaggaacauuuacuuggacacuauccgacucagaaggaaacgaaaccccugguggauauugucuaaccagauggaugcucauagaagcagaacuaaaaugcuuuggaaacaccgcaguagccaaaugcaacgaaaaacacgacgaagaauucugcgacauguuacgacuauucgauuuuaacaaacaagcaauacgaagacuaaaaacagaagcacaaaugucaauacaacuaauaaacaaagcaguaaacgcacuaauaaacgaccaacuaauaaugaaaaaccacuuacgagacauaaugggaauacccuacugcaacuacucaaaauacugguauuuaaaccacacaguaaccggaaaaacaucacuaccccgauguugguuaguauccaacggaucauaucucaacgaaacacacuucucagaugacauagaacaacaagcagacaacaugauaacagaacuccuucaaaaagaauacauagauagacaaggaaaaacaccucuaggacuaguagacuuauucguauucuccacuucauucuaucuaauaaguauuuucuuacaucuuguuaaaauaccaacacacagacacguuauaggaaaacccuguccaaaaccacacagacuaaaccauaugggcaucuguucaugcggacuauacaaacacccaggaguacccguuaaauggaaaagauaaggacuagugcaucacauuuaaaagcaucucagccuaccaugagaauaagagaaagaaaaugaagaucaauagcuuauucaucucuuuuucuuuuucguugguguaaagccaacacccugucuaaaaaacauaaauuucuuuaaucauuuugccucuuuucucugugcuucaauuaauaaaaaauggaaagaaccuagaucuaaaaaaaaaaaaaaaaaaaaaaaaaaaaaaaaaaaaaaaaaaaaaaaaaaaaaaaaaaaaaaaaugcaucccccccccccccccccccccccccccccccaaaggcucuuuucagagccaccagaauu

SEQ ID NO: 3261 - RNA, 1855 nt, Artificial Sequence
  mRNA product Design i-2 comprising derived and/or modified sequence from LASV(LASV003-NIG-2008;Clade II)__AIT17580__GPC (opt6)
ggggcgcugccuacggagguggcagccaucuccuucucggcaucaagcuuaccaugggacaaauaauaacauucuuccaagaaguaccacauguaauagaagaagucaugaacauaguacuaauagcuuuaucauuacuagcaauacuaaaaggcauauacaacguugcaacaugcggauuauucggauuaguuuccuucuuacuacuauguggaagaucauguucaacaacauauaaaggagucuacgaacuccaaacacuagaauuagacauggcaagucuaaauaugacaaugccauuaucaugcaccaaaaacaacucacaccacuacauuauggucggaaacgaaacaggacucgaacucacacuaacaaacaccucuauaaucaaucacaaauucugcaaccuaucggaugcccacaagaaaaaucuauacgaucacgccuuaauguccauuauaucaacauuccaucucucaauaccaaacuucaaucaauacgaagcaaugucaugugauuucaacgguggcaaaauaucaguacaauacaauuuaucccauacauacgccguagacgcagcaaaccauugcggaacgauagccaacggcguauuacaaaccuucaugagaauggcuuggggaggaucauauauagccuuagacucaggaaaaggauccugggacugcauaaugacaucauaccaauauuuaauaauacaaaacacaaccugggaagaccauugccaauucaguagaccaucacccauaggcuacuuaggauuauuaucacaaagaacucgagacauauacauaaguagaagacuacuaggaacauucacauggacacuaucagauagugaaucaaaugaaacaccaggaggauauugccuaacaagauggauguuaauagaagcagaacuaaaaugcuuuggaaauacagcaguagccaaauguaaugaaaaacaugaugaagaauuuugugauaugcuaagacuuuucgacuucaacaaacaagcuauucgaagauuaaaagcagaagcacaaauguccauacaauuaauaaacaaagcaguuaacgcuuuaauaaacgaccaacuuauaaugaaaaaccaccuaagagacauaaugggaauaccauacuguaacuacuccaaauacugguaccuaaaccacacagucacaggaagaaccaguuuaccacgaugcuggcuaguaucaaacgguagcuaucuaaaugaaacucacuucucagacgacaucgaacaacaagcagacaacaugauaacagaauuauuacaaaaagaauacauggauagacaaggaaaaacaccacuaggauuaguugaccuauucgucuuuuccacaaguuucuaucuaauauccauauuucuacaccucguaaaaauuccuacacacagacauguaauaggcaaacccugcccaaaaccccauagauuaaaccacaugggaauaugcuccugcggauuauacaaacacccaggaguaccuguaaaauggaaaagauaaggacuagugcaucacauuuaaaagcaucucagccuaccaugagaauaagagaaagaaaaugaagaucaauagcuuauucaucucuuuuucuuuuucguugguguaaagccaacacccugucuaaaaaacauaaauuucuuuaaucauuuugccucuuuucucugugcuucaauuaauaaaaaauggaaagaaccuagaucuaaaaaaaaaaaaaaaaaaaaaaaaaaaaaaaaaaaaaaaaaaaaaaaaaaaaaaaaaaaaaaaaugcaucccccccccccccccccccccccccccccccaaaggcucuuuucagagccaccagaauu

SEQ ID NO: 3262 - RNA, 1855 nt, Artificial Sequence
  mRNA product Design i-2 comprising derived and/or modified sequence from LASV(LASV035-NIG-2009;Clade II)__AIT17588__GPC (opt6)
ggggcgcugccuacggagguggcagccaucuccuucucggcaucaagcuuaccaugggucaaauaauaaccuuuuuucaagaaguaccacacguaauagaagaaguaaugaacauaguacuaauagcacucucccuauuagcaauacucaaaggcauuuacaacguagcaacuuguggacuauuuggauuaguaucuuuucuacuauuauguggaagauccugcucaacaaccuauaaagguguauacgaacuacaaaccuuagaauuagauauggcaucacuaaacaugacaaugcccuuaucaugcacaaaaaacaacucgcaccauuauauaaugguaggaaaugaaacgggauuagaacuaacccuaacaaauacaucaauaauaaaccacaaauuuuguaacuuaucugacgcacacaaaaaaaaucucuaugaccaugcacuaaugucaauaaucucaaccuuucacuuauccauaccaaauuucaaucaauacgaagcaaugucaugcgacuucaacggcggaaaaauauccguucaauacaauuuaucacacgcauacgccguagacgcagcuaaccacugcggcacaauagcaaauggaguacuacaaacauucaugagaauggcauggggaggcuccuacauagcacuagauucagguaaaggaucaugggacugcauuaugacaucauaccaauacuuaauaauacaaaauacaacaugggaagaucacugccaauucucaagaccauccccaauaggcuaucucggacuacuaagucaaagaacaagagacauauacauaucacgcagacuauuaggaaccuucacauggacuuuaagugacagcgaaggaaacgaaacaccaggagguuacugucuaaccagauggauguuaauagaagcagaauuaaaaugcuuuggaaacacagcaguagcaaaaugcaacgaaaaacaugacgaagaauucugugacaugcuacgacuauuugacuuuaacaaacaagcaauaagaagacuaaaagcagaagcacaaaugucaauacaacuaaucaacaaagcaguuaaugcucugauaaacgaccaacucaucaugaaaaaccaccuacgagacauaaugggaauacccuacugcaacuacucaaaauacugguaccuuaaucacacgguuacaggcaaaacuucacuaccaagaugcugguuaguauccaacggaucauaucuaaacgaaacacauuuuuccgacgacauagaacaacaagcagacaauaugauaacagaacuauuacaaaaagaauacauagauagacaagguaaaacaccacuaggacuaguagauuuauucguauucaguacauccuuuuacuuaauaucaauuuuccuccaucuaguaaaaaucccaacacaccgacacguaauaggaaaaccaugcccaaaaccccacaggcuaaaccacaugggaauaugcaguugcggauuauacaaacauccugguguaccuguaaaauggaaaagauaaggacuagugcaucacauuuaaaagcaucucagccuaccaugagaauaagagaaagaaaaugaagaucaauagcuuauucaucucuuuuucuuuuucguugguguaaagccaacacccugucuaaaaaacauaaauuucuuuaaucauuuugccucuuuucucugugcuucaauuaauaaaaaauggaaagaaccuagaucuaaaaaaaaaaaaaaaaaaaaaaaaaaaaaaaaaaaaaaaaaaaaaaaaaaaaaaaaaaaaaaaaugcaucccccccccccccccccccccccccccccccaaaggcucuuuucagagccaccagaauu

SEQ ID NO: 3263 - RNA, 1855 nt, Artificial Sequence
  mRNA product Design i-2 comprising derived and/or modified sequence from LASV(LASV1000-NIG-2009;Clade II)__AIT17782__GPC (opt6)
ggggcgcugccuacggagguggcagccaucuccuucucggcaucaagcuuaccaugggacaaauaauaacauucuuccaagaaguaccucacguaaucgaagaagucaugaauauuguccuaauagcacucucauuacuugcaauacuaaaaggaauauauaacguugcaacaugcggucuauucggcuuaguaucuuuuuuacuacuauguggcagaucuugcuccacaacguacaaaggaguauaugaacuacaaacauuagaauuagacauggcaucacuaaauaugacaaugccauuaucaugcacuaaaaacaacucacaccacuacauuauggucggcaacgaaacaggauuagaacuaacccuaacaaacacaucaauaauaaaccauaaauucuguaaucuaucagaugcacacaaaaaaaacuuauacgaccacgcuuuaaugucaauuauaucuacauuccauuuaucaauacccaauuuuaaccaauacgaagcaaugucaugcgacuucaacggaggaaaaaucucaguacaauauaauuuaucccacaccuacgcaguagaugccgcaaaccauugcggcacaauagcaaauggaguccuacaaacauuuaugcgaauggcaugggguggcucauacauagcccuugacucaggaaaaggaucaugggauugcauaaugacauccuaccaauauuuaauaauacaaaacacaacuugggaagaucacugccaauuuucaagacccaguccaaucggauacuuaggacuauuaucacaaagaacacgagauauauacaucagcagaagauuauuaggaacauucacauggacacuaucagauucagaaggcaaugaaaccccaggaggcuacugccuaacaagauggaugcucaucgaagcagaauuaaaaugcuuuggaaauacagcaguagcaaaauguaacgaaaaacacgacgaagaauucugcgacaugcuacgauuauuugacuucaacaaacaagccauaaaaagacuaaaaacagaagcacaaaugucaauacaauuaauaaacaaagccguaaacgcacuaaucaacgaucaauuaaucaugaaaaaucaccuuagagacauaaugggaaucccauauugcaacuacucaaaauacugguacuuaaaucacaccguaacuggaaaaacaucauuaccaagaugcuggcuaguaucaaauggcucauaccucaaugaaacccacuucucagacgacaucgaacaacaagcugacaacaugauaacugaacuauuacaaaaagaauacauugaccgacaaggaaaaacaccauuaggauuaguagaccucuuuguauuuucaacaucauucuaccuaaucucaauauucuuacauuuaguaaaaauuccaacacacagacacguaguaggaaaaccaugcccuaaaccccacagauuaaaccacaugggaauauguagcugcgguuuauacaaacacccaggaguaccaguuaaauggaaaagauaaggacuagugcaucacauuuaaaagcaucucagccuaccaugagaauaagagaaagaaaaugaagaucaauagcuuauucaucucuuuuucuuuuucguugguguaaagccaacacccugucuaaaaaacauaaauuucuuuaaucauuuugccucuuuucucugugcuucaauuaauaaaaaauggaaagaaccuagaucuaaaaaaaaaaaaaaaaaaaaaaaaaaaaaaaaaaaaaaaaaaaaaaaaaaaaaaaaaaaaaaaaugcaucccccccccccccccccccccccccccccccaaaggcucuuuucagagccaccagaauu

SEQ ID NO: 3264 - RNA, 1855 nt, Artificial Sequence
  mRNA product Design i-2 comprising derived and/or modified sequence from LASV(LASV221-NIG-2010;Clade II)__AIT17624__GPC (opt6)
ggggcgcugccuacggagguggcagccaucuccuucucggcaucaagcuuaccaugggacaaaucauaaccuuuuuccaagaaguaccacacguaauugaagaaguaaugaauauaguacucaucgcccuaucacuacuagcaauacuaaaaggaauauacaacgucgcaacaugcggauuauuuggacuaguaucuuuucuauuacuaugcggcagaucaugcucaacaacauacaaaggcgucuacgaauuacaaacacuagaacuagauauggcaucucucaacaugacaaugccacuaucaugcacaaaaaauaacucccaccacuacauaaugguaggaaacgaaacuggacuagaacuaacucuaacaaacacuucaauuauaaaccacaaauucugcaaccuaucagacgcacacaaaaaaaaccuauaugaccaugcccuuauguccauaauaucaacauuccaccuaucaauaccuaacuuuaaccaauacgaagcaaugucuugcgacuucaauggagguaaaauaucaguacaauauaaccuaucacacacuuaugcaauagaugccgcaaaccacugcggaacuauagcaaacgguguauuacaaacauucaugagaauggcauggggcggaucauauaucgcacuagauucaggaaaaggcucuugggacuguaucaugacaucuuaccaauaccuaauaauacaaaacaccacaugggaagaccacugucaauucucacgacccucacccauaggauaccuuggacuacuaagccaaagaacacgcgauauauacauaucaagacgucuacugggaacauuuacauggacacuaagugauucagaaggaaacgaaacaccaggcggauacugcuuaacuagguggaugcuaauagaagcagaacuaaaauguuuuggcaauacagcaguagcaaaaugcaacgaaaaacacgacgaagaauuuugcgacaugcuaagauuauucgacuucaauaaacaagcaauacgaagauuaaaaacagaagcacaaaugucuauucaacuaaucaauaaagcaguaaaugcacuaauaaacgaccaacucauaaugaaaaaccauuuaagagacauaaugggaauaccauacugcaacuauuccaaauacugguacuuaaaccacacaguaaccggaaaaacaucacucccaagauguugguuaguaucaaacggauccuaccuuaaugaaacacauuuuucagacgauauagaacaacaagcagauaacaugauaacagaaaugcuccaaaaagaauacauggauagacaaggaaaaacaccacucggacuagucgaucuuuucguauucucuacaucauucuacuuaauaucaaucuucuuacaucuugucaaaaucccuacucaccgacacguuaucggaaaacccugcccaaaaccacaucgauuaaaccacaugggaauaugcuccugcggacuauacaaacacccaggaguaccagucaaauggaaaagauaaggacuagugcaucacauuuaaaagcaucucagccuaccaugagaauaagagaaagaaaaugaagaucaauagcuuauucaucucuuuuucuuuuucguugguguaaagccaacacccugucuaaaaaacauaaauuucuuuaaucauuuugccucuuuucucugugcuucaauuaauaaaaaauggaaagaaccuagaucuaaaaaaaaaaaaaaaaaaaaaaaaaaaaaaaaaaaaaaaaaaaaaaaaaaaaaaaaaaaaaaaaugcaucccccccccccccccccccccccccccccccaaaggcucuuuucagagccaccagaauu

SEQ ID NO: 3265 - RNA, 1855 nt, Artificial Sequence
  mRNA product Design i-2 comprising derived and/or modified sequence from LASV(LASV237-NIG-2010;Clade II)__AIT17638__GPC (opt6)
ggggcgcugccuacggagguggcagccaucuccuucucggcaucaagcuuaccaugggucaaaucauaaccuucuuucaagaaguuccacaugucaucgaagaaguaaugaacauaguacuaauagcauuauccuuacuagcaauauuaaaaggaaucuacaacguagcaacuugcggcuuauucggacuagucuccuucuuacugcuauguggcagaucauguucaacaacuuacaaaggagucuacgaacuacaaacauuagaacuagacauggcaaguuuaaacaugacaaugccacuaucuugcaccaaaaauaauucccaucacuacauaauggucggcaacgaaacaggacuagaacucacacuaacaaauacaucaauaauuaaccacaaauuuugcaaccucucagaugcacacaaaaaagaccuauacgaccacgcacuaauguccauaauaucaacauuucauuuaucuauaccaaacuucaaccaauacgaagcaaugucuugcgauuucaauggaggaaaaauaucaguacaauacaaccuaucccacacauaugccguagacgcagcuaaccauugcggaacaauagcaaauggaguacuacaaacauucaugagaauggcauggggaggaucauacaucgcacucgacuccggaaaaggaucuugggacugcaucaugaccucuuaccaauaccuaauaauucaaaauacaaccugggaagaccauugccaauucucaagacccucaccaauaggauaucuaggacuacuaucacaaagaaccagagacauauacauaucccgacgacuacuaggaacauucacauggacauuaucagauucagaaggaaacgaaacaccaggaggcuauugcuuaaccagauggaugcuaauagaagcagaacucaaaugcuucggaaacacagcaguugcaaaaugcaacgaaaaacacgacgaagaauuuugugacauguuaagauuauuugacuucaacaaacaagcaauacgaagauuaaaaacagaagcacaaaugucaauacaacuaaucaacaaagcaguaaacgcacuaauaaacgaccaauuaauaaugaaaaaccauuuacgagauaucaugggcauaccuuacugcaauuacucaaaauacugguaccuaaaccacacaguaacaggaaaaaccucccuaccaagauguugguuaguaucaaacggcuccuauuuaaaugaaacacacuucucagaugacauugaacaacaagcagacaacaugauaacagaacuacuucaaaaagaauacauggacagacaagguaaaacaccacucggucuaguagacuuauucguauuuagcaccucguucuaccucauaucaauauuccuacaccuuauaaaaaucccaacacacagacauauaacaggaaaaccuugcccaaaaccacacagauuaaaccauauggguaucugcucauguggacuauacaaacacccaggcguuccaguaaaauggaaacguuaaggacuagugcaucacauuuaaaagcaucucagccuaccaugagaauaagagaaagaaaaugaagaucaauagcuuauucaucucuuuuucuuuuucguugguguaaagccaacacccugucuaaaaaacauaaauuucuuuaaucauuuugccucuuuucucugugcuucaauuaauaaaaaauggaaagaaccuagaucuaaaaaaaaaaaaaaaaaaaaaaaaaaaaaaaaaaaaaaaaaaaaaaaaaaaaaaaaaaaaaaaaugcaucccccccccccccccccccccccccccccccaaaggcucuuuucagagccaccagaauu

SEQ ID NO: 3266 - RNA, 1855 nt, Artificial Sequence
  mRNA product Design i-2 comprising derived and/or modified sequence from LASV(LASV253-NIG-2011;Clade II)__AIT17670__GPC (opt6)
ggggcgcugccuacggagguggcagccaucuccuucucggcaucaagcuuaccaugggacaaauaauaacuuucuuucaagaaguaccccauguaauagaagaaguaaugaacauaguacuaaucgcccuauccuuacuagcaauacuaaaaggaauauacaacguagcaacaugcggauuauucggccuuguaucauuucuacucuuaugcggcagauccuguucaacaacauacaaaggaguauacgaacuacaaacacuagaacuagacauggcaucacuaaauaugacaaugccauuaagcugcacaaaaaacaacucucaccacuacauaaugguaggaaaugaaacaggacucgaacucacacuaacaaauaccucuaucauaaaccacaaauucugcaaucuaucagaugcccacaaaaaaaaccuauaugaucaugcauuaauguccauaauaucaacauuccaucuaucaauucccaacuuuaaccaauacgaagcaaugucaugcgacuuuaacggcggaaaaauaucuguacaauauaaucuaucccacacuuaugcagucgaugccgcaaaucacugcgguaccauagcaaauggaguacuccaaacauucaugcgcauggcuuggggcggaucauacaucgcacuagauuccggaaaaggaucaugggacugcauaaugacaucuuaccaauaucuuaucauacaaaauacuaccugggaagaucacugccaauuuucaagaccgucaccaauaggauaucucggauuacuaucacaacgaaccagagacauauauauaucaagaagacuacuaggaaccuucacauggacauuaagcgauucugaaggaaaugaaacuccagguggauauugccuaacaagauggauguuaauagaagccgaauuaaaaugcuucggaaauacagcaguugcaaaauguaacgaaaaacaugacgaagaauucugugacaugcuaagauuauucgacuucaacaaacaagcaauaagaagacuaaaagcagaagcacaaaugucaauacaacuaauaaauaaagcaguaaaugcucuaauaaaugaccaauuaauaaugaaaaaccaccuuagagacauaaugggaauacccuacuguaacuacucaaaauacugguaccuaaaccacacagucacaggacgcacgucacuaccccgaugcuggcuaguaucaaacggcucuuaccuaaacgaaacacacuucagcgacgacauagaacaacaagcagacaacaugaucaccgaauuauuacaaaaagaauacauagacagacaaggaaaaacaccacuaggccuaguagaccucuuugucuucucaacaucauuuuaccuaauaucaauauuccuacauuuaguuaaaauacccacccauagacacaucauaggaaaacccugccccaaaccacaccgacuaaaccacaugggaauaugcucaugugguuuauacaaacaucccggaguaccaguaaaauggaaaagauaaggacuagugcaucacauuuaaaagcaucucagccuaccaugagaauaagagaaagaaaaugaagaucaauagcuuauucaucucuuuuucuuuuucguugguguaaagccaacacccugucuaaaaaacauaaauuucuuuaaucauuuugccucuuuucucugugcuucaauuaauaaaaaauggaaagaaccuagaucuaaaaaaaaaaaaaaaaaaaaaaaaaaaaaaaaaaaaaaaaaaaaaaaaaaaaaaaaaaaaaaaaugcaucccccccccccccccccccccccccccccccaaaggcucuuuucagagccaccagaauu

SEQ ID NO: 3267 - RNA, 1855 nt, Artificial Sequence
  mRNA product Design i-2 comprising derived and/or modified sequence from LASV(LASV254-NIG-2011;Clade II)__AIT17674__GPC (opt6)
ggggcgcugccuacggagguggcagccaucuccuucucggcaucaagcuuaccaugggacaaauaaucacauucuuucaagaaguaccacauguaauagaagaaguaaugaacauaguucuuauagcacucucauuacuagcaauauuaaaaggaauauacaacguagcuacaugcggccucuuuggacuaguaucauuccuccuccuaugcggaagaucuugcucaacaacauacaaagguguauacgaacuacaaacauuagaauuagacaugacaaaucuuaacaugacaaugccacuauccuguaccaaaaauaacucccaccacuauauuaugguaggaaaugaaacaggacuagaacucacacuaacaaacacaucaauaauaaaccacaaauuuugcaaccuaucugaugcccacaaaaaaaacuuauacaaccacgcacuaaugucaauaauaucaacauuccacuuaucaauaccaaauuuuaaccaauaugaagcaauguccugcgacuucaacggaggaaaaaucucaguacaauauaaccuaucccacucauacgcaguagacgcagcaaaucauugcggaacaauagcaaacggaguccuacaaacauuuaugcgcauggcauggggaggaucuuacaucgcauuagacuccggaaaaggaaauugggacuguauuaugacaucuuaccaauaucuaaucauacaaaacacaacaugggaagaccacugccaauuuaguagacccucacccauaggauaccuaggauuacucucucaaagaacaagagauauauacauaucccgccgcuuacucggaaccuucacuuggacacucucagacucagaaggaaacgaaacaccaggaggauacugccuuacaagauggaugcuaauagaagcagaauuaaaauguuucggaaacacagcaguagcuaaaugcaaugaaaaacacgacgaagaauucugugacaugcuaagacuauucgacuucaacaaacaagcaauacgaagacuaaaaaccgaagcacaagcaaauauacaacucaucaacaaagcaguaaacgcacuuauaaaugaccaauuaauaaugaaaaaccaccucagagacaucaugggaauaccuuauugcaacuauucaaaauauugguaccuuaaccacacagucacagguaaaacaucccuaccaagauguuggcucgucucaaauggauccuaccuaaacgaaacccacuucucugacgauauagaacaacaagcagacaauaugauaacugaacuccuacaaaaagaauacauggacagacaaggaaaaacaccacuaggacucguagaccuauucguauuuucaacaucuuucuacuuaauauccauauuccuacaccuaguaaaaauaccaacccacagacacgucauaggaaaaccaugcccuaaaccacaucguuuaaaucacaugggaauauguucauguggauuauauaaacauccagguguaccaguaaaauggaaaagauaaggacuagugcaucacauuuaaaagcaucucagccuaccaugagaauaagagaaagaaaaugaagaucaauagcuuauucaucucuuuuucuuuuucguugguguaaagccaacacccugucuaaaaaacauaaauuucuuuaaucauuuugccucuuuucucugugcuucaauuaauaaaaaauggaaagaaccuagaucuaaaaaaaaaaaaaaaaaaaaaaaaaaaaaaaaaaaaaaaaaaaaaaaaaaaaaaaaaaaaaaaaugcaucccccccccccccccccccccccccccccccaaaggcucuuuucagagccaccagaauu

SEQ ID NO: 3268 - RNA, 1855 nt, Artificial Sequence
  mRNA product Design i-2 comprising derived and/or modified sequence from LASV(Nig08-A19;Clade III)__ADU56618__GPC (opt6)
ggggcgcugccuacggagguggcagccaucuccuucucggcaucaagcuuaccaugggacaaaucguaacauucuuucaagaaguaccacacguaauagaagaagucaugaacauaguuuuaauagcccucucaauacuagcaauauuaaaaggcuuauacaacauagccaccugcggacuaauaggacuagucacauuccuccuacuaagcggcagaucuugcucaaugacauauaaaggaguauacgaauuacaaacccuagaacuaaauaugaauacauuaaacaugacaaugccacuaucaugcacaaaaaauaacucucaccauuacauaaugguuggaaacgaaacaggacuagaauuaacacuaacaaacaccagccuuuuacaccacaaauucugcaaccuauccgacgcacacaaaaaaaacuuauaugaccauacccuaaugucaauaaucuccacauuucaucuaucaauaccaaauuucaaccaauacgaagcaaugucaugcgacuucaacggaggaaaaauaacaguacaauacaaucuuucucacucauaugcaaucgaugcagcuaaccauugcggaacaguagcaaacggaguacuacaaacauucaugcgaauggcauggggagguucauacauugcucucgauucaggaagaggcaaaugggacuguaucaugacuucauaccaauaccuaaucauccaaaacacaacaugggaagaccacugccaauucucacgcccaucaccaauaggcuaccucggcuuacuaucccaaagaaccagagauauauacauaucaagaagacuacuaggaacauucacauggacucuuuccgacuccgaaggaaacgaaacaccaggaggcuacugccuaacacgauggauguuaauagaagcagaauuaaaaugcuucggcaacacugccgucgcuaaaugcaacgaaaaacaugaugaagaauuuugcgacaugcucagacuauucgacuucaauaaacaagcaaucagaagacuaaaagcagaagcucaaaugucaauccaacuaauaaacaaagcaguaaacgcucuaauaaaugaucaacuaauaaugaaaaaccaccuaagagacauaaugggaaucccauacuguaauuacucaaaauacugguaccuaaaucacacauccacuggaagaacaucacugccaagaugcugguuaguauccaacggaucauaucuaaaugaaacacacuucucagaugacauagaacaacaagcagacaauaugauaacagaaauguuacaaaaagaauaccuagauagacaaggaaaaacaccccuagguuuaguugacuuauucgucuucagcacaucuuucuaccuaauauccauauuccuccaucuaguaaaaauaccaacacacagacacauaguaggaaaaccaugcccaaaaccccaucgccuaaaccauaugggcauaugcucaugcggacuauacaaacaaccaggagucccagucagauggaaaagauaaggacuagugcaucacauuuaaaagcaucucagccuaccaugagaauaagagaaagaaaaugaagaucaauagcuuauucaucucuuuuucuuuuucguugguguaaagccaacacccugucuaaaaaacauaaauuucuuuaaucauuuugccucuuuucucugugcuucaauuaauaaaaaauggaaagaaccuagaucuaaaaaaaaaaaaaaaaaaaaaaaaaaaaaaaaaaaaaaaaaaaaaaaaaaaaaaaaaaaaaaaaugcaucccccccccccccccccccccccccccccccaaaggcucuuuucagagccaccagaauu

SEQ ID NO: 3269 - RNA, 1858 nt, Artificial Sequence
  mRNA product Design i-2 comprising derived and/or modified sequence from LASV(G1180-SLE-2010;Clade IV)__AIT17168__GPC (opt6)
ggggcgcugccuacggagguggcagccaucuccuucucggcaucaagcuuaccaugggacaaauaguaacauucuuccaagaaguaccacauguaauugaagaaguaaugaauauaguacuaaucgcucuaucuauccucgcaguacuaaaaggauuauauaacuucgcaacuuguggacuagucggcuuacuaacuuuccuccuauuaugcggacgaucuugcacagcaucaagauauaaaggaguuuacgaacuacaaacccuugaauuaaacauggaaacacuaaauaugacaaugcccuuaagcuguacaaaaaacaauucucaucauuacauaaugguaggaaacgaaacaggauuagaauuaacauuaacaaauacauccauaauaaaccauaaauucugcaauuuaucagacgcacacaaaaaaaaccucuacgaccaugcacuuaugucaauuauaucaacauuccacuuaucaauacccaacuucaaucaauacgaagcaaugucuugcgacuucaauggaggaaaaauaucaguacaauacaauuuaucccauucauaugcaggagacgcagcaaaccauugcggaacaguugccaacggaguccuacaaacauuuaugcgaauggcauggggaggaucauauaucgcacuagacaguggacacggaucaugggacugcauaaugacaagcuaccaauaucuaaucauacaaaauacuacaugggaagaccacugccaauucagccgaccaagcccaauaggauaucuaggccuacucucacaacgcacaagagauauauacauaucaagaagauuacuaggaacauuuacauggacauugucagacucugaaggaaaagacacaccaggagguuauugccuuacaagauggauguuaauagaagcagaauuaaaaugcuuuggaaacacggcuguagcuaaaugcaacgaaaaacacgaugaagaauucugcgauauguuaagacuauuugauuuuaacaaacaagcaauccaaagacuaaaagcagaagcacaaaugucaauacaacuaaucaacaaagcagucaaugcauuaauaaaugaccaacuuauaaugaaaaaucacuuaagagacauaaugggcauaccauacuguaauuacucaaaauauugguaccuaaaucacacaaccacaggaaaaacuagccuaccaaaaugcugguuaguaucaaauggaucuuacuuaaaugaaacacacuucucugacgauauagaacaacaagcugacaacaugauaacagaaaugcuccaaaaagaauacauggaaagacaaggaaaaacaccacuuggauuaguagaccuauucguauucagcaccuccuuuuauuuaauaucaauauuccuacaccucguaaaaauaccaacacauagacauaucgucggaaaaagcugcccaaaaccacaccgacuaaaucacaugggaauaugcucguguggccuauauaaacaaccaggagucccaguaaaauggaaaagauaaggacuagugcaucacauuuaaaagcaucucagccuaccaugagaauaagagaaagaaaaugaagaucaauagcuuauucaucucuuuuucuuuuucguugguguaaagccaacacccugucuaaaaaacauaaauuucuuuaaucauuuugccucuuuucucugugcuucaauuaauaaaaaauggaaagaaccuagaucuaaaaaaaaaaaaaaaaaaaaaaaaaaaaaaaaaaaaaaaaaaaaaaaaaaaaaaaaaaaaaaaaugcaucccccccccccccccccccccccccccccccaaaggcucuuuucagagccaccagaauu

SEQ ID NO: 3270 - RNA, 1858 nt, Artificial Sequence
  mRNA product Design i-2 comprising derived and/or modified sequence from LASV(G1442-SLE-2011;Clade IV)__AIT17180__GPC (opt6)
ggggcgcugccuacggagguggcagccaucuccuucucggcaucaagcuuaccaugggacaaauagucacuuuuuuccaagaaguaccacauguaauagaagaaguuaugaacauaguauuaauagcauuaucuauauuagccguacucaaaggucuauacaaugucgcaacauguggacuaauagguuuagucacauucuuacuccuaugcggaagaucauguacaacaacacuauacaaaggcguauacgaacuucaaacuuuagaacuaaacauggaaacauuaaacaugaccaugccucuauccugcacaaaaaacaacucacaccauuacauuagaguaggaaacgaaacaggacuagaacuaaccuuaacgaauacaucaauaauuaaccacaaauucugcaaccuaucagacgcccacaaaaaaaaccuauaugaccacgcauuaaugucuauaaucucaacauuccaccuaucaauuccaaacuucaaccaauacgaagcaaugucaugcgauuucaauggaggaaaaauaucaguacaauauaaccuuucacacucauacgcaggagacgcagcuaaccacugcgguacagucgcaaauggaguauuacaaacauucaugcguauggcaugggguggcucauauauagcacuugauucaggaagaggaaauugggauugcauuaugacuuccuaucaauaucuaauaauacaaaauacaacaugggaugaccacugucaauucucaagaccuucaccaauaggcuaccuaggacuauuaucacaaagaacccgagauguauacauaucacgacgacuuuuaggaacauucacauggacauuaucagacucagaaggcaaagacacaccaggagguuacugucuaaccagauggauguuaaucgaagcagaacuaaaaugcuuuggaaacacugcaguagcaaaauguaacgaaaaacacgaugaagaauucugugauauguuaagacuauucgauuucaacaaacaagcaauacaacgacucaaagcagaagcacaaauguccauucaacuaauuaacaaagcaguaaacgcucuaauaaacgaccaacucaucaugaaaaaccacuuaagagauauaaugggaauccccuacugcaauuacucaaaauacugguaccuaaauaacacugcaacuggcaaaaccucauuaccaaaaugcuggcucauaucuaauggcucauauuuaaacgaaacccauuucucagacgacauagaacaagaagccgauaacaugauaacagaaauguuacaaaaagaauacauggaaagacaaggaaaaaccccacuaggauuaguagacuuauucguauuuuccacuucauucuaucuaauaucaauauuccuacaccuagucaaaauaccuacacaccgacacauaguaggaaaauccuguccaaaaccccaucgacuaaaccacauggguauaugcuccugcggacuauacaaacaaccaggagucccaguaagauggaaaagauaaggacuagugcaucacauuuaaaagcaucucagccuaccaugagaauaagagaaagaaaaugaagaucaauagcuuauucaucucuuuuucuuuuucguugguguaaagccaacacccugucuaaaaaacauaaauuucuuuaaucauuuugccucuuuucucugugcuucaauuaauaaaaaauggaaagaaccuagaucuaaaaaaaaaaaaaaaaaaaaaaaaaaaaaaaaaaaaaaaaaaaaaaaaaaaaaaaaaaaaaaaaugcaucccccccccccccccccccccccccccccccaaaggcucuuuucagagccaccagaauu

SEQ ID NO: 3271 - RNA, 1858 nt, Artificial Sequence
  mRNA product Design i-2 comprising derived and/or modified sequence from LASV(G3010-SLE-2013;Clade IV)__AIT17344__GPC (opt6)
ggggcgcugccuacggagguggcagccaucuccuucucggcaucaagcuuaccaugggacaaauaguaacauuuuuccaagaaguaccccacguaauagaagaagucaugaauaucguguuaauugcacuaucaauccucgcaguucuaaaaggccuauacaauuucgccacauguggccuaguuggauuaguaaccuuccuauuacuauguggccgaucuuguacuaccuccuuauauaaaggagucuaugaacuacaaacacuagaacuaaauauggaaacacugaauaugacaaugccacucucauguacaaaaaacaacucacaccacuauauaaugguaggaaacgaaacaggcuuagaacuaacacuaacaaauacaagcauaauaaaccacaaauucugcaaccuuagcgaugcacauaaaaaaaacuuauacaaccacgcccuaaugucuauaauauccacauuccacuuauccauaccuaacuucaaucaauacgaagccaugucaugugacuucaauggaggaaaaaucuccguacaauacaaccuaucucauaguuacgcaggagacgcagccucucauugcggaacuguagcaaauggaguauuacaaacauucaugcgaauggcauggggaggaucauauauagcauuagauucuggauacggaaaaugggauugcaucaugacaucauaccaauacuuaauaauacaaaacaccaccugggaagaccacugucaauucucccgacccaguccaauaggauaccucgguuuauuaucacaacgaacaagagacauauacauaucaagaagauugcuaggaacauuuacauggacacuaagugauucagaaggaaaagacaccccaggaggauacugccuaacaagauggaugcuaauagaagcagaacuaaaaugcuucggaaauacagcagucgccaaaugcaacgaaaaacacgacgaagaauuuugcgacaugcuuagauuauucgacuuuaacaaacaagcuauacaaagauuaaaaaccgaagcacaaaugucaauacaauuaauaaauaaagcaguaaacgcccuaauaaacgaucaacuuauaaugaaaaaccaucuuagagacauaaugggaaucccuuacugcaacuauucaaaauauugguacuuaaaccacaccacaacaggaaaaacaucacuccccaaaugcuggcuaguauccaauggcucauaucucaacgaaacacacuucucagaugauaucgaacaacaagccgacaacaugaucacagaaaugcuucaaaaagaauacauggaacgacaaggaaaaacaccacuaggccucguggaccuauucguauucuccacaucauucuaucuaauuucuauauuccuacaucucguuaaaauaccaacacaccgacauauaguaggcaaaucauguccaaaaccacacagacuaaaccauaugggaaucuguuccuguggacucuauaaacaaccaggaguaccaguaagauggaaaagauaaggacuagugcaucacauuuaaaagcaucucagccuaccaugagaauaagagaaagaaaaugaagaucaauagcuuauucaucucuuuuucuuuuucguugguguaaagccaacacccugucuaaaaaacauaaauuucuuuaaucauuuugccucuuuucucugugcuucaauuaauaaaaaauggaaagaaccuagaucuaaaaaaaaaaaaaaaaaaaaaaaaaaaaaaaaaaaaaaaaaaaaaaaaaaaaaaaaaaaaaaaaugcaucccccccccccccccccccccccccccccccaaaggcucuuuucagagccaccagaauu

SEQ ID NO: 3272 - RNA, 1858 nt, Artificial Sequence
  mRNA product Design i-2 comprising derived and/or modified sequence from LASV(G502-SLE-2009;Clade IV)__AIT17126__GPC (opt6)
ggggcgcugccuacggagguggcagccaucuccuucucggcaucaagcuuaccaugggacaaauaguaacauuuuuccaagaaguaccacacgucauagaagaaguaaugaauauaguauuaauagcccuuagcauccucgcaguacuaaaaggucuauacaacuucgcaacaugcggccuagucggacuacuaacauuccuauuauuauguggucgcucaugcacuacaggacucuauaaaggaguauacgaauuacaaacauuagaauuaaauauggaaacauuaaacaugacaaugccacuauccuguaccaaaaacaacucacaccauuauauaaugguaggcaacgaaacaggacucgaacuaacucuuacaaauacaucuauaauaaaccacaaauucugcaacuuaucugacgcacacaagaaaaaccuauacgaccacgcuuuaaugucaauaaucucaacauuccaucuaucaauaccaaacuucaaccaauaugaagcaaugucaugugauuucaacggaggaaaaauaucaguacaauacaaccuaucacacucauacgcaggagacgcagccgaccacugcggaacaguagcuaaugguguacuacaaacauucaugagaauggcauggggcggauccuacaucgcacuugauuccggaagaggaagaugggacugcaucaugacuucauaucaauacuuaauaauacaaaacaccacaugggaagaccauugccaauucucaagaccaucacccauaggauaccuaggcuuauuaucccaaagaacaagagacauauacauaucuagaagacuacucggaacauucacuuggacacucucugauucagaaggaaaagacacucccggaggauacugccuaacacgauggauguuaauagaagccgaauuaaaaugcuucggaaauacagcaguugcuaaaugcaacgaaaaacaugacgaagaauuuugcgauauguuaagauuauucgacuucaacaaacaagcaauccaaagacuaaaagcagaagcacaaaugucaauacaacuaauuaauaaagcaguaaacgcucuuauuaacgaucaacuuguaaugaaaaaccaucuaagagacauaauggguauuccauauuguaacuacucccguuacugguacuuaaaccacaccacaacaggaagaacaucauuaccuaaauguuggcuaguaucaaacggaucauaccuaaacgaaacacauuucuccgaugacauugaacaacaagcagacaacaugauaacagaaaugcuacaaaaagaauacauggaaagacaaggaaaaacaccacuaggccucguagaccucuucgucuucuccacuucauucuauuuaauaucaauauucuuacaccuaguaaaaauaccaacucacagacauauagucggaaaaaguugcccaaaaccacaccgccuaaaccacaugggcauuuguucauguggacucuacaaacaaccaggcguaccaguuaaauggaaacgaugaggacuagugcaucacauuuaaaagcaucucagccuaccaugagaauaagagaaagaaaaugaagaucaauagcuuauucaucucuuuuucuuuuucguugguguaaagccaacacccugucuaaaaaacauaaauuucuuuaaucauuuugccucuuuucucugugcuucaauuaauaaaaaauggaaagaaccuagaucuaaaaaaaaaaaaaaaaaaaaaaaaaaaaaaaaaaaaaaaaaaaaaaaaaaaaaaaaaaaaaaaaugcaucccccccccccccccccccccccccccccccaaaggcucuuuucagagccaccagaauu

SEQ ID NO: 3273 - RNA, 1858 nt, Artificial Sequence
  mRNA product Design i-2 comprising derived and/or modified sequence from LASV(G733-SLE-2010;Clade IV)__AIT17154__GPC (opt6)
ggggcgcugccuacggagguggcagccaucuccuucucggcaucaagcuuaccaugggacaaaucguaaccuucuuccaagaagucccacacguaauagaagaaguaaugaauaucguacuaauagcauuaucaauacuugcaguacucaaaggacuauauaacuucgcuacaugcggaauaguaggacuaguaucauucuuauuauuaugcggacgaucaugcaccacaucauuauacaaaggagucuaugaauuacaaacacuagaauuaaacauggaaacccuaaacaugacaaugccacucucaugcacaaaaaauaacucacaucacuacauaaugguuggaaacgagacaggacuagagcuaacacuaacaaacacaucaauaauaaaccacaaauucuguaauuuaagcgacgcacacaaaaaaaaucuauacgaccacgcauuaauguccauaaucucaaccuuccacuuaucaauaccaaauuuuaaucaauacgaagcaaugucaugcgauuucaacggaggaaaaauaucaguucaauauaaccuuagucacuccuacgcaggagaugccgccaaccacugcggcacaauagcaaacgguguccuacaaacuuucaugagaauggcauggggaggaagcuacauagcauuagauagcgggagagaucgaugggacuguauaaugacuaguuaucaauauuuaauaauacaaaacaccacaugggaagaccacugccaauucucaagaccaagcccaaucgguuaccucggacucuuaucacaaagaacccgagacauauacauaucaagaagacuacuaggcacauucacauggacccuaucugacagcgaaggaaaagauacuccaggagguuacugccuuacuagauggaugcuaauagaagcagaauuaaaauguuucggaaacaccgcaguagcaaaauguaacgaaaaacaugacgaagaauucugcgacaugcuccgacuauuugauuucaacaaacaagcaauacaaagacuaaaagcagaagcacaaaugucaauacaauuaauaaauaaagcaguaaacgcccuaauaaacgaccagcuaauaaugaaaaaccacuuacgagauaucaugggaaucccauacuguaacuacucaaaauacugguacuuaaaccauacaacaacuggaaaaacaucacuaccaaaaugcugguuaguaaguaacggaucuuaccucaacgaaacacauuuuucagaugacauagaacaacaagccgauaauaugauaacagaaaugcuacaaaaagaauacauggaaagacaagguaaaacuccacuaggacuagucgaccuauucguauucaguacaucauuuuacuuaauaucaaucuuccuacaccuaguaaaaauaccuacccacagacacguaguaggaaaaucaugcccaaaaccacaucgacuaaaucacaugggaauaugcucauguggacuauacggccaaccaggaguaccaguaaaauggaaaagauaaggacuagugcaucacauuuaaaagcaucucagccuaccaugagaauaagagaaagaaaaugaagaucaauagcuuauucaucucuuuuucuuuuucguugguguaaagccaacacccugucuaaaaaacauaaauuucuuuaaucauuuugccucuuuucucugugcuucaauuaauaaaaaauggaaagaaccuagaucuaaaaaaaaaaaaaaaaaaaaaaaaaaaaaaaaaaaaaaaaaaaaaaaaaaaaaaaaaaaaaaaaugcaucccccccccccccccccccccccccccccccaaaggcucuuuucagagccaccagaauu

SEQ ID NO: 3274 - RNA, 1858 nt, Artificial Sequence
  mRNA product Design i-2 comprising derived and/or modified sequence from MOPV/LASV reassortant(IGS-1;Clade IV)__AFY05576__GPC (opt6)
ggggcgcugccuacggagguggcagccaucuccuucucggcaucaagcuuaccaugggacaaauaguaacauucuuccaagaagucccacacguaauagaagaaguaaugaauauaguacucauagcauuaucaguccuugcaguacuaaaaggccuauauaauuucgcuacauguggccuaguuggccuaguaacauuccuauuauuauguggacgauccugcacuacaucauuauacaaaggaguauacgaauuacaaacacucgaauuaaacauggaaacacucaacaugacaaugccacuauccugcacuaaaaacaacagccaccauuauaucaugguaggaaaugaaacaggacuagaauuaacacucacaaauacaucaauaauaaaccauaaauucuguaaucuaucugacgcacacaagaaaaacuuauacgaccacgcauuaaugucuauaauuucaacauuccaucuaucuauaccaaacuucaaucaauacgaagcaaugagcugugacuucaacggaggaaaaauaucaguacaauacaaccucucacacucauacgccggagaugcagcaaaccauuguggcacaguagcuaacggaguacuacaaacauuuaugcgcauggcuuggggaggaucauauauagcccucgauucaggucgaggcaacugggacugcauaaugacaucauaccaauaccuaauaauacaaaauacaacaugggaagaucauugccaauucucaagaccauccccuauaggcuacuuaggacuacucucucaacgaacaagggacauauacaucagcagaagauuauuaggaaccuuuacuuggacuuuaagcgacucagaaggcgaagauacacccggaggauacugucuaacaagauggaugcuaauagaagcagaauuaaaaugcuuugguaacacagcaguagccaaaugcaacgaaaaacacgaugaagaauuuugcgacauguuaagacuauucgauuucaacaaacaagcaauccaaagacucaaagcagaagcacaaauguccauacaacuaaucaauaaagcaguaaacgcacuaauuaacgaccaacuaauaaugaaaaaccacuuaagagacauaaugggaauaccuuauugcaacuacucuaaauacugguaccuaaaccacacaacaacaggccguacaucauuaccaaaaugcuggcuaguaucgaacggaucauacuuaaaugaaacacauuucucagaugauaucgaacaacaagcagacaauaugauaacagaaaugcuacaaaaagaauacauggaaagacaaggaaaaacaccacuaggucuaguagaccuauucguauucucaacuagcuucuaucucaucucaauauuccuacaccuaguaaaaauaccaacacauagacauauaguaggaaaaucaugcccaaaaccccacagacuaaaccacaugggaauaugcucauguggacucuacaaacaaccaggaguaccaguaaaauggaaacgcuaaggacuagugcaucacauuuaaaagcaucucagccuaccaugagaauaagagaaagaaaaugaagaucaauagcuuauucaucucuuuuucuuuuucguugguguaaagccaacacccugucuaaaaaacauaaauuucuuuaaucauuuugccucuuuucucugugcuucaauuaauaaaaaauggaaagaaccuagaucuaaaaaaaaaaaaaaaaaaaaaaaaaaaaaaaaaaaaaaaaaaaaaaaaaaaaaaaaaaaaaaaaugcaucccccccccccccccccccccccccccccccaaaggcucuuuucagagccaccagaauu

SEQ ID NO: 3275 - RNA, 1858 nt, Artificial Sequence
  mRNA product Design i-2 comprising derived and/or modified sequence from LASV(LM765-SLE-2012;Clade IV)__AIT17814__GPC (opt6)
ggggcgcugccuacggagguggcagccaucuccuucucggcaucaagcuuaccauggggcaaauugucacauucuuucaagaaguaccacacguuauagaagagguaaugaacauaguacuaauagcacuaucaauacuagccguauuaaaaggacuauacaacuucgccacaugcggacuaguaggccuaguaacauuccuacuacuguguggacgaagcugcacuaccucccuauacaaaggaguauaugaacuccaaacauuagaacuaaauauggaaacacuuaacaugacuaugccccuauccugcacaaaaaacaacucacaucauuacauuaugguuggaaaugaaacaggauuagaacuaaccuuaaccaacacuucaauaauagaccacaaauucugcaacuuaucagacgcacaucgaaaaaauuuauaugaccaugcacuaaugucaauuauaucaacauuucaccuaagcauaccaaacuucaaccaauaugaagcaaugucaugcgacuucaacggaggaaaaauaucaguacaauacaauuuaucacauagcuaugcaaaagacgcagcagaucauugcggaacaguagcaaacggaguacuacaaacauucaugcgaauggccuggggaggaucauacauagcacuagacuccggaagaggaagaugggauuguauaaugacuucauaccaauauuuaauaauacaaaauacuacuugggaagaucacugccaauucucuagaccaucacccauuggauacuuaggacuacuaucacaaagaacaagggacauauacauaucaagacgacuacucgguacauucacauggacauuaucagauagugaaggaaaagauacuccaggcggauauugcuuaaccagauggaugcuaauugaagcagaacuaaaauguuuuggaaacacagcuguagcaaaaugcaacgaaaaacaugaugaagaauucugugauaugcuaagauuauucgauuuuaauaaacaagcaauucaaagacuaaaagcagaagcacaaaugucaauucaacuaauaaacaaagcaguaaaugcauuaauaaacgaucaacuaauaaugaaaaaucaccuaagagacauaaugggaauaccauacugcaacuacucuaaauacugguaccuaaaucacacaacaacaggcaaaacaucacuaccaaaaugcugguuaguaucaaacggaucauaccuaaacgaaacacacuucagcgaugacauagaacaacaagcagauaauaugauaacugaaauguuacaaaaagaauacauggaaagacaaggaaaaacaccauuaggcuuagucgacuuauucguauucucaacaucauuuuacuuaaucuccauauuccuacaccuaguaaaaauacccacacauagacacauagucggaaaaccaugcccaaaaccacacagacuaaaccacaugggaauauguucauguggacuauauaaacaaccaggaguaccaguaaaauggaaacgauaaggacuagugcaucacauuuaaaagcaucucagccuaccaugagaauaagagaaagaaaaugaagaucaauagcuuauucaucucuuuuucuuuuucguugguguaaagccaacacccugucuaaaaaacauaaauuucuuuaaucauuuugccucuuuucucugugcuucaauuaauaaaaaauggaaagaaccuagaucuaaaaaaaaaaaaaaaaaaaaaaaaaaaaaaaaaaaaaaaaaaaaaaaaaaaaaaaaaaaaaaaaugcaucccccccccccccccccccccccccccccccaaaggcucuuuucagagccaccagaauu

SEQ ID NO: 3276 - RNA, 1858 nt, Artificial Sequence
  mRNA product Design i-2 comprising derived and/or modified sequence from LASV(LM776-SLE-2012;Clade IV)__AIT17824__GPC (opt6)
ggggcgcugccuacggagguggcagccaucuccuucucggcaucaagcuuaccaugggacaaaucguaacauuuuuccaagaagucccccacguaauagaagaaguaaugaacauuguacuuaucgcauuaucaauacucgcaguccuaaaaggacuauacaacuuugcaacaugcggacuaguaggcuuagucacauuccuauuacuaugcggaagaucaugcacaacaagcguauacaaaggaguauaugaacuccaaacacuagaacucaauauggaaacucuaaacaugacaaugccauuaucaugcacaaaaaacaacucacaccauuacauaaugguaggaaacgaaacaggacuagaauuaacacuaacaaacacuucaauaaucaaccacaaauucugcaaccuuucagacgcacauaaaaaaaaccuauacgaccacgcacuaaugucuauaauaucaaccuuccaucuaucaauaccgaacuuuaaccaauacgaggcaaugucaugugauuucaauggcggaaaaauaucaguacaauacaaccuaucacacucauacgccggugaugcagccaaccacugcggaacaguugccaaugguguacuacaaacauucaugagaauggcauggggcggaucauacauagcccuagacucagggcacggaaaaugggacuguauaaugacaucuuaccaauaccucauaauacaaaauacaacaugggaagaccacugccaauuuucacgaccaucaccaauaggauaucuaggacuauuaucacaaagaacuagagacauauauauaucaagaagauuauuaggaacauuuacuuggacacuaucagacucagaaggaaaagacacaccagguggauauugcuuaaccagauggauguuaauagaagcagaacuaaaaugcuuuggaaacacagcaguugcgaaauguaaugaaaaacacgacgaagaauucugcgauaugcuaagauuauucgacuuuaacaaacaagcaauacaaagacuaaaagcugaagcacaaaugagcauacaacugauaaacaaagcaguaaacgcccucauuaacgaccaauuaauaaugaaaaaccacuuaagagacauaaugggaauaccauacugcaacuacucaaaauacugguauuuaaaccacacaacaaccggaaaaacaucccuaccaaaaugcuggcuaguauccaauggaucauaccuaaaugaaacacacuuuucagacgacauugaacaacaagcagacaauaugauaacagaaauguuacaaaaagaauacauggaacgacaaggcaaaacuccccuaggacucguagaccuuuucgucuucucaaccaguuucuaucuaauaucaauauuccuccaccuagucaaaauacccacacauagacacauaguugguaaaucaugccccaaaccccauagacucaaccacaugggaauaugcucuugcggacuauacaaacaaccaggagucccaguacgauggaaaagauaaggacuagugcaucacauuuaaaagcaucucagccuaccaugagaauaagagaaagaaaaugaagaucaauagcuuauucaucucuuuuucuuuuucguugguguaaagccaacacccugucuaaaaaacauaaauuucuuuaaucauuuugccucuuuucucugugcuucaauuaauaaaaaauggaaagaaccuagaucuaaaaaaaaaaaaaaaaaaaaaaaaaaaaaaaaaaaaaaaaaaaaaaaaaaaaaaaaaaaaaaaaugcaucccccccccccccccccccccccccccccccaaaggcucuuuucagagccaccagaauu

SEQ ID NO: 3277 - RNA, 1858 nt, Artificial Sequence
  mRNA product Design i-2 comprising derived and/or modified sequence from LASV(Mad39;Clade IV)__ANH09722__GPC (opt6)
ggggcgcugccuacggagguggcagccaucuccuucucggcaucaagcuuaccaugggacaaaucguaacauucuuccaagaaguaccacacguaauagaagaaguaaugaacauaguacuuauagcucuaucuauauuagcaguucuaaaaggauuauacaauguagccacaugcggacugaucggacuaguaacauuccuacuccuauguggaagaucauguaccacaacucuauauaaaggcguauaugaacuacaagcauuagaacuuaacauggaaacucuaaacaugacaaugccccuaucaugcacaaaaaauaacucccaccacuacauaagaguaggaaaugaaacuggacucgaacuaacacuaacaaacacauccuuaaucaaccacaaauucuguaaccuaagcgacgcacauaaaaaaaaucuauacgaccacgcauuaauguccauaaucucaaccuuccacuuauccauccccaauuuuaaccaauacgaagcaaugucaugcgauuucaaugacgguaaaauauccguccaauauaauuuaucccauacauacgccggagauaccgcaaaccacugcggaacuguugcaaacggagucuuacaaacauucaugagaauggccuggggaggaucauacauagcacuagacuccggaagaggaggaugggacugcaucaugacuucauaucaauaccuaauuauacaaaacacuacaugggaagaccacugucaauuuucaagaccaucaccaauaggauaccuaggucuacuuucacaaagaaccagagacaucuauaucuccagaagacuccucgguacauucacauggacacuuucagacucagaaggaaaagacacacccggaggauauugucuaacaagauggaugcucauagaagccgaacucaaaugcuucggaaauacagcaguagcuaaaugcaacgaaaaacaugaugaagaauuuugcgauaugcuuagauuauucgauuucaauaaacaagccauacaaagacuaaaagcagaagcccaaaugucaauacaacuaauaaacaaagccguaaacgcacuaauaaacgaucaauuaauaaugaaaaaccaccuaagagacauaaugggaauaccauacugcaauuauucaaaauauugguaccuaaaucacacaguaacaggaaaaaccucauuaccuaaaugcuggcuagucucuaacggaucauacuuaaacgaaacccacuucucagaugacauagaacaacaagccgacaacaugaucacggaaaugcuucaaaaagaauacauggagagacaaggcaaaacaccacuaggacuaguugaccuauucguuuuuucaaccuccuucuacuuaauaucaaucuuccuacaccuagucaaaauacccacacauagacauguaguaggaaaaccauguccaaaaccacaucgauuaaaucacaugggaauuugcucaugcggcuuuuacaaacaacccggagucccaguacgauggaaacgauaaggacuagugcaucacauuuaaaagcaucucagccuaccaugagaauaagagaaagaaaaugaagaucaauagcuuauucaucucuuuuucuuuuucguugguguaaagccaacacccugucuaaaaaacauaaauuucuuuaaucauuuugccucuuuucucugugcuucaauuaauaaaaaauggaaagaaccuagaucuaaaaaaaaaaaaaaaaaaaaaaaaaaaaaaaaaaaaaaaaaaaaaaaaaaaaaaaaaaaaaaaaugcaucccccccccccccccccccccccccccccccaaaggcucuuuucagagccaccagaauu

SEQ ID NO: 3278 - RNA, 1858 nt, Artificial Sequence
  mRNA product Design i-2 comprising derived and/or modified sequence from LASV(Z0947-SLE-2011;Clade IV)__AIT17840__GPC (opt6)
ggggcgcugccuacggagguggcagccaucuccuucucggcaucaagcuuaccaugggacaaauagucaccuucuuccaagaagucccacauguaauagaagaaguaaugaauauaguccuuauagcacuaucaauccuugccguacuaaaaggacuauacaacuucgccacaugcggucuagucggccuaguaacauucuuacuauuaugcggacgaucuuguacuaucagccucuacaaaggaguuuacgaauuacaaacacuagaacuaaauauggaaacauuaaacaugacuaugccccugucauguaccaaaaauaacucacaucacuauauuaugguuggcaaugaaacaggacucgaacucacacuaacaaacacaucaauaaucaaccauaaauucuguaacuuauccgaugcacacaagaaaaaccuauaugaccaugcacuaauguccauaauaucaacauuucaccuaucaauucccaauuucaaccaauacgaagcaaugucaugcgacuuuaauggagguaaaauaucaguacaauauaaccuaucacacucuuaugcaggagaugcagcaaaccauugcggaacaguagcaaacggaguauuacaaacauucaugcguauggccuggggaggaucuuauauagcauuagacucaggaagagauagaugggauuguauaaugacaucauaccaauacuuaauaauacaaaauacaaccugggaagaccacugccaauucucaagacccuccccaauaggauaucucggauuacuuucacaacgcacaagagauauauacauaucaagaagauuacuaggaacuuucacauggacccuauccgauucugaaggaaaagauacaccagguggauacugccuaacccgauggaugcuaauagaagcagaacuaaaauguuucggaaacacagcuguagcaaaaugcaacgaaaaacacgacgaagaguucugcgacaugcuaagauuauucgauuucaacaaacaagcaauccaaagauuaaaagcagaagcacaaauguccauccaacuaauuaacaaagcagucaacgcauuaauaaacgaccaacuaauaaugaaaaaccaccuucgagacaucauggguauuccauacugcaauuacucaaaauacugguacuuaaaucacacuaccacaggaaaaacaucauuacccaaaugcuggcuaguaucuaacggauccuaucuaaaugaaacacacuucucagacgacauagaacaacaagcugauaacaugauaacagaaauguuacaaaaagaauacauggaacgccaaggcaaaacaccacucggauuaguagaucuauucguauucucaacaucauucuaucuaauaucaauauuucuccaccuaguuaaaauccccacacauagacauauaguaggaaaacccugcccaaaaccacaccgacuaaaccacauggguaucugcucaugcggauuauacaaacaaccuggaguaccuguaaaauggaaaagauaaggacuagugcaucacauuuaaaagcaucucagccuaccaugagaauaagagaaagaaaaugaagaucaauagcuuauucaucucuuuuucuuuuucguugguguaaagccaacacccugucuaaaaaacauaaauuucuuuaaucauuuugccucuuuucucugugcuucaauuaauaaaaaauggaaagaaccuagaucuaaaaaaaaaaaaaaaaaaaaaaaaaaaaaaaaaaaaaaaaaaaaaaaaaaaaaaaaaaaaaaaaugcaucccccccccccccccccccccccccccccccaaaggcucuuuucagagccaccagaauu

SEQ ID NO: 3279 - RNA, 1858 nt, Artificial Sequence
  mRNA product Design i-2 comprising derived and/or modified sequence from LASV(Josiah;Clade IV)__NP_694870__GPC (opt11)
ggggcgcugccuacggagguggcagccaucuccuucucggcaucaagcuuaccaugggccaaauagucaccuucuuccaagaagucccccacguaaucgaagaaguaaugaacaucguccucaucgcacucucaguccucgccguccucaaaggccucuacaacuuugccacaugcggccuagucggacucgucaccuuccuccuccuuugcggccgcuccugcacuaccagccuuuacaaaggcgucuacgaacuccaaacccuugaacucaacauggagacccucaacaugaccaugcccuuauccugcaccaaaaacaacucacaccacuacauaauggucggcaacgaaaccggcuuagaacuaacccucaccaacaccuccauaaucaaccacaaauucugcaaccucagcgacgcccacaagaaaaaccuauacgaccacgcccucaugucaaucauauccaccuuccaccucucuauacccaacuucaaccaauacgaagcaauguccugcgacuucaacggcgguaaaauauccguucaauacaaccugucucacuccuacgccggcgacgccgccaaccacuguggcaccgucgcuaacggcguacuacaaacauucaugcgaauggccuggggcggcagcuacaucgcccucgacucagggagaggaaacugggacugcaucaugaccucuuaccaauaccucaucauacaaaacaccaccugggaagaccacugccaauucagccgaccaucccccaucggcuaccuaggccuacuaucacaacguacccgcgacaucuauauaagccgccgccuacucggcaccuucaccuggacacucuccgacuccgaagguaaagacacccccggaggcuacugccuaacccgcuggaugcuaaucgaagccgaacuuaaaugcuucggcaacaccgcggucgccaaaugcaacgaaaagcacgacgaagaguucugcgacaugcucaggcucuuugacuucaacaaacaagccauccaacgccucaaagcagaagcccaaauguccauccaacucauaaacaaagccgucaaugcccucauuaacgaccaacucauuaugaaaaaccaccuacgagacaucauggguauccccuacugcaacuacagcaaauacugguaccucaaccauacaacuaccggccgcacuagccugcccaagugcuggcucguauccaauggcuccuaccucaacgaaacccacuucuccgacgacauugaacaacaagccgacaacaugaucaccgaaaugcuucaaaaggaauacauggaacggcaaggaaaaacuccccucggccucgucgaccucuucgucuucagcacauccuucuaccucauauccaucuuccuccaccuagucaaaauccccacacacagacacauagucggaaaauccugccccaaaccccacagacucaaccacaugggcaucuguuccugcggucucuacaaacaaccuggcguacccgucaaauggaagcgcuaaggacuagugcaucacauuuaaaagcaucucagccuaccaugagaauaagagaaagaaaaugaagaucaauagcuuauucaucucuuuuucuuuuucguugguguaaagccaacacccugucuaaaaaacauaaauuucuuuaaucauuuugccucuuuucucugugcuucaauuaauaaaaaauggaaagaaccuagaucuaaaaaaaaaaaaaaaaaaaaaaaaaaaaaaaaaaaaaaaaaaaaaaaaaaaaaaaaaaaaaaaaugcaucccccccccccccccccccccccccccccccaaaggcucuuuucagagccaccagaauu

SEQ ID NO: 3280 - RNA, 1855 nt, Artificial Sequence
  mRNA product Design i-2 comprising derived and/or modified sequence from LASV(LP;Clade I)__AAF86701__GPC (opt11)
ggggcgcugccuacggagguggcagccaucuccuucucggcaucaagcuuaccaugggccaaaucaucaccuucuuccaagaagucccacacgucauagaagaagugaugaacaucguccucauagcccuaucacuccuugccauccucaaaggccucuacaacaucgcaaccugcggcaucaucggccucgucgccuuccucuuucucugcggcaagagcuguucccuaacccuuaaaggagguuacgaacuccaaacacuagagcuaaacauggaaacacuuaacaugaccaugccccuaagcugcaccaaaaacuccucacaccacuacauccgcgucggaaacgaaaccggccucgaacucacucucaccaacacguccaucaucaaccacaaauucugcaaccuaucugacgcccauaagaaaaauuuauacgaccacgcccuaaugagcaucaucucgaccuuccaccuuuccauccccaacuucaaccaauacgaagccauguccugcgacuucaauggcggaaaaauauccguccaauacaaccucucacacagcuacgccggggacgccgccgaacacugcggcaccgucgccaacggcguccuacaaaccuucaugcgcauggccuggggaggccgcuauauagcccucgauuccgguaaaggcaacugggacugcauaaugaccuccuaccaauaccuuaucauacaaaacaccacaugggaagaccacugccaauucucccgcccgagccccauuggauaccucggccuacucucucaacgcacuagagacaucuacaucucccgccgucuccucggcaccuucaccuggacccucuccgacucagaaggcaacgaaacacccggaggcuacugccuuacccgauggaugcucaucgaagcagaacuaaaaugcuucggcaacacugccgucgccaaauguaacgaaaaacacgacgaagaguucugcgacaugcuccgccucuucgacuucaacaaacaagccauccgucgccucaaagcugaagcacaaauguccauacagcucaucaacaaagccgucaacgcacuaaucaacgaccaacucaucaugaaaaaccaccuccgagacaucaugggcauaccauacugcaacuacuccaaauacugguaccugaaccacaccuccucuggccgaaccucccuaccaaagugcuggcucauaucaaacggcuccuaccuuaacgaaacccaauucucagacgacaucgaacaacaagcagacaacaugaucaccgaaaugcugcaaaaagaguacauagaacgccagggcaaaacaccccuuggccuugucgacauauucaucuucucaaccagcuucuaccucaucagcaucuuccuccaucucauaaaaauccccacccaucgucacaucgucggaaaaccaugcccaaaaccccaucgucucaaccacaugggcgucugcuccugcggucucuacaagcaccccggcguacccaccaaauggaagcgcuaaggacuagugcaucacauuuaaaagcaucucagccuaccaugagaauaagagaaagaaaaugaagaucaauagcuuauucaucucuuuuucuuuuucguugguguaaagccaacacccugucuaaaaaacauaaauuucuuuaaucauuuugccucuuuucucugugcuucaauuaauaaaaaauggaaagaaccuagaucuaaaaaaaaaaaaaaaaaaaaaaaaaaaaaaaaaaaaaaaaaaaaaaaaaaaaaaaaaaaaaaaaugcaucccccccccccccccccccccccccccccccaaaggcucuuuucagagccaccagaauu
